United States Patent Application Publication US 2009/0018031 A1 - sequence listing, part 5

SEQ ID NO: 2361 - DNA, 6000 bp, Homo sapiens
accttttacttatagcctgaaacctacttggggctttattctttggtgtgttgagaagacatgacgagttggtccatatgtttctaacgttcttataatattgacccagttgcattcttgttcaaagcagtatcttagctttcttgatagcagagatccaagacaatgaggtgaaaaaaaatcgtaagacatttaaattaccaccaacaaaaatcatttcatggaattttacattataagaaaaccagtctagactccctcaatgcaagaagccctactcttttttttttttttttttttttttttttttttttttttttttttttttttttttgagacggagtctcactctgttgcccaggctggagtgcagtagcgtgatctcggctcggttcactgcaacctccgcctcccaggttcaagcgattctcctgcctcagcctcctgagtatctgggattataggtgtgtgccaccacgcccagctaatttttgtatttttagtagagacgggggtttcaccatgttggtcaggctgctctcgaactggtgacctcgtgatccgcctgtgttggcctcccaaagagctgggattacaggtgtgagccactgcatccggcctggaagccctactctttacatgcaatggggttcagcatgtcccacctatacttgaacaatttcaggagtggggatcacaactgcttattcccttgcattgacaggcatttctctgtctaactttccttgagtcagaatctgattacaaattatcattagtcttcgtttccccttcacaattacaaagaggaagttagtttactcgtcaaataagtattagttattatatctctgaattcttgtcttccctactgtgtacactctctcgttctcttgtttctgttctcctaggaagaagtatcagcatcccctcctatccaagcctactccaaagctaatctcatagtttttgtccttgacacctgctccccttttctccctttttaggaactttgctccatctcctggtttcccttagctccagcttacaaatacacccattctactctctattcaacattgcttatctactccaaaagatagtctcatctcccattttcctgtcaccatcaaatttatggaaagaattgtgcatggtcactacccccagtttctcctcactccctatggtaatttatctgccttctttctcctcagctttataggaatctatctttgaaggacagtaatgtctttgaaatgaccttatcagtcagtaggcttctctaccctctgtagcatataatattgatgctgctcctccttctgccttggcatcttccttagactcccagatgcagaggtctcctggttatcttcccatttccctaattgaccttctgtatcatttcctcttttattctttggcctccataaaaacaaaacaaaacagccttccttaaggtagtatccttagaccacttttcttttcactgtcctctcttcctaggcaaatttacctgatttcacggttttatttattattctaacagagataacctcgaacctccatctccagctcaaccctgacttatctccataattccatttcaagctcctgctgaacatctccatttgaatatcctgatgccacctcaaactcatgataccacaaacctaatttcctcccaaagctatttattctctggaattcctaattttgttgaggacattaccttaaccccaatcagccaagttctagatctacaagttgtttttaagctctcctgttttctccacaatttccatctactttctttctgcctgtcccctcctatttccattgtcccttctttttttttttttttttttttttttgagacagagtcactctgtcacccagggtggagtgcagtggcacgatcttgacgcactgcaacatctgcctcctggttcaagtggttctcgtgcctcagcctcctgagtagctgggactacagctgggactacatggtgcacaccaccatgcctggctaagtttagtattattattatttttttttgagatggtgtctcactctgttgcccaggctggagtgtggtggtgcggtctcggcttactgcaacctccatctcccaggttcaagcgattctccttctcagcctcccgagtagctgggattacaggcacctgccaccacgcccagctaattttttctatttttattagagacagggtatcaccatgttggccagcctggtctcaaactcttgacctcatgatcctagtagagacagggttttaccatgttggctaggctggaccttgaattcctgacctcaagtgatctgcccgcctcagcctcccaaatgctgggattacaggcatgagccaccatgccagccgtcccttcttaattcaggcccttttaacctcttgctgaactgtcttgatagtacaatcggcatgttcatttcccactttcaacctactacatctgctgctgccagattgtggtggagttgaatcttatgtgaagtataagtattgaagtattcaagtcattgtttatgaagaaaatctcatacaatcaacattacccttgaaaatgccttatattgtctataaagtagaatctacagacactgcttctcagtaagttcaacactgctagtttttcctctacttttggaacagattacttttcttttggttgaacaccagatgaagtcatctgcttggttttaggggtagagtcgtatgaaaaatatgtatctttaaacaccagaatcacattcaacactagcctatttgagttcatattagttactcatgagtgtgatttaaatctactggaatatctaaaagcacagctctgatctccattatttctatgctaaaaaacctttagtggctctccattgcctattgagaaggcccatttttttaacatggcacttaaaactgttcactgtctgacaccaacccccctttctcacccagcttatgctccagaatggaatgcctgtgatccccatgcccgctctgcacattccagtctccatccatactttctctcacagtggcctggaacgctttccccttacttcccatctctgctgggctcagccattcttcacaggtcaactcacatgctgcctcttctaagattccttcacagaatcttctctccagaccctgtccagccaaaatcgtatttccctcctctgaactgcagtcgctcctcatttgtactgtgtttatggcaagtatcattttctatctagaattgtcatttctgttcatgttttacaagtctataaacaccttcagggcaggggcagtgcttgaatcttcttcatagttatgtatataccaccatttccagcttcaaacatgcagttttcaacagatttcaatgaaaagataaattaaataatgtagcttcccatctcctccccatgcagaatgtgctctagtttggcagtgcccaaggacttgggacccagtgctctagaaagagcagcaaactcttcctaatcccagcagcacctccatcaggcaatgaatgaactcaacaagaagggggatgggtaaaacgttatatgcaaatagttgcactctgccccttcttaaagagcaaaataaacatgattttttaaaaagaccatggaagttgacaatacaatggctttttcacagaaggcttcaggatatgccaagttctgttattggggatggagacattttgtccccattgtgtagaaagagactgatgaggtctcttaagcaatctcgcagacctactgttttgaagcatcagaacatttttctgtgcatctcaaattcattggaactttaagtttgtggagagaaaaatcctagttcccctcttcccccatctcatctctctcccaatagacacaggatgttttacctcgggaactcaaagttgaaggggagctcagatcccaggggtgtactgggtataacagccccttgaatcttttctgaatcatactccacactccataaatacaactctacctccgctcaattaaggaaggtctgggggttggggagcctatctgacatctttcaagggatgggggttgaggagcctatctgacatctttcaagggatgggggttggggagcctatcgacatctttcaagggatggggcctctatcttcattatggacatgcagaaaatgtactctgccccagtgacagacagagggagtttgacattgaatttacacccgtagcgttgactttagactgattagggaaaatgactgccctgcacccttgtaaaatcttaatgttccgtgagaagtgcaccgtgctgtctgatgtacagtgtttaggtttgtcttgaccttattaaatcatggaaagcggctcctatgagggaagttttttttctttttcttttctttttttttttttaatttcctgcacgattattcaggtggcttttcctgtttctactccccctcctggactcgggtccttaattactattgcagagaactggaaggatgcctgctctgctctcccagcacggtctcctctgctcggcctccaggctactcgcccccacccttttctccctctagccccgcctcctccgcgcaccccgtggccagcagctagacagctgtgttcaatcagaaaccacttacaactccagacgattcgaaggggaaacttcggcgtgaagtgcagctccgctccggctccctctagctttctttccttctctggaatccgaggcgcggatcttcctcgccccaccgccctagttttttcgggagctcgccggtgccctctagggtgtcggctcgtgctgggaagtgccctccatcctggtaatggggggcggcgaggcaccgtaggagtggcgaggcggcgcccagggtggcactgccccggaacggggcgctgggtgcgcgcgggagggtccccgcgcgggctccgccgctgccgcagctgcgagcgcgccgcgccaccgagcctcctgcagcaatggctcgtccgtgaaacgcgagccacggctgctctttttaagagtgcctgcatcctccgtttgcgcttcgcaactgtcctgggtgaaaatggctgtctagactaaaatgtggcagaagggaccaagcagtggatattgagcctgtgaagtccaactcttaagctccgagacctgggggactgagagcccagctctgaaaagtgcatcatgaattccggagttgccatgaaatatggaaacgactcctcggccgagctgagtgaggtaagaaacagctgaggtcgggagctagggtttctcgggcgtttgcttttccacaaatccccctcccctcgacctccccacagccctacaccctatccccctgtgctcccagtctggaggcagcgcaattgaagattagtagattttctggatcttgttttaacttgtagtgctactcaggaaatgacctgaactggcttgatatttcagtctgaaatgagtggcttaaaaaagaaacaacctctcaccaagccgcgaggcgttttactcacgacagtctgcatcccttgttccttcccacccgcttccactaatttatatacacccttttatttccctgatcggtaaaatacacggacattcccgatgagtttaagccgacggtaactaatttggtgggggtggtggtggtgagggggacgcattggattatttcatctcccacttggctcccacgtgcgatgcgtttggctacgttcaggcaaggtggtctcttccctaggctgagatgaatgacccgcgctggggaggggtctggggagaaagcacttcaaagccgctttagaactttatttcctgcccggatctggactcctgagtctttgaggcaagcgcatttgcaattcctgggctcccactgtaacctatccacttgagtgtttgagaccagctttgaaattaaagctacatcaaacactatgc

SEQ ID NO: 2362 - DNA, 6000 bp, Homo sapiens
tgaaatttcacatgtttcatatcaattcagaagcaaattctttcctgggatgtggaacctatctgttcagccatttctgagttacccaagcatgagaaaaatgtttaggaaattcgtcaagatccactttttgtgtgtttaaatttaaacatccagagctgttgtacacattcggtaaggagaaaaaatattctttgctttgaaatataattggttgagctttactgtccacattctgtatacatggaatgtggttatagagagatgtgttgaaattttgcaaaatcctttgggtttccagaccctccatacatgttgtacttagaaaaatgtttttttatttcttttttagtcttaaactggcatttctctagaaaaatttgagtgtaacagctcctgtctggctgtattgtcaaacaacagaagttttattctataaaaattagaaaaattaggattaaaaaatttatacatatataaatttaaatatatatataaactcttgggctttggttcttgttttcttgtagataggaatatttgtgctgttggtagcaactttcaataaaatattattgggtagtagatagtgtcttagtctgttttctgtggcttataacagaatacctgaacctggggtaatatacaaataaatgaaatttatttattgtagttctggaggctgggaagtccaaagttgaggacacacatttggtgagtgccttcttgctggtggaaactctgcaggctgaagacggcacaaggcatcgcatggcaaaggggctgagtatgctagctcaggactctcttccttttgtcataaagccaacagtctcattcccatgatacccattaatccacgaatgatttagtctatttatgagggacgagctttcatgatccaactacctctcaatactgccacactggggattgtttcaacgtgaatttcaagtgagtacaaacattcaaccatagcattctgtccctgcccccccaaacttatgtccttctcacatacaaatacatttatttcattctgatagccccaaagtcttaacttgtttcagcaccaactcagaagtccaaagtccagaatttcatcttcctgtgaaatcaaagcaaattatccactttcaagatacaataatggtataggcataaaacagacattcccattccaaaaggaaggaataaacaaaaagaataaagcagcatgccccaagaaagtccaaaacctagcagggcagacattacatcttaaagctggagaataatctttttttttttttttttttttttttttgagacggagtctcgctctgtcgcccaggctggagtgcagtggcgggatctcggctcactgcaagctccgcctcccgggttcacgccattctcctgcctcagcctcccaagtagctgggactacaggcgcccgccactacgcccggctaattttttgtatttttagtagatacggggtttcaccgttttagccgggatggtctcgatctcctgacctcgtgatccgcccgcctcggcctcccaaagtgctgggattacaggcgtgagccaccgcgcccggccgaataatcttttttgactccacatgctgcctcttggacacactagagcaacagttgggcccacaaggccttagacagccccacgtctatggctttgctgggtacagcccatacagctgcccatacaggttggagcctggtgcctgaagctttctcaagtagatgttgcatgctgttggtgactccacagttctggggttctggtagtggccctgttcccacagctccactaggcattgctctgttggaaactctctgcagcagctctgaccctacaattctgcttaacattgccttagttggagctctctgaagtgctctgcccttgttacaagcctttgcctggacccaggctttcagcaaaaatcctttgacatctaggtggagaccccacatctccacagctctcgctttctgcaaacctgaagaattataatggcatcatatggatgccattaaggcctatggttctcatcttcttgagtgacaggtcaattcacacctaaagcttcttgagccacagctggcatgtccaaaaagcactgtaccagaatttgggaagtaaagacctgagagagaccttggcagcaagcccatgaaaggtgcctcatgtctgtctcctgaaaccattctgtcctcctgcctctgggtctgtgatgagaggaacaactcaaagttctctgaaatgccatcgaggtctttccttctcgtaatgatactttcttcctttactaatctctggaacaaaaggttgctgggctacacccttggtttcctctcccaaacacaccttttcactcttcacatggccaggctgagagttttccaaatctttccactttgcttctcttatgattgtaaattccacctttaaagtttttttccccctctcacagcttgatgtaagtggttaaaagtagccatgctgcagcctgaatgctttactgcttagatatttctttggccagataccccagtttctctctctcaagttcagccttccagaaagccctcaggcatagaacagttcagctaagttctttgccaatttataacaaggatggtctttactccattttcttgtaccttgttcctcagttccatctgagaccttgtcagaatggcctttactgtccatagttccatcagcattctgattatgaccatttaaccaatttctaaggagttccaaactttccctgttcttcctgtcttctcagccctcactagaacctaggctttttctagactgctgcttcattcttgtagcctctgctcattatccagtttcaaagctgcttctccattttcaggtattcgttttcgttaacaccccactcccggtactaatttctggtcttgtcaattttctgttgcttagaacagactacctgaaactagggtgatttataaagaaatgaatttatttcttacagttctggagaatgaaaagtccaaggtcaatgggccaccctgctggtggggactctgtgcagagtcccaaaacagtgcagggcatcacatggcaagggggctgagcctgctaactcaggtctctccttctcttcttataaagtcactagtcccactcccatgataacccattaactcattaactcatgaatctatgattttagtgccctgaaatactgggaacttagagaataataaagaagtaaagtaggaataggtagatggggtggagaggaggagaaagagagcagagattccttccttctgacctagcagacattcccaagacatatggacttgttccagttatatattgctgcataacaaatcacctcaaaacttaatggcttaaaacaacaatttttaattattatcttcacagctctgggggttggttagccagttttgctcagggtctccaatgcagttgcagcatctagagctagcatcatctctcactcatgtctggcacctagtctgggaagattctaagatccagggctagaacagctgtagctctttggtcatctccttttttctttacatggtctttctgcatggtttctccagcttcagggtagccaaacttcttttcaggcagctcaaggcttcaaaggtaagtgtcccaagggagagagccaagtgcaatctgcattgccttttctaacctagtctcagaagtcaaggcagtcacaagtccaatccaggtttaggggaagcaacagactccacctcttgatgaggggtgcaccaaagaatctgtggacatattttaaaaccaccagagaacttcacacgcctctctggcagaaaatccaggacagaataatgagtcattcacgaaaccacaaattgcttcactgtggtttccctttggctatgggggaatagtgcagtgtttaaaggctcctgctctggagttaggctgcccgggcttgcctctgccctaacacttactaaacctggaaccttgagcaggtcttggtacctcagttttcttacctgtaaattgggaacaatgagagctaacagttgttgagcacttactaggtgtcagacattgtcctaactgcattatgtctgctctccttttatatgtaagataactctatgaggtacttatctattaatacttcctaagtcgtaggattgataataaaagaggcatcttccaggtctgtagtgtggatcaaatgagaccatctattatgttcgctcttggcattattaaagctgttgggggaaattctagtgatgcctggccagtagagtgagccgtttccagaaattgacccaacgtacacaatgccacacagcgtgcagactcttcccagtacagagtgggagccaagatgagggctgcgagggccaggtttcttgacaggtgtcaaaatttcataaaaaggccagtcattccggttctcattggtggctatgggtacagaacccggaacaatcctggagagtgggattacaagcaccgttttgagtttgcagaaggagagtgtttatatagcttctctggaaaaggaagccatgactccgggcggtcggagaaggtctgccgggagtacacctgccctctgcctgaagcgtccccaagtgtcccgggcccgcgtcgttgccggatgcacaatgctgacacccttcccgggggcttccagtgtattctgcctcctcttgtgttcccgttgccacccttagctccctgactcttccagccaccttcccctcctccctcttccctgaggtgcctcctcgggcgattccagagcgcccatcttcccagtccgggcaaaacccggagaggtggaatccctcgcccggagcgccccggcggccactgggcatgctccgttgtcaggcaagttcggggctgcaggcagcttgcgcgccgcgcggattccagctgcggtcgcgcgtactcctcctcccaagtagggagcgggcgcatgatggcggccgcggcggcagcggctgcggggagctccagcagcggcggcggcggcggcggcagcggcagcagcagcagcagcagcgacacgtccagcaccggcgaggaggagaggatgcggcgcctcttccagacgtgcgacggcgacggggacggatacatcagcaggtacgcggggaggtacgaggaaaccgacaggagcgagatcagtccctccgcgcgcccttgacccctgctctgccccctcgccccaacttgcggcaagttgctcagaagctcgcgggaaaagttggccgcgactccgagagcgcgtagccggctcggccacgaaggccgaggggactgctctgttcgccttgcgggggtgccagttggtccaacttttcccagcgctgtctttgtctaggcgttgggagacatctccttaggatgcgcactcttccgggggcttggagtgttcttccctgtgggaaaaggagttctggccgcttgtcccaggtaggaggggctgccccacagcctcggggtcctgggcatcaagatgccgcagcacggggcagcgatctgcccggcggcttggtggacaccccagggccgcaccgggaggagatgagctaagcgacagcctcggacagggaaataacctgtgaagaaactttcttgtgccgcagaacccatgaattccaaacttcagagcccaaagaatgggtatcgtttgccacccagtattgatttaaacgcagtagcctgagaggaacgaagcgctcaggagcaaactagggctagacccgactcctacccggctctgtgcgctgaccaggtgagcttcggcgtggctccgggcgcctccgcgcctccactcacaaacaaactttggggtgtttgcttcggatcccccgcacttcctacagaggcggtatttaagcttcctgcctcccggcttggccaaataattacttctgcccaaatttgtgtcacttagactct

SEQ ID NO: 2363 - DNA, 6000 bp, Homo sapiens
tgtagtctagtttaggtaaatcaaatttggaaggacacgcaccagattatcaagttttcaaagcactgcaattgttttatttattttaacatgtaattttagacatatggggtaggatatcttgtcatgtgtacagtgttttctgaaatgtaccacataaattgaagaaaaaagctgagtaaggacaaagaggttgagctatgtactcatctcagataaatatatgaaacctttgaaattatgaccagtactgttagatttatggcagtgagtatacacccctcactctttgagagagtggctctcactcataacttcttctttatatttatcatctttatattcatatggcatctctattttcaatgtcttacaaatttctccctctcctgtaaccctttaggctgaaatttcacatgtttcatatcaattcagaagcaaattctttcctgggatgtggaacctatctgttcagccatttctgagttacccaagcatgagaaaaatgtttaggaaattcgtcaagatccactttttgtgtgtttaaatttaaacatccagagctgttgtacacattcggtaaggagaaaaaatattctttgctttgaaatataattggttgagctttactgtccacattctgtatacatggaatgtggttatagagagatgtgttgaaattttgcaaaatcctttgggtttccagaccctccatacatgttgtacttagaaaaatgtttttttatttcttttttagtcttaaactggcatttctctagaaaaatttgagtgtaacagctcctgtctggctgtattgtcaaacaacagaagttttattctataaaaattagaaaaattaggattaaaaaatttatacatatataaatttaaatatatatataaactcttgggctttggttcttgttttcttgtagataggaatatttgtgctgttggtagcaactttcaataaaatattattgggtagtagatagtgtcttagtctgttttctgtggcttataacagaatacctgaacctggggtaatatacaaataaatgaaatttatttattgtagttctggaggctgggaagtccaaagttgaggacacacatttggtgagtgccttcttgctggtggaaactctgcaggctgaagacggcacaaggcatcgcatggcaaaggggctgagtatgctagctcaggactctcttccttttgtcataaagccaacagtctcattcccatgatacccattaatccacgaatgatttagtctatttatgagggacgagctttcatgatccaactacctctcaatactgccacactggggattgtttcaacgtgaatttcaagtgagtacaaacattcaaccatagcattctgtccctgcccccccaaacttatgtccttctcacatacaaatacatttatttcattctgatagccccaaagtcttaacttgtttcagcaccaactcagaagtccaaagtccagaatttcatcttcctgtgaaatcaaagcaaattatccactttcaagatacaataatggtataggcataaaacagacattcccattccaaaaggaaggaataaacaaaaagaataaagcagcatgccccaagaaagtccaaaacctagcagggcagacattacatcttaaagctggagaataatctttttttttttttttttttttttttttgagacggagtctcgctctgtcgcccaggctggagtgcagtggcgggatctcggctcactgcaagctccgcctcccgggttcacgccattctcctgcctcagcctcccaagtagctgggactacaggcgcccgccactacgcccggctaattttttgtatttttagtagatacggggtttcaccgttttagccgggatggtctcgatctcctgacctcgtgatccgcccgcctcggcctcccaaagtgctgggattacaggcgtgagccaccgcgcccggccgaataatcttttttgactccacatgctgcctcttggacacactagagcaacagttgggcccacaaggccttagacagccccacgtctatggctttgctgggtacagcccatacagctgcccatacaggttggagcctggtgcctgaagctttctcaagtagatgttgcatgctgttggtgactccacagttctggggttctggtagtggccctgttcccacagctccactaggcattgctctgttggaaactctctgcagcagctctgaccctacaattctgcttaacattgccttagttggagctctctgaagtgctctgcccttgttacaagcctttgcctggacccaggctttcagcaaaaatcctttgacatctaggtggagaccccacatctccacagctctcgctttctgcaaacctgaagaattataatggcatcatatggatgccattaaggcctatggttctcatcttcttgagtgacaggtcaattcacacctaaagcttcttgagccacagctggcatgtccaaaaagcactgtaccagaatttgggaagtaaagacctgagagagaccttggcagcaagcccatgaaaggtgcctcatgtctgtctcctgaaaccattctgtcctcctgcctctgggtctgtgatgagaggaacaactcaaagttctctgaaatgccatcgaggtctttccttctcgtaatgatactttcttcctttactaatctctggaacaaaaggttgctgggctacacccttggtttcctctcccaaacacaccttttcactcttcacatggccaggctgagagttttccaaatctttccactttgcttctcttatgattgtaaattccacctttaaagtttttttccccctctcacagcttgatgtaagtggttaaaagtagccatgctgcagcctgaatgctttactgcttagatatttctttggccagataccccagtttctctctctcaagttcagccttccagaaagccctcaggcatagaacagttcagctaagttctttgccaatttataacaaggatggtctttactccattttcttgtaccttgttcctcagttccatctgagaccttgtcagaatggcctttactgtccatagttccatcagcattctgattatgaccatttaaccaatttctaaggagttccaaactttccctgttcttcctgtcttctcagccctcactagaacctaggctttttctagactgctgcttcattcttgtagcctctgctcattatccagtttcaaagctgcttctccattttcaggtattcgttttcgttaacaccccactcccggtactaatttctggtcttgtcaattttctgttgcttagaacagactacctgaaactagggtgatttataaagaaatgaatttatttcttacagttctggagaatgaaaagtccaaggtcaatgggccaccctgctggtggggactctgtgcagagtcccaaaacagtgcagggcatcacatggcaagggggctgagcctgctaactcaggtctctccttctcttcttataaagtcactagtcccactcccatgataacccattaactcattaactcatgaatctatgattttagtgccctgaaatactgggaacttagagaataataaagaagtaaagtaggaataggtagatggggtggagaggaggagaaagagagcagagattccttccttctgacctagcagacattcccaagacatatggacttgttccagttatatattgctgcataacaaatcacctcaaaacttaatggcttaaaacaacaatttttaattattatcttcacagctctgggggttggttagccagttttgctcagggtctccaatgcagttgcagcatctagagctagcatcatctctcactcatgtctggcacctagtctgggaagattctaagatccagggctagaacagctgtagctctttggtcatctccttttttctttacatggtctttctgcatggtttctccagcttcagggtagccaaacttcttttcaggcagctcaaggcttcaaaggtaagtgtcccaagggagagagccaagtgcaatctgcattgccttttctaacctagtctcagaagtcaaggcagtcacaagtccaatccaggtttaggggaagcaacagactccacctcttgatgaggggtgcaccaaagaatctgtggacatattttaaaaccaccagagaacttcacacgcctctctggcagaaaatccaggacagaataatgagtcattcacgaaaccacaaattgcttcactgtggtttccctttggctatgggggaatagtgcagtgtttaaaggctcctgctctggagttaggctgcccgggcttgcctctgccctaacacttactaaacctggaaccttgagcaggtcttggtacctcagttttcttacctgtaaattgggaacaatgagagctaacagttgttgagcacttactaggtgtcagacattgtcctaactgcattatgtctgctctccttttatatgtaagataactctatgaggtacttatctattaatacttcctaagtcgtaggattgataataaaagaggcatcttccaggtctgtagtgtggatcaaatgagaccatctattatgttcgctcttggcattattaaagctgttgggggaaattctagtgatgcctggccagtagagtgagccgtttccagaaattgacccaacgtacacaatgccacacagcgtgcagactcttcccagtacagagtgggagccaagatgagggctgcgagggccaggtttcttgacaggtgtcaaaatttcataaaaaggccagtcattccggttctcattggtggctatgggtacagaacccggaacaatcctggagagtgggattacaagcaccgttttgagtttgcagaaggagagtgtttatatagcttctctggaaaaggaagccatgactccgggcggtcggagaaggtctgccgggagtacacctgccctctgcctgaagcgtccccaagtgtcccgggcccgcgtcgttgccggatgcacaatgctgacacccttcccgggggcttccagtgtattctgcctcctcttgtgttcccgttgccacccttagctccctgactcttccagccaccttcccctcctccctcttccctgaggtgcctcctcgggcgattccagagcgcccatcttcccagtccgggcaaaacccggagaggtggaatccctcgcccggagcgccccggcggccactgggcatgctccgttgtcaggcaagttcggggctgcaggcagcttgcgcgccgcgcggattccagctgcggtcgcgcgtactcctcctcccaagtagggagcgggcgcatgatggcggccgcggcggcagcggctgcggggagctccagcagcggcggcggcggcggcggcagcggcagcagcagcagcagcagcgacacgtccagcaccggcgaggaggagaggatgcggcgcctcttccagacgtgcgacggcgacggggacggatacatcagcaggtacgcggggaggtacgaggaaaccgacaggagcgagatcagtccctccgcgcgcccttgacccctgctctgccccctcgccccaacttgcggcaagttgctcagaagctcgcgggaaaagttggccgcgactccgagagcgcgtagccggctcggccacgaaggccgaggggactgctctgttcgccttgcgggggtgccagttggtccaacttttcccagcgctgtctttgtctaggcgttgggagacatctccttaggatgcgcactcttccgggggcttggagtgttcttccctgtgggaaaaggagttctggccgcttgtcccaggtaggaggggctgccccacagcctcggggtcctgggcatcaagatgccgcagcacggggcagcgatctgcccggcggcttggtg

SEQ ID NO: 2364 - DNA, 6000 bp, Homo sapiens
ttttataacagtgcaacgtttattctgctgtgtcatacagcatattttgccaaacctttgagaggggaggggctggtctggtgccccagtgtatctccagaaccaaacctggggttcaccaaaaagcaggcctgcgtgattcatatgtgttgaatgaattaagggactttctttctctccagttaggctccttgcaggcagggtgatgacccttggattctgccttcaagcttttggatgcttttatttctggcttgtgttctgcaattcacagtttaggactgcctgcctcccaggtttctgtgaaaatcgagatgaaggctttgagcatttcagagagccctactacttctggacctggaacctggaaggcatgctggggagtttgtctgctttggggaccgtggccccctctctgggtagcaggctccacaggtagcaggtctcccagtcgaaaacctagttcaggtcgggcgccgtggctcatgcctataatctcagcactttgggaggccgaggcggtggatcacctgaggtcaggagttggagaacagcctggccaatgtggtgaaactccatctccaccaaaaatacaaaaattagctgggcatggtggcgggtgcctgtaatcccagctacttgggaggctgaggcaggagaattgctgaacccctggaggtagaggttgcagtgagccaagatcacgtcactgcactccagcctgggtgacagagcgagactccgtctcaaaaaaacaaaacaaaaaaacacctagtttaaacctcactggcacctgcacctcagctctcacaaactctcatttctgagcacacactcatctctatcagcagaggatttaaccacaggttgccaagaaatgtctgtatctgagagaattcataatctgagatagaaggaacactaaactccagaggaagaggggtcacacatcaacttaactaggatttactgagtgcctaccatggtagccactcttcgggggagtgcaaggatggcggcatcaccttagtgtggtccgtgtggccctgtgcattgatgtgtgtgtgcatggtgacatgttgggagccatgcttctgggcttcaggactaactgcagcccacttagggggtgaacagtgttttgagagcctgagggaggggactggggacaagaattgtctgtcagggtagaggctcccacagggtgtgtgaatgtgtgtgtgagatgatcttgccttcagcatcctgattgcagaagtcacttcaaaggagcccctgccagccagttagcctcctcttgccagcacagaaaaatccaggtcccaatacagagaggccacacaatgaattcaccctcattgagtgaggctatggatgagaggcatctgtaaggaagaccttgcacagtgcagggtgctggctaccctcagctaacccctagctcgcttcagctgctgggcatgaggaacctgcttagatttctcacagaaaacatggagagttctttttctcacagaaaaaatgtagagtttgttccccagagtttgttcccaccatgtagaaagtgaccagtggtgaaaaggaaacataggaaagttaaggaccaaagggtccaaggagggaaaagaaaggacttctggttggttgctttgcgggcattttgaagagatcaggcatatgctctgggccttaaaaaaagacacagagattgaagtggtggggtgggcaagggagagagagatggagagagggtgagtgttgccaagtatcctgaggagacagggatgaggggacaaacacagtgtgttcagataatggaaatacagtgaaaggttcatgcgttcctgttcatacatttcatttgacttatgtcttacagtttggaaataattttgatagtctaattttacaattaggagagatggagagagattatctctattttacagatgagaaaactgagccccagagagggacagtaacttgctaagatcacatagcaagtggaaaaagcacaataagaacccaggctttcagactcaaatcctgtgttctcttttcatccccctttagtttcatcttccctactgccaagggtagggaagctgtcagggacagaaggttggaatgggaccccaggacaagactgagcagagatttgaatgtggggctgaatgtaggggagctcagaaggctcctgggtggccccgagtgttagggagatcatccgagttagggagatcattccagtgcagaggcaccatcttccccatctacctgggcaaggcaaggaggcccaaggggaggttggggcaacaatagtctggtcctggactatgaaatcacaacccgatacagggaaggaagacccagaagaccaggtgggaaagaaaagggctggctccgaattaataagagcctacaggagcctatgtgttctgctggggatcacagaatgttctacatcttagaatgtgattcatcaaaagccattacaataaaaatgttgggtacttaaacatggcttagctttatttcactgatttggagtatagcacccctagtcataataagcatattcttacaggcttcaaaataaagtaagaatccctaaggttaaaaaaaaaaaaaaggtcaaagatgtaaatgtaaatgacagtttcattggtaaatcctaactggggaatttctcctaagcaaaaaattattgatatgcacaaagatttagctaatagtgttgtttgtattacgaaaaaatggaaataacctaactgtcctacaataggggattaattgggtaaatttttatttatccttgtgaaagaataatgtatacctattacaaatgacattgcataagtacatttcatgacatggaaagatgctcattatggctaaatatacatatgcatatacgggtatatttatacctgtatctgtgaattaaaattaagtttttgttttaaagcattttttatagtgtcctgttgccttcacagggtcactgtggtcaacttatcagaccacaaagatgcaaacttcctttccctaatctcatcctgaattttccagtggatgtgtcaggttctcaggggaaggacaagcatctatttgctgtaccaagaaaggatcccacgactcaggggtcacttgttttctcttattcttgctcagaaggtcttggtccctgtagcaagtccccacttccatttgtcacttaaagtaccccaaaacccacctttccattccagagtgtcattgccctccactttgcttaacactcagttaggttccttcctcagtttctcctacctcctttcctctcctagctcctgacccacctctatctggtagacagttttgcccattcctgctggtatcctgggaaccaggtttggcattggtcacagcactcagattgcaatgcgccagaatgggattaacccatgcatttcctctacgggagggaggtagagtgactggcaagtcgaatgttgcatgggtgtgtctatttatagcctgcaaaatggggtgctgccctggagggagagctggggtgaaggaaatgacacgcctgggagagtaacttacttctgcaggagctttagggagatgaaggaagaagcctcctgggccagagttttggatggaaaatgaacacccagtcaagtctctaggactatacgtggggcggggactagttgtgcgcgagagttaagtaggggccttaccaaggagcatgggacctgggctccccaaccctttggctagccccatggcgttgatcagccctgagctaattcctccatgctgcccagaacctctctgggccaagccctggggactcagagatgacagcaatgcttccattgcggaactcccatacgcgggccacagggaggctctggaggcggcctgaggcaagagtgctaggagggatcagagctagcccacccctaccctcactcagccgtctgggcttctctgaaccccttctcctcctctgttccctaaagccagccagggggagtcccagggaggcagaccgaaaaggggtggggtgtcatcctggtcactattagaccctgcaacggcgaccttgaaaactactcagcgtctgttgcccgagtggagcatagtgctttacaatctcttcccatcacagcaaaccatcaaggtagggctactattattttatggttgaaaaacagaggtcctgcgtcccttgggggctgtgccagcagcggccaagttgggatttcccctggtccagcagccccagacagcacacggggcagggtaggctttctgccttcttcacttccccagggcaggtgagtgacctggagggagggggtcacccctaaaaacaggggtagtgctaggactgaaaccctcccttcttgatatcccactggcaagcttgaggagccaggctgccagtcgggagattcggcccagtgttcccactggagagggcggcaagtgcccgggcgatcccctcacctgcgttcgggagatatacccccgcccccgccccgccaggagggtgaaaagatggccccaggagccagccggctgggacaaggcggagtgagaggacaggctggggccaggggcgctgggctgtcccgggcagccctcctccgggcaagccggagcaggggtggattgggagcgctcggggcgggcccgcggtggccccggggcggtggcgcccggccggagagggtggggcggagcagccgccctgtacttccccttcgccgctagctctacaacagcctgatttccccgaaatgacggcacgcagccggccaatgggcgcccgcgcggctgtccgggggcggggccggccagggctggggaatcccgctaagtgtttggattgctcggtggcgccgctgccctggcagagctcgccactccttagtcgaggcaagacgtgcgcccgagccccgccgaaccgaggccacccggagccgtgcccagtccacgccggccgtgcccggcggccttaagaacccggcaacctctgccttcttccctcttccactcggagtcgcgctccgcgcgccctcactgcagcccctgcgtcgccgggaccctcgcgcgcgaccgccgaatcgctcctgcagcagaggtgagtacgcctttgaggcgcggggcaccggcggcgtcgaataaaaggcgcgcggggcaccaggaagtggggggtcgaaagctccaggctggagactcgccggcgcgcggcgttgcccgggcctccgcgcgggctccggggggcgccggaggagctgcgagccgcgggccgcggcgcggggagggcgggacgcggcgtggaccgcccacccggacgaggctgccggcgcccggcagctttcgcagatctgcgtgcgcgcagccgccaggggcctgtaggtggcccgctatgttcgtcccgcgcatccacacgccgtgccggggaccgagtgtcagcccacgcgtgggcgcccagtgctcccggctttcggcggtcccagctccgcgcccaggcgacaggttttgggctccctgtgctggtggcaagggctggcttactgcccaggtggctggagggaatcgtgacctacggagactgcgggaagaggcgccacaggtgttccttgggccacttctccagaggaggggaaaccgggccggaagggttagcgtcctggtcttagcgttgtgggcgctgtggctgtcaggaaggcgtagaatggattcaggggggcgggagggggctgttcagggtgacggctagccctttgctagctagtggttacaactcaagtcaagggaatttcttcttggcatcaagcaaaagaagtccctcccttcccaaaggatttgaattttgagcgaaaagttctgaaattagggtatctgtgcattttgtctcttttcctgcatatgaatcctgaagccatcacttgcatgcctgtctcctccagagactggctgggaggggctgaagga

SEQ ID NO: 2365 - DNA, 6000 bp, Homo sapiens
agcactttgggagggtggttcatgaggtcaagagatcgagaccatcctggccaacatagtgaaaccccgtctctactaaaaatacaaaaattagctgggcttggtggtgcacgcctgtagtcccagctactcaggaggctgaggcaggagaatcgcttgaacccgggaggcagaggttgcagtgagccgagattgcgccactgcactccagcctggcaacagagcgagactctgtctcaaaaacaaaaacaacaacaacaacaacaaaaaacaaagaataaagaagttctctattaggtataaaacagtatctcatagtagttttattttttatttcattaattttagcaccagtgaaactaaatattttttggaagtagtagtttactaagaagtggagacttcactgatttgcctttttattttagggattaatcattttgattacaaatcttttccaccccaatcctagagcttttatcttagttttatagtttccattgttacaaagttgaaatttttttgtaatggaacctggttaccttggcatgtccatttttttccttcaactcactattttttttctgaagtattttaaattacagacaacatgacacactatcactaatacttccatatgcatctcaaaaaagatcattttcttacatagcaaaatattatcacaccaaatacaatgaaattaacaagaattattattatttttgagatagagtcctgctctgtcacccaggctggagtgcagtggcgtgatcttggctcactgcaacctctacctcccgggttcagcgattttcctgcctcagcctcctgagtagctaggactacaggtgcatgccaccaggcccggctaattttttgcatttttagtagagacggggtttcaccgtgttagccaggatggtctcaatctcctggcctcatgatccgcctgcctcagagaatttttttattatctaatttccagtctacattgaaatttccctacttatctcccaaatttccttcacacatctatggcaaaaccagtttccaaactaggaccatgcattccattggggtggtatgtatctcaaatctcttaatttgcaacaaaatgttttttaataagtcttttaaaatctacaatagtctttgctttaatgataatgatctcctgagagcctgtgccagtgtcttgtaacagtttctagcttctggatttgccttttccaaccctgtgttgctgttagcttaatccttgtaattcctgtgaactgaaagttacatctaaaggtatgattagattcaagttcaacttttttccgtttttaagaaagcaaaactgcataagagataatgttgggtacttcatgctaagaccagagacaagcaatatcttatctcagtgattgctaatttcttatgctactttgggtcataaaattcccctttaaaagtagaggtaattacatttcttgcttcttcttttattgcttcccgaaatatctttctgaaattttatccaccagaacttacagtggtaagtaaagtaaagtgtagatttgcttttttcttcctactgatatccaagtctccacagtattcatttaaatggtcttggtggtggccgggcacgctggctcacgcctgtaatcccagcactttgggagcccgaggcgggcggatcgcgaggtcaggggatagagaccatcctggctaacacggtgaaaccccgtctctactaaaaatacaaaaattagccgggcgcggtggcgggcgcctgtagtcccagctacagtcctcagaggctgaggcagtagaatggcgtgaacccgggaggcggagcttccagtgagctgagatcgcgccactgcactccaacctgggcaacagagagagactccgtcttaaaaaaaaaaaaaaaaaaaaaaaaaggtcttggtggtttacacaaatgtttatatttgccaaaacacatggaattgtaccctggaaaagggtgaattttactgtatgttaattatgcttcaataaatctgacttaaaaaatggtcttggccaggcgcagtggctcacacctgtaatcccagcactttgggaggccgaggcgggtggatcacaaggttaggagttcgagaccagcttgaccaacatggtgaaaccccgtctctactaaaaatacaaaaaattagccaggtgtggtgccacgtgcctgtaatcccagctactcaggaggctgaggcagaagaatcacttgaacgcgggaggtggaggttgcagtgagccaagatcgcaccattgcactccagtctgggtgacagagtgagactccatctcaaaaaaaaaaaaaaaaaaaaagtctccacttgaatagtcaattattcaaagatacacaaatggccaataaacacatgaaatgatgctactaataattattgaaatgcaaatcaaaattacaatgaggtatcacttcacactcatcaggatggctaccataaaaaaacataaaataacaagtgttggcaagcatatgtagaaattgaaacccttatgcactattggtgggaatgtcaaatggtacaaccactgtggaaaacagtatggcagttcctcaaataattaaaaattgaattactgtatgatctaataattccacttctgggtatatacccaaaagaattgaaagcagggtccagaagtgacatttgtacaccaatatatatagccacactattcacaatagctaaaacgtgaaagtaacccaaatgtccatcaatagatggataagcaaaatgtgatgtgtattgtaatgaatcttattcaaccttaaaaacgacctgaattctgatatatgctacagtggtccccaacctttttggcaccagggaccagtctcacggaagacagtttttccacagacaggagtggggtgatggttttgggatgaaactgttcgacctcacatcatcaggcattagattctcataaggaatgggcaagctagatcccttgcatggggcaacctacatctttctcatgggcagttcaaaatacggtttgtgctcctatgagaatctaatgcccccactgatctgaggcccagctcgggtggtaatgttcactcacctgctgctcacctcctactgtgccaccaggttcctaacaggccaggtatgcatactggtcagtgacccaggggttggggactgagctgcaacatggatgaaccttgaggacattataagtgaaatgagccagtcacaaaaagataaatactgtatgattccacttatatgaggtacttagtaaaaaattatagagacagtaagtagaatgttggttgtcagggtttggaggatgtggggaggaaagggttattgtttaatgggtagtttgttttgcaaagtgaaaagatttgtagaggttgaaaggtggtgacggttgtacgtgagtatacttaacaccactgaaatgtacacttggttaagatagtaaattctttttgagacggagtctcgctctgttgcccaggctggagtgcagtggtgcggtctcggctcactgcaagctccgcctcccgggttcatgccatactcctgcctcagcctcctgagtagctgggaccatcggcgcctgccaccatgcccggctaattttttgtgttttcagtagagacggggtttcaccgtgttagccaggatggtcttcatttcctgacctcgtgatccacccgtctcggcctcccaaagtgctgggattacaggcgtgagccaccgcgcctggccaagacagtaaattttatgtgtattttacaatttttaaaataaaaaaaggtctttcgtcttttcccattgttttattacatttgctttgccaagtaagacattcctatataattttaatgttttgttccattagttattttaactattttgtaataactgacactttccggttttttttaacctggtacagcaagagactatttctcactggtcttccccacttgcatcctttggcacatacatttatgtattaggttctgtaaattatttgcttgggattgtatgactggagaaacatttcctacatttttccaaggcaggcagaggcaaattataccactacagtaattccaaatttgtgtttcatttaaatgtcctccactattgtttcagtaatttttatgtatgtttctctaggcccttaaatgtgatatccctccattaagtttgtttccaagaaagcaatattctcagttacttctgagacaggtaacttctctttcccttatttttaaagatatctattgctgggagcactgatcggaatggattacctctacattcttcatatttgcagactgcttttagttttagttcccagacttttggtcttaaagacgcctttacactaaaaaattacgggggacctcaaagagcgtgtacgtgagttataattatcaacatttactcaattagaaattaaaattggtatttctaagcgcaagaatacacatgcgcacattccattaaccgccactgcaatggcgtcatcacatgttatgtgatcactggaaattactacacgaacgttagagagagaatgagaatgaaaaggaaaatagttttgacacgaactgaccccgcttcctgggtctccaatccaccccaccactacccccattccaggagtcccaggatcaagctttgggaagcgccatccgtcacaggtcttggtctccccttccaaaagtcagtgcctctccaggctgcccatccccagcaaagatccggaagtccgctgcccctggcaacagcacccagcacctagccctctgcttcgccgtaccgcacccggaagtcggagctgcgcacgcaccgcgggactctgatttcccggcgtgccccaggagagcggcgtggacgcgtgcgggcctagaggcccacgtgatccgcagggcggccgaggcaggaagctgtgagtgcgcggttgcggggtcgcattgtggctacggctttgcgtccccggcgggcagccccaggctggtccccgcctccgctctccccaccggcggggaaagcagctggtgtgggaggaaaggctccatcccccgccccctctctcccgctgttggctggcaggatcttttggcagtcctgtggcctcgctccccgcccggatcctcctgaccctgagattcgcgggtctcacgtcccgtgcacgccttgcttcggcctcagttaagcctttgtgggctccaggtccctggtgagattagaaacgtttgcaaacatgtcccggatcgaaaagatgagcattctgggcgtgcggagttttggaatagaggacaaagataagcaaattatcactttcttcagcccccttacaattttggttggacccaatggggcgggaaagacggtaagtcttcagtagccgccttcagtttacaggtcgctacatctttcggagaataaaatgggaagttgagaactctccttaggagcagaagcgtccctagggctccacaggtgtaggcccttaaagtgccttagggtgtggcctgcaggctacagcgaccttaggagtttgcctgaagcagtctcggaaggatgtccggacctggcctggggacaaggtttacttaagaatcccacgataccgggagctgtcgccgctcactcagagttcagttcccactggatgccctttggtctgtattgatgtttttaacgctgtctccttgctttcaaagcatagcattcacttcccagtagttgtcccatacaagaattcctttaaaagttataaaatgatacatacatgactaaagagtttccaagtatgccaactgtccagacataatacatggaaaataaataaattcaaaatgtaactgatgtagtggggcttaacttggaaaacttctcttcttaaaactcagtcaaaaatttaacgttggtgcacgactgacttttttttttttttaaagccgtg

SEQ ID NO: 2366 - DNA, 6000 bp, Homo sapiens
atgataggatttttcatagctacagagttggtgacagtattaaggttttcccagccttctggagtgatgaactttgccttccatttcagagtttttttttcctgtaatggaaaaatgtctccttttgtaactgagaatactatccagacatcaggggcatcaccaggggacatggtcatttctctcttttttctttagccggactgtagaagctggaggaaaaggcagtatatctgtggcaaagttcctggccacaaaattttggctacatttataaaattctaattccaggtgaaaggggaatataaacttaatttttctgaaaactacaaagaacagagacagataccaatgagctgcaggcatcattgtgtaagctgagtgcagaaatcgtctggtagctgggcaggcgtcgttggccagagcatggcaggctttccatggccaaagccactaagattttgactgctcaggacttcattttggggcttctggggcataaaaggccttggtacaaagagcatgttatccttttcaactatggcacccttttcagatgtaagattctgagctgacaggagcatgggaccgattgtattaattcttggatttagtcctaagtaactttttctctatataacaagtctaaatggatggcaaggcaagagaggagttgttctgtttattccatctctacctctccttgaatttcctccttcatccccacttcatccaatggctttgtgtttacatgatgtttttattttatttatttatttattttgagacagagtctcactctgtcacccaggctgaagtgcagtgacgtgatctcagctcactgcaacctctgcctcccaggttcaagcaattctcctgcctcagcctcccgagtagctgggattacaggcacccaccaggacgcctggctaatttttgtatttttagtagagacggggtttcaccatgttggccaggctagtctcgaactcctgaccttcagtaatccacccgcctcagcctcccaaagtgctgggattacaggccactgtgcccggcctacatatttttgatacctctatttctgtttcctaacaccactatgtatttcactgcagatatgaaggactccaactggcattagaggttatgtatttaaaatccaagcccacttagaaattataataataaataacaacatctagcacttattatacattaattaatactattttggtgttatttatttatttatttttgagacagagtcctgctcttttgcccaggctggagtgcagtggcgcgatcttggctcactgcagcctctgcctcccgggttcaagctattctcttgtctcagtctcctgagtaactgggattacaggcacacaccaccacacctggctaatttttttgtagttttagtagagatggtggtttgccaggttggccaggctggtctcgaactcctgacctcaggtgatccacctgcctcagccttccaaagtgctgggattacagaagtgagccactgcgcccagcctggttttatttatttataatttcatttaattctcagaataaccttattatttttctattataattattcccactttatagatgagaaaaccaagactcagaaaagttaggtaacttgccaaagttcacacatctaggcggttgcagaaccagaattcaaacccagttccatctgactccagagtcgtttctgacactggtctactttctgtctcagtaagtttagaagtcagggaactggaaggaacaacaacaaaaaaataaacctaacttaatgccaagagaattgctgacaagatatatctcattcctactccatgtttaatgtcaatttttgtatcttgggtagggtgcctattataaagctatttgctcaaggttatcctcctcctaccccgcccccatcatcagatgatttttatttatagctatgtttaaacatcatgggcaacactcagacttgctgtatattgaatttgccatcagagcaaagattctttctcaaagcatatttgctttatttactctctggtgtttcccaataaattaaaaagacaattctttttggtttgctttaaattttttgttccaaatattcttcagctctagaattgagtcagtgaggtcaaattagtcaagaccagataagtcaaaatgaattttcattttcatgtccattagatattttgttctacagaatacacaatctgaatttcttctaaagaaaaatatatcctgattaatttacttctgtattgtttatgatcatgtatgctttacttcactgtctgatgctaagagcttcctagaattcattccttaagaagttaagtcatggcatttaattatttggcaggatgttttaagtacatataattattatatcttccctccattttgtgatggtggtgagccaagtaatctgcatcaagagaaaataaataacacctacattaatgctaccaacaaggggctcacagtactttggaaaaactcataattttagcacacagtgggtgttcaatacttcatcatctatcaaactaacatcaccacaccctttccaggtaagagaatctaggcaggctgggtgcggtggctcacacctgtaatcccagcactttgggaggctgaagcaggcggatcacctgaggtcaggagtttgagaccagcctggccaacgtggcgaaatccgtctctactaaaaatataaaaattacccgggcatggtggcgggtgcctgtaatcccagctacttgggaggctgaggcaggagatttgcttgaacctgggaggcagagtttgcagtgaaccgagattgcaccactgcactccagcctgtgcaacagagtgagactctggctcaaaaaaaaaaaaaaaaaaaaaaaaaaaagagagagaatctaggcaaagagaaataatgttgattctgttccatatgtcagaccttggaaggtcaactgcatgactgtggctgagactttgtacttgggagtgtgcagttttaaatcctgaccactatcttaggcaagtcccttctcttttctgagtgcctgtctgcttcttgccccatcagacagttctcacacaggttcatggcaacggtaaagaataagattagacagcacactgggtatggctttataatcacgggcactaagtgatgattttttccttattcattccacttggtcttaactcttacccttctattgtttggggatgttaactgcaaaacagggacagaatttgggctaaagggtctttttcccagtctggtaaattaagtatgtgataagacttctagaagagtagatttaaggtactttcttttgtgcacactaatgggaggtgtgaagggaaagcagaattgcaatttccagcctagggaggccaagccagtcggccttgccaaacacgttgtcttggataaaggaggattttcagtcctgctattggctgatggggcctccagtgccttcttcagcctgttggtggggatgatgccctcagagccgcagagtgagcagtctcctcccaagcatcgctgagcacttgggtgtggaagggttgcctgatactgagggtggggttcctggaagacaggcgatcaggttcagctcttgccttgccctttatggttaaatgttctttggaaagcttctatatctttcaaatcctgggggcattatgatctctcttctgcctatcccaaaccatcttcagccagtactgttgggagaatacaagctccagggcatggtccctggtccgtctggatgacccctccggatctggcatatagctggcgctctatggaaccagatatttatgtaaaagcagggacaatggaatgtgaaaacgtttcgcaaactccaaagcgattcataaccagacagaggtccaatcctagggtatacgagctctctcttttaagcacgtatcacagctgcttctcacgccaccgagacgcggtcaggacaggtgcatccatcttctctgggcttcccctcttgaaagtaggccagggcgcgcaggggttgagggtctctcattcccagagagaattaaacttggaggaaagcaaccaccggcgaggagcggggcgcgtggaagcgagccgcggtccgaggcccaaagaaaagcccaagcctcgcccccgccatcgcgcccgacgagacacctaggtccggggacgggtgtgtgccgcggaagtcaggtgcactgcgcagcactcccccggtaggtacacgctcctccacctacgagtgacctaattacaaggtgccagccgcgcccagaggtgggggtggttaatccaagcggccactcgctgcccgttcctgcccccaaagatgacggaaacccacacgattacagagccgcagcaccccagatgagccacggggtcgcaattctcgtttccgtgatcggactgccaggccccaggtgaggagctgagttcatcaccagagcggccttcccaggggaaccagttacaggctgccagtggccccggcttccatccggtctgcgcctgcgcgcggcccaagccctcgcctctcctggaatagtgctcagggattagtccggttcgccgctgtgcgcactgcgcatgctccagctccatccttcccttcccccaccaccccgccctccgggagccacgcccaaaaagtcaaggcgcttcagttaccagccggctacgtcgcgcctgcgctttgacccccagtttgcgccccaactccggtcgtgcggccgcccggggagggctctgcagttgcgcagcttgctccccggcccttttcccctccgctccccgccgcctcctgacgccgggcgtgacgtcaccacgcccggcggccgccattacagagagccgagctctggagcctcagcgagcggaggaggaggcgcagcggccgacggccgagtactgcggtgagagccagcgggccagcgccagcctcaacagccgccagaagtacacgaggaaccggcggcggcgtgtgcgtgtaggcccgtgtgcgggcggcggcgcgggagcagcgcggagcggcagccggctggggcgggtggcatcatggacgagaaggtgttcaccaaggagctggaccagtggatcgagcagctgaacgagtgcaagcagctgtccgagtcccaggtcaagagcctctgcgagaaggtgagctgtagtacggctgcggacagccgccgcggggccgagcccgccgaggaaaaggcggccgtgaggagggtgcaacatggcggaggccgccggtccgggccccccgagtctccgagaccggcgcccatcctggccggcggcggcttcctaacgacccggcgccccctgcctcccgcgcagggattggttgccgccgccgcctaaaatggcgccgttcactcgactcctgggcttttgagtcagccggccttggcgccagacgaggtggcagggggagcggagaccctgtgggtcatcgtcagggacggttttgagggtgagctggcttggattctgcggcttgggaatggagcctgggcctctccggtgggctgagtaagagtcttgccgctggtacccaggcctagttaggtccagagctgcccagaggatcccccaaaggcagtcttgttaggccgtatcccagaacatacctaaaggtcacacagctttagtaccccttggtggtttgtattaaactcaccaagcgatcttctccagaaatcaaggtaaggggtgtctttaagaatttttaaattattctcttaacctaatttttacgaaggtcatggtggtagctataagggaggagtgtaacttatttttcatagttggaagaaatcgggaatttggtgagtcatactacataaggagcttttggattggaaatcaagtgtcggttgaatatgatttatatgctgactcaaagccttctctaagcttaacacact

SEQ ID NO: 2367 - DNA, 6000 bp, Homo sapiens
tcactgcaagctctgcctcctgggttcacgccattctccggcctcagcctccccagtagctgggactacagacgcctgccaccaatgcctggctaattttttgtatttttagtagagatggggtttcaccgtgttagccaggatggtctcgatctcccgacctcgtgatccacccgcctcggcctcccaaagtgctgggattacaggcgtgagccaccgcgaccagcctgacttgattttctaagtcacatacatattaaaaatttattattagtggcaggcttggtggctcacaccaacttggtgaaaacctgtctctattaaaaaaatacaaaaactagctgggtgtgatggctcacgcctgtaatcccagctactcaggaggcaggagaatcacttgaactggggaggcagaggttgcagtgagccgaaattgtgccattgcactccagcatgggcaacaagagtgaaactctgtctcgaaaaaaaaattattagtagcattattgactagtactccagtatatcaatgtatcaccgattatcctaagatttacccattaaaagatatttgggggctgggcacagtggctcacacctgtaaacccagcactttgggaggccgaggcaggtagatcacttgaggtcaggcagttcaagaccagcctgaccaacatggtgaaacccccatctctactaaaaataccaaattagccaggcatagtggcacatgcctgtaatcccagctactcgggaggctgaagcaggagaatcacttgaacctgggaggtggaggttgcagtgagccgagattgcaccattgcactccagcctgggcaacaagagcgaaactctgtctcaaaaaaaaaaaaaaatttgggttgttttacaattattggtgattatgaataaagctactataaatatttgccaaaaaaaaattacctgcaatggataatggctaaagaccccaagcataagaaaccctgatgttgaaatactacataaggaggagcttgcaaataagaatcctgtaaattttccttaaagtactcttcaacatatctgtgagttgcatttatttaatcaaaaatcttatctagcagggcaagaaatcttagggaaccacagaaaacaatggtaccaacagaaaatattgtcaggggctggagggagaggagaatggaaagtgactggtaacagatatggtgtttctttctcaggtgatgaaaatgttctcgaataggatagtggttgataattgcgtaattatgttaatatactaaaaaccattgaattgtatatatcaaaagggtgaacttggccaggccagtggctcacacttgtaatcccagctactctagaggctgaggcagaaggatcacctgaggccagatgttccagacaagcatgggcaacatagtgagaccctcatctctaaagtaaagaaaattagccaggcttgtttgtacctgcctgtaatcccagctacttgagatgctgaggcaggaggatctcatgagtctagagtgacagagtgcttgttctattcagttgagtattatatgctttaaatattatggttttttgttttgttttattttgagacagagtcctgctctgttgcccaggctggagtgcagtggcacgatctcagctcactgcaagctctatttcctgggctgaagcaattctgcctcagcctcctgagtagctgggattacaggcacaccaccatgcccagctaatttttgtatttttggtagagatggggtttctccacgttggccagacaggtctcgaactcctgacctcaggtgatctgcctgcctcaggctcccaaagtgctgggattacaggcattagccactgtgcccggccaatttatggtacattcatataatggattatcatgcagttattaagtatcacgatttagaagaatattaacttgggaaaatacttagagtgaattatcaaatgacaaatgtgggcagcactgcagtatgaagctatgtacacagatggatggagaaacacagaaaccagtgatttcctttgggtgggagttagtgttctacatatttttctttcttaaaaaaattaattaattaattaattatgtttgagacagagtctcactcttgtccaggctagagtacagtggcacgatcttggcttactgcaacctctacctcctgggttcaagcgattctcctgcctcagccttcggagtagctgggactacaggtgcataataccacacccagctaatttttgtagttttagtagagatggggtttcaccacgtttgtcaggctggtctccatctcctgacctcaggtgatccatccatctaggccttgttggtattacaggcgtgagccactgcgcttggcccatatttttcttttctttttttttttttgagaccgagtctcgctctgttgcccaggctggagtgcagtggcgtgatcttggctcactgcaagctccgcctcccggcttcacatgttctcctgcctcagcctcccgggtagctgggactacggcacccgccactaagcctggcttttttgtatttttagtacagacggggtttcactgtgtcagccaggatggtctcgatctcctgacctcgtgatccacccgcctctgcctcccaaagtgctgggattacacgcgtgagccaccacgcccacctcccatatttttctttatagttaatgtattcttcaagtttttgccattgacattacttctttttttttttttgagatagggtctctgcatccaggctggagagtgcagtggtgcaatcatagctcactgcaacctcaaactcctggactcaagtgatcctcccacctcagcctcccgagtagctgggatgacaggcatgcaccaccatgcctggatatatatttttttaatttttaatttttatagtagtagtgatagggaggtcttggtatgttgcccaggctggtcttcaacagctgggctcaaatgatcttcccgcctcagcctcccaaagcactgggaatataggcccgcaaattgatttttttaaagggtaaaatgggctgggcatggtggcttatgcttgtaatcccagaactttgggagggcaaggcgagaggatcatttaagcccaggagtttgagaccagcctgggcaacatagggagattctgtccctacgaaaattacaaaaaaaaaaaaaattagctgggtgtcgtgacacacacctgtggtcccagctacttgggaggctgaggcggcaggatcactggagcccaggagtttgaggatgcagtgagccttgatcgggccgcggccactccagcctggatgacagaacgagaccttctttcttttttttttttttgagacagagtctcgttctgtcgcccaggctggagtgcagtggcgcgatctctgctcactgcaagctccgcctcccaggttcacgccattctgtctcagcttccagagtagctgggactacaggtgcctgccaccacgcccggctaattttttttttttttgtatttttagtagagacaggggtttcaccgtgttagccaagatggtcttgatctcctgacctcgtgatccgcccgccttcgcctcgcaaagtgctgggattaccggcgtgagccaccgcgcccggccgagaccctttcttaaaataaataaaataataaaataacaatttaaaaatagataacttctatataacacccagtgaatgacaaaatggtttcaaaaaaaattcccgaggggttggtaagatagtatactactatgaaaggataaaaaccaaaaaacgccgaaaatgttcatgtaatgtttaagaacattgggctttggagtaaaatctggtttatagtctagactctctccttggaagagtgatagaacttctctgagcttccgttttttcttttttttcttttctggttttgtttttttttttttttttttttgacggagtctcgctctgtcgcccaggctggagtgcaatggcacgatctcggctcattgcaacctccgcctcccaggttcaagcgattctcctgcctcagcctgccgagtagctgggactacagacacgtgccaccacgcccggctaatttttatgtatttttagtagagacggggtttcaccgtgttggccaggatggtctcgatctcctgacctcgtgatccgcccgcctcggcctcccacagtgttggattacaggcttgagccaccgcgcctggccgagcttccgtttttctttctataaaattgggatgatacgaatatcatagtgctgtttttaggattaaaccagattatagttgtaaaagagcagaacctgttgtaggataaaccctcaataaatgtgaaatgttaacaattattgttaaataaatgttacagaacaatgctctcacccccacctccccgggctacccggggtaagaaagggtagacaaagaggaaaaatcctccacatggggcgatacatcctcctattttaaggaagaatccagaggctaccatgcatctttcctagcatatacatcactttgtcattatctggtacagagtcggccctgaaactacaccctttctatttttcatccaatcacatcacccgtgaaaggcactctcccttctccaccctttcttgcccctactcccacccctagcttcccagtttacttttcccagtcactcattcccctcttccccgccccgcccagaggtcgtggcttctccctcgccccgcctattttctaattttcccgcctcagtagctcttggccatttggggatgtagttgtttcttttcccccgcctcttcgtgacgtttcagaaataagacctatgattggtttttccggagcaagagccggccaatgacaggcagatatttttggtgcagatgggcagccagtattatcgccgatgattggctggagtggcccgagtcgggaaaatggctgcgagtacctccatggtcccggtggctgtgacggcggcagtggcgcctgtcctgtccataaacagcgatttctcagatttgcgggaaattaaaaagcaactgctgcttattgcgggccttacccgggagcggggcctactacacagtagcaaatggtgagatgttggagtgggaagggacggggcttggatccttggccttggggggcttgtcgagctgatctagtttgtgtgggtgttccaggtcggcggagttggctttctctctccctgcattgcctctggccgagctgcaaccgcctccgcctattacagaggtaaggacatgtttacagtgagcgctccccatcaacccaggggtgtgcctcaagagccactgagtgccctgtcactggaggagagcaaactgcttagcagaaatgtttgtagagggaattcaggcattcaaagagctgagtgttttaaatgattttatccatttagttttcttgagctttgaaagacttggtggtgctcttatttaaagctggggagaattagtaaacaattactgcttatgatttcagccttttagggcttatagccaaacctagacataagagtgcctcataatagtaaatattattataaggaattattataaggatatctcataataaatacccaaaaggatgagaagaatcaaaagttttggtctggcgcggtggctcacgcctgtaatcccaacactttaggaggccgaggtgggcggatcacgaggttaggagttcgagaccagcttggccaacacggtgaaaccccgtctctagtaaaaatacaaaattagccggacatggtggcgcgcgcctgtaatcccagttactcgggaggctgagacaggagaatcgcttaaacccgggaggcgaaggttgcagtgagctgagatcgcgccattgcactccagcccgagggcagagcgggacactgtctcaaaataaataataaataaataaagtttttaca

SEQ ID NO: 2368 - DNA, 6000 bp, Homo sapiens
catggtttccaataattgctcttatgtaccagacaccatgctacatttttttttttttgtaaaaacagggtcttgctgttgctcaggctggagtgcactgaggcgatcacagctcactgcagccttgaacttctgggctcaagcaatcctttccatctcagcctcctgaatagctagaactacaggggtgtgccaccatgcccagcatatttatttctatttttgtagagagaggcgtcttgctatgttgcccagggtagtctcaaactcctggcctcaaacaatcttcccatcttggcctcacaaagtgctgggattggcgtggtgtctcacacctgtaatcctagcactttgggaggctgaggcagacggatcacctgaggtcaggagttcgagaccagcctggcaacaaagtgaaaccccgtctctactaaaaaatacaaaaattagctgggcattgtggcgcccatctgtaatcccagctactcgggaggctgaggcaggagaatcgcttgaaccggggaggcagagattgcagtgagccgagattgtgccactgcactccagcctgggcaacagaatgagactctgtctcaaaaaaaaaaaaaaacaaatgaacaaaaaacgaagtgctgggattccaggtgtgaaccaccacacttgacctacatactttgatatatattctcattttttcttacaatcatcaaatgaaacaaaaccttctctttgacaaatgaaacagcccaagaagttaagtgactgcccacatggtaggcaaaggtactctcaaaaagcagtctaaaagcccttgcttttcaccactaagctgttcacctttttattattaattaaattaataatttaattattatgaattaaatggttgagttaaaagtaggcattggctcatttgcaaaacattgaaagaaactgagacccaaaacaaaacaaaaaaaacaaaacaaaaaaaaaaaccctgcaagtcaagtttcaggcctcatttcaaaggaaggttacatcccctttcgtcatctataaaatggcctcccagtgcagcccaacactcctacccataattaaatctccttattccacttttagttcccaaggattttttactcatgtcctgctctttccctgctgccccctttttagtcttttgttcttgagccactgctttgaactgcatcttaattatgccctcatgggccaaaccccatctgtgaccctgctccagtgggtttcagcaaaggatactctccatccatattctgagggctccagggcctggagccagtcatccaggaggtcatccaaaggagtggaatccattggttctaagactcttcattccctgcctaggaaggaacagccgagttggaggaacatgcactcgattcagaccttcccttttcacccagtgaaagctaaacctctgcaaagtggggagaagtagggctaagcctaccagtcataaaaagaaccaggaatagaaaacacacccctcagcccctctgccctgcagaggctggctgggaggatcccaggaatgcagggctcttctccactgcctgatctgggcatcccaggagtgatggctgtacctcctgttcttgtttggtgtttcagggtgaagcccgggctgtcactgtgccctggcaacaacatgtatgagtcagactgaggtcaaggtgaaggaacacagctcactgcttatcacagtgaatcaggagcctagatagggattccccaaggatgacataggatcaatgccctcaatccaacagaaaaagtaaatcttcaaatcagattaaacaccaaacttcccacctccctaatattctttcttctgggaaggataacttagatatattccaacaccctcataaatcaagatataaaagacaatatttgacttccctttaaaataattctaccatttcacagtttgtatgtatgcatgtaaacttacatgtaattagctaagtatgttgcaattagctaagccagctggaatcatgaggagatagtgaaaatgtttgctaggaaaacaacctcattaacaaacgtagagcttttaagagttttgttggctgggcatggtggctcacacctgtaatcccagcactttgggaggccgaggtgggtggattacctcaggtcaggagtttgagaccagcctggccaacacagcgaaaccctgtctcaactaaaaatacaaaaattagccaggtgtggtggcgcatgcctgtaatcccagctactcaggaggctgaggcaagagaatcacttgaacagaggttgcagtgagctgagattgcgccattgcactccagcctaggcaacaagaaagaaactgtctcaaaaaaaaaaagtttttttgttgttgtttttaggagacagtctcactatgttgcccaggctggcctcaaactcctgggctcaagtgatcctcccaagtagctgggactacaggcgcaccactgcatctgtaaaaagtcttaagggcggccgggcgcagtggctcatgcctgtaatcccagcactttgggaggccgaggtgggtggatcatttgaggtcaggagttccagaacagcctggacaatatggtgaaaccccacctctattaaaaatacaaaaatcagccaggcgtggtggcgggcacctgtagtcccagctactcgggaggctgaggcaggagaataacttgaacccaggaggcagaggttgcagtgggccaagattgcgccactgtactctagcccgggagagagcgagactccatcttaaaaaaaaaaaaaatactcttaagagctaggtgtataagttccatttgagaaatctcagaaacttatttttggggctagatttttggagaatttgttttaggaatgctgcaactttgtcagagtgctcagattttagtatatttccatcacctgacattgaactaaagccacttggctgacacctttgttgtgaccacccacaactgcacttacttgaggacctggtgcagaaagcactggtagccaggtgtgcacttgccataatctatctgcttttgccaccaatagagaataactttgtctctacttcccacctgcagggaagtatacaatttcccacaaagtgtgattatactgtagtcgtcaaagcagataacaactcatcccacactcccttaatccccagcctgattttcaaactcacctggcatagcaaggttctgtgctaactcctacactcactgtctgtatcctagaggacaaagaatcttcacacatctcctttctggggaagcaggttctgcagatgaaaagggtattaggataaaaaccagctggctacactgtgcctctcagccactaccaccaccaagatcctgacaacagacacaagttgcattttgacttttgtttctcaaagcatgatctgcaagccgtctgcatgggtagcacctgggggccttgataatgaccccactttagacctatcgaattatcgtttttggagcctacatcttaaagagcttccaaggttattttgaacatttttattatggaaattttcaaatatacattgaagtaagaagtatggggtaataccttaccacgcaaagtatggtcgtaggaccagctacctcaccatcagctgggggcttgttagaagggcagaatcttgggccgcaaccgcaacccagacatcccgaatcagaatctgcatttagcaggtcctcaggtggttagtgtgcaaattaaaccttgagaagcacagatatgatggaccctcctgcccccatcactcaacagtcagggtcaatcttgtatcatcaataccttcccccagcacaggattatttaaaagcaaatccctaacattaggaatgtctttttgtttgtttcactctaatgcccaggctggagtgcagtggcgcaacctctgtctcccgagttcaagcagttctcatgcctcagcctcccaagtagctgggattacaggtgtgtgccaccacaaccggctaaattttgtatttttagtagagacggggtttcatcatgttggccaggctggttttgaacccctgacctcatgtaatctgcccgcctcggcctcccaaagtgctgggattacaggtgtgggccaacgcgtccggccaataatttataaatatcacctcgtcaatgttcaaattttcattaataaccaatctttgaggtcctctggattgcgataaggattataccaagatgatttaattcctccactttccctgcaacggaatttctttttacccacgtgagctagagtctctgagatgctgcacactaaaagaaacaccaaacaaagctcttggaaggggctaatgcctctcagcataaacacacacacccgtctcgccccaacacttgccacgccggcagcaaacgctccatctcccgtggaaggccagcaaaacttagaagaaaacgtccgcgaaaacggcacgagaaagaagcgaagaaaatgaaacgcttacaacaccctccacccaaaataatctctcctagtattaccctagtgaatggacatcactagtaaggcgcggtttaaatctcccggggttcgtggggctgagggaacgaggaaaacagaaagggtgtggagattggtgagagggagagccaatgatgcgccaggctccccgtgaggcggagcttaccccgcagcctgcctaacgctggtgggccaaacactatcctgctctggctatggggcggggcaagtcttaccatttccagagcaagcacacgcccccaggtgatctgcgagcccaacgataggccatgaggccctgggcgcgcgcgcggagattggctgacgcagcttagaggcgagcggggataggttactgggctggcggaaggtttgaatggtcaacgcctgcggctgttgatattcttgctcagaggccgtaactttggccttctgctcagggaagactctgagtccgacgttggcctacccagtcggaaggcagagctgcaatctagttaactacctcctttcccctagatttcctttcattctgctcaagtcttcgcctgtgtccgatccctatctactttctctcctcttgtaggcaagcctcagactccaggcttgaggtaagtccgcagccgtctccgccacggaatcacggagaccccattgtcccccttagggtccagtcgggcccccacagacagaggttgggagggccgaatggggactatcgcgagttacgagacccgggttctttctagtcaggagtctcgagctgtgtggcgtggaacaagtcaaaatcctctcttcattccatctttaaggtcctaaggttgcctctcgtcggtgaattcaggttctaaccttaagccaggctgtgaatcacccttcggggttgcccctcttccagtgttgattcgcctggctggaaagggtggaggagtttaggaaagctgagggaactgtgatgtaccgatttagatgacgttttcctcctagctaggttttgtttttctcctggtgagaattcgaagaccatgtctacggaactcttctcatccacaagagaggaaggaagctctggctcaggacccagttttaggtctaatcaaaggaaaatgttaaacctgctcctggagagagacacttcctttaccgtctgtccagatgtccctagaactccagtgggcaaatttcttggtgattctgcaaacctaagcattttgtctgggtaaatatacttttatttttacactgtattgcctttgctatttccaaacagttgggtttgtttgttggtttgttttcaattatcccggctcaaaggtcaggctttaagtctcaactctgcccttgactgtgtaacccttttgagtctcaccttcttttctgtgacaagaaataatctcagccaggcgaggtggctcatgcctgtaatctccgcactttgggaggccaaggagggcggatcg

SEQ ID NO: 2369 - DNA, 6000 bp, Homo sapiens
cctgtaatcccagcactttgggaggccgaggcgggcagattacatgaggtcaggggttcaaaaccagcctggccaacatgatgaaaccccgtctctactaaaaatacaaaatttagccggttgtggtggcacacacctgtaatcccagctacttgggaggctgaggcatgagaactgcttgaactcgggagacagaggttgcgccactgcactccagcctgggcattagagtgaaacaaacaaaaagacattcctaatgttagggatttgcttttaaataatcctgtgctgggggaaggtattgatgatacaagattgaccctgactgttgagtgatgggggcaggagggtccatcatatctgtgcttctcaaggtttaatttgcacactaaccacctgaggacctgctaaatgcagattctgattcgggatgtctgggttgcggttgcggcccaagattctgcccttctaacaagcccccagctgatggtgaggtagctggtcctacgaccatactttgcgtggtaaggtattaccccatacttcttacttcaatgtatatttgaaaatttccataataaaaatgttcaaaataaccttggaagctctttaagatgtaggctccaaaaacgataattcgataggtctaaagtggggtcattatcaaggcccccaggtgctacccatgcagacggcttgcagatcatgctttgagaaacaaaagtcaaaatgcaacttgtgtctgttgtcaggatcttggtggtggtagtggctgagaggcacagtgtagccagctggtttttatcctaatacccttttcatctgcagaacctgcttccccagaaaggagatgtgtgaagattctttgtcctctaggatacagacagtgagtgtaggagttagcacagaaccttgctatgccaggtgagtttgaaaatcaggctggggattaagggagtgtgggatgagttgttatctgctttgacgactacagtataatcacactttgtgggaaattgtatacttccctgcaggtgggaagtagagacaaagttattctctattggtggcaaaagcagatagattatggcaagtgcacacctggctaccagtgctttctgcaccaggtcctcaagtaagtgcagttgtgggtggtcacaacaaaggtgtcagccaagtggctttagttcaatgtcaggtgatggaaatatactaaaatctgagcactctgacaaagttgcagcattcctaaaacaaattctccaaaaatctagccccaaaaataagtttctgagatttctcaaatggaacttatacacctagctcttaagagtattttttttttttttaagatggagtctcgctctctcccgggctagagtacagtggcgcaatcttggcccactgcaacctctgcctcctgggttcaagttattctcctgcctcagcctcccgagtagctgggactacaggtgcccgccaccacgcctggctgatttttgtatttttaatagaggtggggtttcaccatattgtccaggctgttctggaactcctgacctcaaatgatccacccacctcggcctcccaaagtgctgggattacaggcatgagccactgcgcccggccgcccttaagactttttacagatgcagtggtgcgcctgtagtcccagctacttgggaggatcacttgagcccaggagtttgaggccagcctgggcaacatagtgagactgtctcctaaaaacaacaacaaaaaaactttttttttttgagacagtttctttcttgttgcctaggctggagtgcaatggcgcaatctcagctcactgcaacctctgttcaagtgattctcttgcctcagcctcctgagtagctgggattacaggcatgcgccaccacacctggctaatttttgtatttttagttgagacagggtttcgctgtgttggccaggctggtctcaaactcctgacctgaggtaatccacccacctcggcctcccaaagtgctgggattacaggtgtgagccaccatgcccagccaacaaaactcttaaaagctctacgtttgttaatgaggttgttttcctagcaaacattttcactatctcctcatgattccagctggcttagctaattgcaacatacttagctaattacatgtaagtttacatgcatacatacaaactgtgaaatggtagaattattttaaagggaagtcaaatattgtcttttatatcttgatttatgagggtgttggaatatatctaagttatccttcccagaagaaagaatattagggaggtgggaagtttggtgtttaatctgatttgaagatttactttttctgttggattgagggcattgatcctatgtcatccttggggaatccctatctaggctcctgattcactgtgataagcagtgagctgtgttccttcaccttgacctcagtctgactcatacatgttgttgccagggcacagtgacagcccgggcttcaccctgaaacaccaaacaagaacaggaggtacagccatcactcctgggatgcccagatcaggcagtggagaagagccctgcattcctgggatcctcccagccagcctctgcagggcagaggggctgaggggtgtgttttctattcctggttctttttatgactggtaggcttagccctacttctccccactttgcagaggtttagctttcactgggtgaaaagggaaggtctgaatcgagtgcatgttcctccaactcggctgttccttcctaggcagggaatgaagagtcttagaaccaatggattccactcctttggatgacctcctggatgactggctccaggccctggagccctcagaatatggatggagagtatcctttgctgaaacccactggagcagggtcacagatggggtttggcccatgagggcataattaagatgcagttcaaagcagtggctcaagaacaaaagactaaaaagggggcagcagggaaagagcaggacatgagtaaaaaatccttgggaactaaaagtggaataaggagatttaattatgggtaggagtgttgggctgcactgggaggccattttatagatgacgaaaggggatgtaaccttcctttgaaatgaggcctgaaacttgacttgcagggtttttttttttgttttgttttttttgttttgttttgggtctcagtttctttcaatgttttgcaaatgagccaatgcctacttttaactcaaccatttaattcataataattaaattattaatttaattaataataaaaaggtgaacagcttagtggtgaaaagcaagggcttttagactgctttttgagagtacctttgcctaccatgtgggcagtcacttaacttcttgggctgtttcatttgtcaaagagaaggttttgtttcatttgatgattgtaagaaaaaatgagaatatatatcaaagtatgtaggtcaagtgtggtggttcacacctggaatcccagcacttcgttttttgttcatttgtttttttttttttttgagacagagtctcattctgttgcccaggctggagtgcagtggcacaatctcggctcactgcaatctctgcctccccggttcaagcgattctcctgcctcagcctcccgagtagctgggattacagatgggcgccacaatgcccagctaatttttgtattttttagtagagacggggtttcactttgttgccaggctggtctcgaactcctgacctcaggtgatccgtctgcctcagcctcccaaagtgctaggattacaggtgtgagacaccacgccaatcccagcactttgtgaggccaagatgggaagattgtttgaggccaggagtttgagactaccctgggcaacatagcaagacgcctctctctacaaaaatagaaataaatatgctgggcatggtggcacacccctgtagttctagctattcaggaggctgagatggaaaggattgcttgagcccagaagttcaaggctgcagtgagctgtgatcgcctcagtgcactccagcctgagcaacagcaagaccctgtttttacaaaaaaaaaaaaatgtagcatggtgtctggtacataagagcaattattggaaaccatgtgtcccctacttcatggcccctaactctgctccttttgccaaggggaaataagcagtgcaaggtaaatctttccacccctattttctcagttagtactgtacctcatttttcctctactctttttcagtttgtagacttggtggctcctgcctcctcccctccctggctcagtgaggacgacccccgccactggctctactttccagctgatcacagctatttacctgtcccagtcttgagtaaggcacaaaatatttacagaaaacagatgtctttcagaggacttgctgctaagtgtaatagtgaagattacttgcattactgctactttccaatcaattaaaaaaaagaaatagaaaactttgtattacaaagagatcacaacacgaacgcattgtttaaagcctctcctttatccacttttttgcttgtctccctaaaccatctgtgatgctagctgagactcgaatttacataagagccagaaaccatcaacccaacctcttcacacactaacgtctacattcaatctctttaaaaaagacttaaattttggctcatgtgggaggtggtggtagtggtggagacttaataaaaggtggttttgtcttcctgaagtggaaatatagcgccgtcaacatcttttccccatctgcctgtttcctccttccctttctgtttaaggaaagtctaaccaccgcacttctccccacctccccgcacctccccccaggcaaacgcaagcaactgaaccgcctatgatgtcataatcacaatcccattacctcatcctgctgggggggagggggcggagagagaagagagggagtgaacagccctgggctatcctgagctttacaaagtgttctgggtgagggcaaattacagaaccaagtggaaacgtccccgcaaccattataagtcctgggtttttaaggttcaggccgatccggcagctgcaagaggggctcctgggactccgagcaggccctaatccgcgcttggaccacacttcccagcagccttcacgccgcggacgggtcctttgctgggggaagggggattccttcgaagaggtggtcgtggagggcggggcagcagagcaggtgaggggcactgtggctaattgcgtgacgcggcccgaaccgagtgggaggctgcagttgggccgttggagggagggagggcaggggcgatgcctttgtttaccttcttccgacatggcctcccccgcgggtttcaagatgtgcctccaactggggccgtccactttctgcgatattttggagggggtgactcgttagtgaggaaaccacccccatccctaaatcaaagcgccaggctcgttcccaacagcgctgtccgagagacactttgagagagacacgacacggagctgcgccctccatgggtggcttggggggattctgcgagccggagctgtccccctactctcctcagggactcgttggttcgcgccagcgccttttaagggcaccgtggggcgaaccgagcgctcagagctgctccggccgcggccctgggagctggaggaaccgcggtaggtggtggagggcaggtggcgctggggcctcggggcgggcacctcaaccgtccctccctccttccctctttcccctcccccagcccgaccgcccgcgcggccgggcctcgctggccgcctctgcggggagagcacgggacccggtgggggagggggtggcggagtgctaagtcccagaccctccccatcccctgcgtcctgagttcgcttcccgcggccagatgatggaacctagtgggaagaggcgaacgacagcccccctgagcgagccctggcgcacccccccccccgccc

SEQ ID NO: 2370 - DNA, 6000 bp, Homo sapiens
tgcagacggcttgcagatcatgctttgagaaacaaaagtcaaaatgcaacttgtgtctgttgtcaggatcttggtggtggtagtggctgagaggcacagtgtagccagctggtttttatcctaatacccttttcatctgcagaacctgcttccccagaaaggagatgtgtgaagattctttgtcctctaggatacagacagtgagtgtaggagttagcacagaaccttgctatgccaggtgagtttgaaaatcaggctggggattaagggagtgtgggatgagttgttatctgctttgacgactacagtataatcacactttgtgggaaattgtatacttccctgcaggtgggaagtagagacaaagttattctctattggtggcaaaagcagatagattatggcaagtgcacacctggctaccagtgctttctgcaccaggtcctcaagtaagtgcagttgtgggtggtcacaacaaaggtgtcagccaagtggctttagttcaatgtcaggtgatggaaatatactaaaatctgagcactctgacaaagttgcagcattcctaaaacaaattctccaaaaatctagccccaaaaataagtttctgagatttctcaaatggaacttatacacctagctcttaagagtattttttttttttttaagatggagtctcgctctctcccgggctagagtacagtggcgcaatcttggcccactgcaacctctgcctcctgggttcaagttattctcctgcctcagcctcccgagtagctgggactacaggtgcccgccaccacgcctggctgatttttgtatttttaatagaggtggggtttcaccatattgtccaggctgttctggaactcctgacctcaaatgatccacccacctcggcctcccaaagtgctgggattacaggcatgagccactgcgcccggccgcccttaagactttttacagatgcagtggtgcgcctgtagtcccagctacttgggaggatcacttgagcccaggagtttgaggccagcctgggcaacatagtgagactgtctcctaaaaacaacaacaaaaaaactttttttttttgagacagtttctttcttgttgcctaggctggagtgcaatggcgcaatctcagctcactgcaacctctgttcaagtgattctcttgcctcagcctcctgagtagctgggattacaggcatgcgccaccacacctggctaatttttgtatttttagttgagacagggtttcgctgtgttggccaggctggtctcaaactcctgacctgaggtaatccacccacctcggcctcccaaagtgctgggattacaggtgtgagccaccatgcccagccaacaaaactcttaaaagctctacgtttgttaatgaggttgttttcctagcaaacattttcactatctcctcatgattccagctggcttagctaattgcaacatacttagctaattacatgtaagtttacatgcatacatacaaactgtgaaatggtagaattattttaaagggaagtcaaatattgtcttttatatcttgatttatgagggtgttggaatatatctaagttatccttcccagaagaaagaatattagggaggtgggaagtttggtgtttaatctgatttgaagatttactttttctgttggattgagggcattgatcctatgtcatccttggggaatccctatctaggctcctgattcactgtgataagcagtgagctgtgttccttcaccttgacctcagtctgactcatacatgttgttgccagggcacagtgacagcccgggcttcaccctgaaacaccaaacaagaacaggaggtacagccatcactcctgggatgcccagatcaggcagtggagaagagccctgcattcctgggatcctcccagccagcctctgcagggcagaggggctgaggggtgtgttttctattcctggttctttttatgactggtaggcttagccctacttctccccactttgcagaggtttagctttcactgggtgaaaagggaaggtctgaatcgagtgcatgttcctccaactcggctgttccttcctaggcagggaatgaagagtcttagaaccaatggattccactcctttggatgacctcctggatgactggctccaggccctggagccctcagaatatggatggagagtatcctttgctgaaacccactggagcagggtcacagatggggtttggcccatgagggcataattaagatgcagttcaaagcagtggctcaagaacaaaagactaaaaagggggcagcagggaaagagcaggacatgagtaaaaaatccttgggaactaaaagtggaataaggagatttaattatgggtaggagtgttgggctgcactgggaggccattttatagatgacgaaaggggatgtaaccttcctttgaaatgaggcctgaaacttgacttgcagggtttttttttttgttttgttttttttgttttgttttgggtctcagtttctttcaatgttttgcaaatgagccaatgcctacttttaactcaaccatttaattcataataattaaattattaatttaattaataataaaaaggtgaacagcttagtggtgaaaagcaagggcttttagactgctttttgagagtacctttgcctaccatgtgggcagtcacttaacttcttgggctgtttcatttgtcaaagagaaggttttgtttcatttgatgattgtaagaaaaaatgagaatatatatcaaagtatgtaggtcaagtgtggtggttcacacctggaatcccagcacttcgttttttgttcatttgtttttttttttttttgagacagagtctcattctgttgcccaggctggagtgcagtggcacaatctcggctcactgcaatctctgcctccccggttcaagcgattctcctgcctcagcctcccgagtagctgggattacagatgggcgccacaatgcccagctaatttttgtattttttagtagagacggggtttcactttgttgccaggctggtctcgaactcctgacctcaggtgatccgtctgcctcagcctcccaaagtgctaggattacaggtgtgagacaccacgccaatcccagcactttgtgaggccaagatgggaagattgtttgaggccaggagtttgagactaccctgggcaacatagcaagacgcctctctctacaaaaatagaaataaatatgctgggcatggtggcacacccctgtagttctagctattcaggaggctgagatggaaaggattgcttgagcccagaagttcaaggctgcagtgagctgtgatcgcctcagtgcactccagcctgagcaacagcaagaccctgtttttacaaaaaaaaaaaaatgtagcatggtgtctggtacataagagcaattattggaaaccatgtgtcccctacttcatggcccctaactctgctccttttgccaaggggaaataagcagtgcaaggtaaatctttccacccctattttctcagttagtactgtacctcatttttcctctactctttttcagtttgtagacttggtggctcctgcctcctcccctccctggctcagtgaggacgacccccgccactggctctactttccagctgatcacagctatttacctgtcccagtcttgagtaaggcacaaaatatttacagaaaacagatgtctttcagaggacttgctgctaagtgtaatagtgaagattacttgcattactgctactttccaatcaattaaaaaaaagaaatagaaaactttgtattacaaagagatcacaacacgaacgcattgtttaaagcctctcctttatccacttttttgcttgtctccctaaaccatctgtgatgctagctgagactcgaatttacataagagccagaaaccatcaacccaacctcttcacacactaacgtctacattcaatctctttaaaaaagacttaaattttggctcatgtgggaggtggtggtagtggtggagacttaataaaaggtggttttgtcttcctgaagtggaaatatagcgccgtcaacatcttttccccatctgcctgtttcctccttccctttctgtttaaggaaagtctaaccaccgcacttctccccacctccccgcacctccccccaggcaaacgcaagcaactgaaccgcctatgatgtcataatcacaatcccattacctcatcctgctgggggggagggggcggagagagaagagagggagtgaacagccctgggctatcctgagctttacaaagtgttctgggtgagggcaaattacagaaccaagtggaaacgtccccgcaaccattataagtcctgggtttttaaggttcaggccgatccggcagctgcaagaggggctcctgggactccgagcaggccctaatccgcgcttggaccacacttcccagcagccttcacgccgcggacgggtcctttgctgggggaagggggattccttcgaagaggtggtcgtggagggcggggcagcagagcaggtgaggggcactgtggctaattgcgtgacgcggcccgaaccgagtgggaggctgcagttgggccgttggagggagggagggcaggggcgatgcctttgtttaccttcttccgacatggcctcccccgcgggtttcaagatgtgcctccaactggggccgtccactttctgcgatattttggagggggtgactcgttagtgaggaaaccacccccatccctaaatcaaagcgccaggctcgttcccaacagcgctgtccgagagacactttgagagagacacgacacggagctgcgccctccatgggtggcttggggggattctgcgagccggagctgtccccctactctcctcagggactcgttggttcgcgccagcgccttttaagggcaccgtggggcgaaccgagcgctcagagctgctccggccgcggccctgggagctggaggaaccgcggtaggtggtggagggcaggtggcgctggggcctcggggcgggcacctcaaccgtccctccctccttccctctttcccctcccccagcccgaccgcccgcgcggccgggcctcgctggccgcctctgcggggagagcacgggacccggtgggggagggggtggcggagtgctaagtcccagaccctccccatcccctgcgtcctgagttcgcttcccgcggccagatgatggaacctagtgggaagaggcgaacgacagcccccctgagcgagccctggcgcacccccccccccgccccggggaccagcggacgccccatgccccaccccgcggggacaggcagggcaacagagggagaggttgaagattggaggggcctagccttttgcttcttcatgggggtggggggaggggtgttccccacttgtcacccctttccccaccagaaccatatggaagaagagcaggcagatctccacctacctgttcatgcagctccctgccttcctcatgtttttcttcagtctccccaggaggtgtggggctgggacctgaggggaaggtccccaaagggtttgtgactctcctccctgttggcctgacctgatcctaccttgtcttggtacagcacaacctcagcatccctgaaacaggagtgtcaggggttactgccatccaataggagatggggtgggggtctgatctttatttttgggggctgctggtggagggaaagcctggactgagagttaggtctggtggggttgctgagagggcctagcggcctgctgctctgtgaagggctgagccccgtgccagttgttaaactgagaagttttaacttgtttagtgaatattcagggctgtctctacccttcagatacacaaaatggaaggggaaggaaggcggcaagagagggcttcttacacttttttcaatgcctgcttgagaaagaggaggcccctcgcggagctggtttgcc

SEQ ID NO: 2371 - DNA, 6000 bp, Homo sapiens
gtatttttaatagagacggggtttcaccatgctggccaggctggtctcgaactcctggcttcatgctatctgcccacctcggcctcccaaagtgctgggattacaggcatgagtcaccacgtctggcccactacagttttatgtatccaaacaagattagaaataacctaaatgcacatcaatagaaaactcattaaataagccactgtacatctatgcagtgtaataatatgtagctatatataacaagggaatgaatactcagcattctgatagggaaagatctcctagctatattaaagttttttttgttttttgttttttttttttttgagatggagtcttgctttgttgtgcaggctggagtgcagtggcatgatctgggctcaccacaacctccacctcctgggttcaagtgattctcctgccttgccctcccgagtagctgggattacaggtgtgtaccaccatgccaggctaatttttgtatttttagtagagacagggtttcactgtgttggccaggctggtctcgaactcctgacctcatgatccgcccacctcggcctcccaaagtgctaggattacaggcatgagccactgtgcccagcaatttttttttttttttgagacagagttttgctcttgttgcccaggctagagtgcaatggcgcaatcttggctcaccgcaacctctacctcctgggttcaagtgattctcctgcctcagcctcccgagtagctgggattacaggcatgcgccacgacgcctggctaattttatatttttagtagagatggggtttctccatgttggtcaggctggtcttgaactcccgacctcaggtgatctgcccaccttggcctcccaaagtgctgggattataggtgtgacccactaggcccggtcccatttttttttttaaaggtacaaaataatatatagtatgcaaccttttgtgttaaaaacgtggaaataaaatagatgcagctaaccaccatggcacatgtacacctatgtaacgaacctgcacgttctgcacatgtatccgagaacttaaaaaagaaaggaaataaatatatacatttgcttctttttatataaagaaattctagtcacatatactgtataagaaactaatacttttagggaggtggtagaagctgggtagatagggaacgggagagtaagagagacttttctcagcataacctttttgttgttattttttaaattttgaaccatgtgaatgtattacctattcaaaaaattagattatacaagtccccacaaagctagaataagagcaaaccaaccagataactttcatgctagaacatgaaagacaactgtcaatctcagaagttgaccctggcaagaaggttctagaggtaggctcgctagccctggtcactggaaaccaatgatagaaatgtgtggagagaggaatgggtacacacacgtacacaaacacacacgatgccttaccagacacaagctggaaagagttcccacagttggagatgtctgcatgatcaggcaaaggctaagaaagagagaatatccatcatgatttggattcaggacacactgacagatttctaggaagccctcttcagttctcctctgcgattcatgagctacagggatgttagggacattaagtgttcttcctcttgtcttcccaaagttagtaagtcaaacaatccacatcttccaacatctcaaacccttctccacccaagttttgctgtcccttctctatcggtggaaaaatccctgcccccttccttttgggctgggttttgagccattagtgggctcttccaggttaagtaccatgattcatacagcacaggacaagagtaaagtaatagcaacaatcagcctcagaaaaaagggggagggggtcgtggagaagcaggaagactggtcttttaccagactgatgctgaagcgtgtgcatttcagctcatccagagtctgcttctgtagctgctcagtgatcagggttatcatgattctccccaggatttgacttgcacactttggagcaaatgatggatgtcttccctgttgttcttccagacctcacttgtgagccgtcttctgccactgcagcaccattctagcaccattgggacttccctctccagtcatgcctgctgagtctgccaattagagggaccagccccaagtgatattagagatgcacctggtccagagatggaaaatgcatggcacacataccacagcacccctaagccaggcctctggcagacatcaattgatcacagctctttccagctaagcctaaacacagcttcagaaattatgaacttggcagtccagatatgaaataaaatagagttggcaatcaagttgaaacttatttgctacccttaaactggttcatgctctgttgtttctaactggaataccagcaccacttagaaaacagctgctcaagtgagagagagggatgcccaaatgattatttccatcaagatcagcccagtattttatcttccagtcagaagtgaaaagaggtacccttctcctaaactacagaaatagtaataagagaacaaggaagaacagtggttgtaggcaagactttctgctttagacctgagtacataggattttatgtcctcccacagcctaaacatctgatatattattgttttccaatagatacagtgtttgttttcttatcaaatgggaagataaagaaatggtcagggtaattccaatacatttcaactctacagacgtcgtaaacaacaactccatgactgttcaactaagtttttagcctcatctgatgcaaagtccatggatacagttaaccaagattctttctcgtggtcaacttctgatagaagcaaactaactgtatcagataacaggcttcaagcccacacaattacctgaggggccttgctcaagggaaaaggggaggttaagccagtgtcttgattttgttctatctattcccggaaatgagcagcaagctgacagcttaccagagaatgtgtgtagcattagctagtcaagagaacaaatcatcaagaaatctaattattaatccaatttgctaagagttttgacaaatcatttaatactccttggcctcagtttacccatatgtaaagtgggcagaataatcttaacctgtcacaggaacaatataacatattaaaatgtacaaaatgtaccatctgacctataaaaatcaggagtccacacagactaccatttctcgttcccgtttgtgaatcttcaaggcctcagaatgtcagaagtaatgaaatcaataagatgaagaaggcaatagggtccatctctctggctgaataccatcctccctcacctgcacactaagaaaagcccaagagggctcttccttctgtgaccttgggggcagatcactctacaaaaaagaggaattatctctaccccactcacaccttagaaggagggcacaaggaagagcaaagagataaacctggatgtacctggagttctctggaagaaaggtgcaagagaagtcaatcatcattacagttaactatcattttcatgcataattattaccaccctgaacaaaattctagcttccggggagctctcttcagctgcttcccctatattcttacgggagaagctaaagcttatatcacttctgctcttggtttcttaactctgctgccctcaaagatcaaccagagagggaacctaagtgcaggattttaccctagagaccccaggcctcaggctaaccagctatgaggagcagggaatgaagcaaactctccagcttttcatgaggcatttggacaaacagcaaactcccagccacctctaggatcaagtcaagacagtgaatttgtgtttttctgcattttaattgttgggatgtggccacacacagtggtaattggaacaatgcaactaccaccacgcaactgatactctcagcctgagtttcctaaaacaggccaggctgcgagggggaacagaacggaagccataaggaatcaaaccaggacacaaaagaaggcaaaccagctccgcgaggggcctcctctttctcaagcaggcattgaaaaaagtgtaagaagccctctcttgccgccttccttccccttccattttgtgtatctgaagggtagagacagccctgaatattcactaaacaagttaaaacttctcagtttaacaactggcacggggctcagcccttcacagagcagcaggccgctaggccctctcagcaaccccaccagacctaactctcagtccaggctttccctccaccagcagcccccaaaaataaagatcagacccccaccccatctcctattggatggcagtaacccctgacactcctgtttcagggatgctgaggttgtgctgtaccaagacaaggtaggatcaggtcaggccaacagggaggagagtcacaaaccctttggggaccttcccctcaggtcccagccccacacctcctggggagactgaagaaaaacatgaggaaggcagggagctgcatgaacaggtaggtggagatctgcctgctcttcttccatatggttctggtggggaaaggggtgacaagtggggaacacccctccccccacccccatgaagaagcaaaaggctaggcccctccaatcttcaacctctccctctgttgccctgcctgtccccgcggggtggggcatggggcgtccgctggtccccggggcgggggggggggtgcgccagggctcgctcaggggggctgtcgttcgcctcttcccactaggttccatcatctggccgcgggaagcgaactcaggacgcaggggatggggagggtctgggacttagcactccgccaccccctcccccaccgggtcccgtgctctccccgcagaggcggccagcgaggcccggccgcgcgggcggtcgggctgggggaggggaaagagggaaggagggagggacggttgaggtgcccgccccgaggccccagcgccacctgccctccaccacctaccgcggttcctccagctcccagggccgcggccggagcagctctgagcgctcggttcgccccacggtgcccttaaaaggcgctggcgcgaaccaacgagtccctgaggagagtagggggacagctccggctcgcagaatccccccaagccacccatggagggcgcagctccgtgtcgtgtctctctcaaagtgtctctcggacagcgctgttgggaacgagcctggcgctttgatttagggatgggggtggtttcctcactaacgagtcaccccctccaaaatatcgcagaaagtggacggccccagttggaggcacatcttgaaacccgcgggggaggccatgtcggaagaaggtaaacaaaggcatcgcccctgccctccctccctccaacggcccaactgcagcctcccactcggttcgggccgcgtcacgcaattagccacagtgcccctcacctgctctgctgccccgccctccacgaccacctcttcgaaggaatcccccttcccccagcaaaggacccgtccgcggcgtgaaggctgctgggaagtgtggtccaagcgcggattagggcctgctcggagtcccaggagcccctcttgcagctgccggatcggcctgaaccttaaaaacccaggacttataatggttgcggggacgtttccacttggttctgtaatttgccctcacccagaacactttgtaaagctcaggatagcccagggctgttcactccctctcttctctctccgccccctcccccccagcaggatgaggtaatgggattgtgattatgacatcataggcggttcagttgcttgcgtttgcctggggggaggtgcggggaggtggggagaagtgcggtggttagactttccttaaacagaaagggaaggaggaaacaggcagatggggaaaagatgttgacggcgctatatttccacttcaggaa

SEQ ID NO: 2372 - DNA, 6000 bp, Homo sapiens
cctgccccaccgtgacacgaccctcacttctccaggattgcccttcagtccccatagtgccttctcctctggtcacaaactccttcaggtcacctatgtcctcacaaagtcttcatcaaagctctctcttttgctgtgtcaagacacatgtataggcctggcacagtggcctgtaatctcccagcactttgggagccaaggtgggaggatcatctgagcccaggagttcaagaccagcctgacaacacagcaaaaccccatctctacaaaaaataaaaaataagccaggtgtggtggcgtgtgcctgtggtcccagctactcaggaggttgaggtgggaggatcacttgagcccaggaggtagaggctgcagtgagccgagatcacaccactgcactccaacctgaatgacagagtgagattctatctcagaaaaagaaaaaaaaggcatctatatttactaccctcagttttgtttttcacctcaccacccttgccctactctcatcttttttttttttttttttttgagacagagtctcgttcttgttgcccaggccggagtgcaatggcacaatcttggctcactgcaacctctgcctcctgggttcaagcaattcttctgcctcagcctcctgagtagttgggattacaggcatgtgccaccacgcccggctaattttgtatttttagtagataaggggtttcaccatgttggtcaggctggtctcgaactcctgacctcaggtgatctgcccccccttggcctcccaaagtgctgtgattatgggcatgagccaccgcacctggccaattttttttttaataggcaggtcttgctatgttgcccaggctgatctcaaactcctaggctcaagtgatcctcctgccttggcttcccaaagtgccaggattacaagcaggagccaccatgcccggcctttaccctcaatttttttttttttgagactgagtcttgctctgttgccaggctggagtgcagtggcacgatctcggctcacggcaacctccgcctcctgggttcaagcgattctcctgtctcagcctcccaagtagctgggattacaagtaggtgccataatacctagctatttttttttttttttttgagacagaatctcaccctgttgcccagactggagtgcagtggctcgatctcgactcactgcaagctccgcctcctgggttcacaccgttctcctgcctcagcctccagagtagctgggactacagacacccgccaccacgcccggctaattttttgtgttttgttttttagtagagatggggtttcaccgtattggacaggatgctctccatctcctgacttcatgatccgcccacctcggcctcccaaagtgctgggattacaggtgtgagccactgcgccctgccatgcctagctaatttttgtatttttagtagagacggggtttcaccgtgttggccaggatggtctcgatctcctgacctcgtgatctgcctgccttggcctcccaaagtgctgggattacaggcgtgagccaccacacccggcctttaccctcaatttttaacccatctctccatctctttcctcttctaaaactatttttctcaaatgcaagggtcttatctataaatgtaatgatctcttgtcctctcccccttggtaaaattctcttcttgagttccgatgaactgtgttattagtcccctcttccaagaggtatctgatcattcagtaaacatttttgagttcctgctgtgaatatacagatgattaagacatattccctgtcctcaaagtgctcatacatacgtagtctagtacagcctggaaaatgccttggaaatgcaagtatccagcatttataggagtgaatcatatgcctattttacaaataaggaaactgaggcctcgagagctgtgacctgcctaaggtcgcaggcagcatggcagaagcgggtttcctgaattccactgaggggctctggctgccgccagaaagaaacatggggattatgtttgttcttactccttgtttgtttgttttttttttgagacggagtctcactctgttgcccaggctggagtgcaatggcgcgatctcggctcactgcaacctctacctcctgggttcaagcaattctcttgcctcagcctccctagtagctgggattacaggggcgccaccatgcccagctattttttttttgtatttttagtggagacggggtttcaccatgttggccaggctggtctcaaactcctgacctcaaatgatccacccacttagacctcccaaagtgctgggattacaggtgtgagccccctcgcctggcactactatgtctgttcttctgcaggtcaagttaggcatgagaggggagatatcaaggaccccatgaaattgtcaggaatgggaggagcttcacccccaggcccagtcttttgtttggctggctgggtagagaaaggcagaggccctgggccctgagatacaggaggggacgctggacctcaccaggagagcactatatccgtgagcgtctcggccgtggtgaagaaggcaaagacgatccagtacatcatccatttcacctgagggacagagggaagcgctggctggggcacggggctgaggggccagggacacccaggaccccagctctgcctgttgaacatgcctgggctggggagaacaccaaggaccccacttctgcctgccagccatgttggaggcgctgtgtgggacacccagggccctcctttgctggtgggtcttgttagtggctgacagtgttggtgcaaagtcacccccatctgtaataggacccagtgccctcccctctctgtgccatgtgggttgggtagggggtgaagggtcatccactcacatattccttcacgttttttgtcttcacggccttgtaggaagaataggctgggtacagggtgccaaagatgagcctagggaggcaggcatggttactgggcctctcagccaagggcagtggcctctccctcccagctccgcatcagcccctgggtaagtaatgggaagagagacagaactccccgctggactgatgaactcaggtcaggggttaaggtcaaagcagcatggaacatgcccagccaggtagggtgatgccccctccccgctccactgttcagtttttctctagccccggaggcagggaaaggcccagaggccagagggtccaatgtagtcccttgcgccatgatccttggttacacacaaatatgtcatggagactgggagtcaggtcactgccacagggtgtcttccttcttgacctcatgcccattcacacccatctgcccttaccctccacctccctcagagccaggctctgcgagggaacctgacaccacctaacagggcaccctacctggcaggcagaggtaccactgtggccctggggccctagggaacagagggcacaggggcaggaggccctgagagaggcaaagaggcttattcccccatgtaaacaccacagggacagggctcaggggagggccccgctggtgatccaagtacagaatgcagacaagacacaggccgggaaagaagaggaccgatgccctttggggcttgcccaggcaagagagaagcagccaccctgaaggccacatggaggcgtgaggcccctccattccccctgggatgggtgggggaagagaaggagtctagagtaaaccaggacagaagcacttggccggcccggctgtaccgaatgggaagaagggagcagggtggggctgccggtgtcagtccccaacggtggaggccgaggggcagtgtcctcattagggcaggggatagctccgagaaccacgaggagcccctgtcaggctcagccccttgacaatgtgtggctgtcgcctgtttccacatggacaggagggatacttccaaaccggctggtgcaagtggagtgcggagcagaatcctcaaggacaaagtctgggctcgtggggaatggtgtgtgttccctcctggggcccggggaggtgccagagacacagctccacagtgtggctggcagcctggaatgaaggccacggagcgtcctcccccagcggggtccacaatcccaggctgagcacacacatcccctctcccagttacctctcacactttgtcctccgagcatttctgcttcccgatacccagacttcctccctagggggcctaagggcatatgccctcgtccccagtctcctgacagtgagtggaagggagagaccaaggggcctggtgatggctctgagctgcggaatgatgatgaggccctgccttgctccactctcttccatcaccctgttacctcccccagagggacagggcccgggtctgaggatctcctccagcccagacctgctaggtgggggaggggacgcgcctgcctccccttttaaatcaagccgtgctgctcagcctctaggatgggcgcaggagcaaggacggtagaaataaaagaggttattaataaagaatgtgggtgaggtccctgggaagccaggcctgccacgctcccctaatattcccccctccagtcctgggtgccacatctccatgtctctgggggccccaaataaggacgcagcgcctttaggtgactctgctgcacgaagcttcggagaagtccacccgggctttaacacccccgccctccatcacagcccgcatcaccccccgccgccgccgcactcacaccaccaggcgagagatgatccaggacaccatggcggggccgggcgcggcgcggggcggggacccggcccggccgaggatgcagctgcctgaggccgagcggcggcggcggcggcagcaggagccgcagtagcagcagcagccgctgcagcagccgccgcgggggcagcggagcgcccagcgccgccgttaaaggggaggtccctgccgcagcggcgggccgtgggcggtggcggctcttaaaggggaggccgggaggccgccgcggcggcggcggcgcgcccccgccccggcacctgctgtggccgggcatgcgcctccgaccctcagtgccctgccttcctcgaatcgcttgttcatctttcttgggtttcaagccctaggctgttgtcgtggaggtctccatggttacatcctgaaatcgacccctgcccacctcctgccctgcccacaccaggcgcttactgtgtgccagcccctgtgctaagagcttcactgcgttgccagtgaatcctcttgaccaccctataaggcaggcgctataaaagccctcattttgaagataagggaatgagaagcttaaggctcaataatctgttgagagtcacaaagccaccaagtcatgctgctaagatgaccccaggaagcctactttaaacaggttacatcccccaactgctgactagcaaactctcctcattacaggccctgaagacatccacctgagctcctgagtcacaggtacagccgcacctgtccaccccactccttctcaccccgttgaaagaggatctcccctgaccagatgatgttttgtttttttgagacaggtcctcactctgtcgctcaggctggagtgcagtggcacaatctcagcacacctcctgggcttgaatgatcctcccgcctcagcctcccgagtagctgggactacaggcccaaaacaccaccagctaattcctgtttttttgttttttgtttttttttgccaagatggggttttgcaatattgcccaggctgatctccaactcctgagctcaagcgatccacccgcctcagcctcccaaagtgctgggatcactggtgtgagccaccgggctgctggtctgcttttttaggttgtcagctcctaagctttgcagcggaacagagctttatgctctcaatgtggttactgacaacaaagggtcaaccttcttttcaaacagaggggctgcgagagggtcctggggctccagttccacccccatca

SEQ ID NO: 2373 - DNA, 6000 bp, Homo sapiens
tcaggaggctgaggtgggaggattacttgagcccaggagttttgaagctctcgtgacctatgatcaccccactacactccagcctgggcaacagactctgtctctttatttaaaaacaacaggctgggcgcggtggctcacgcctgtaatcccaacactttgggaggccgaggtgggcagatcacaaggtcaggagttcgagaccagcctggccaatatggcgaaaccccgtctctactaaaaatacaaaaattagccaggcatggtggtgggcgcctgtagtcccagctacttgggaggctgaggctggagaatcgcttgaacccaggaggcggaggttgcagtgagctgagatggcgccactgcactccagcgtgggcaacagtgttagactccatctcaaaaaaaaaaaaaaaagacctttcctgactaccctgtttagaataacaactcctgctccagcactaccagtcccactttcactactttatttttcctgtagtattttcaccatctgagatatagctatagatacagatatagatatatttttttaatctgttacttaaccctactagaatgtaagctatttaagctctgtgaaggcaggaattttacattttactcactgcttttccttagcacaatgtctgacacatagtaggtattcataaatctttgttgaagcaatgcaaaaaaattaatggagaatagtaaaagaaggacttggatgcccatgacccagcttaagaaattatagcacacatacatatacagcaactacatggttgaagcccccatgtacccttcccctttgcatttccccgcttttcctccccagaaataacctcagttttcttgtcagccctttaaaagaaagctgtctttattctcttcaccttaatatgcctgttcacttttttcaataacttttattgtgtgttccaatttcacaggtaatatatccaaatcagaaaacatataagcacgaagggaaaaaataggccataatcctgctttcccctcttgttttaatgcatccttattagctgtagaaccttaaggaagcctcttaaccatataaggaaacaaagttctccaggtgttcactgtggccttagtttccgcagtttctcctctgtaaattgggcatgataataatagaacctacctcataggattctgtcaaggattaagcaaaggtccacataaagagctcagcagcagcgcctgcccaggacatagtaagcacataaatgatggtgatcagatggcctttcacataacttcattattcttttttgagtacacacctcatgccctatgtgatttgtaaatgactgtggggattgatacaggaacgcacagtcctttttgggagtttccccactaaaccagtaggcttacagtcaaggtagaacgtacatttgcatggggctgctgtgaactgactttgctgtacaccttctctaggtgaagaacatcatttaccatgcagtgaaagatgcggttggcaccctcaaggctcatgaatccaaactggcaaggtcctaggcatggagaaactccaagctcctctgtgaagcaggtctttcactcacaacacttaacagggaacggcagggctctttgctggagcagaggcccttcacccagagccagtgtggtcagtattccaaactctccagccactctcttctacgctgcctcaacactgaaggttgacacaggaaagtcgtactgttcacacacacagtttgagactccaagccaagagtgccacatccctatcctgtggccttttggaaatccaaattgcctgaacatggcggggctttcctgcacattctcctgatttgagattcacgggcacacctttcttttcttttcctcttgtgcctagttaagtggaaatgtgtttggagataggggaaatcacataactggtacaagtatggggtaattgcttaaacatgcctggtggaagtctgatagcgtctctgcacgtgacctctgacaaagcccatcccaggagacggggtgaagctattccccacactctcctgtgaacactggagtcttgcaagacccagggagaacccactgcttttcccaggaggctccaggattaggaaatgtgtgtatttagtgaaaaataggtttgtagtgaaatagttactatttcatgaaagtagatatttttagaatttttgaaataccacagttgttttcctggattataaggaaaggcacattacatttagtcttcctttcgatataaaactctttgaagaaatatgatttttagaaatcagctacccattatagcacaaaatcagccaaagcagaatttttaaaaattggcttttttaggattctttttctccccctcccatcttagtcttaccttgagggaacagtcatatgagaaggaactttgtcacatctaagctgtggtgtgttccccatgtgtgtgtacaacactggtgactccaggaaccattttcacctattaccagtgttccctggggactcctcttaatgtttccaaatgggaaggacagttgatttccaacatgaggttttttgttttttatccagaaatattttcagcaaaactttccaactgagtggagtctgattaaggatttatttgaaaatggtgggattcattggcccataggtacattggaaaatgtatatctctccagctgtactgtagtgccctgcaggctgtttatatgttcacagttacttttttttttttttttaaataaaagtcatttaatgtagaatacttttaatttcactttctgtattttaattttgttgaagggctgattgggatttccatgttcttattaaaaatctaacaaatctgtttggagtggactaaattattcgtgtaccaacccttctaaaatcaacatcagattgggagttgggttggaggtgggggattcatttccaggtcttcatgactgtgctacacccagatatttttctttgcttgttgagactgtgccatgttagaaaaaaggaaagtgccagggtgaggtcagtatggtttggggaattgggggtaaggggaaggggccacatgaattagagggtagaaagagagacatgtttccccatactttatgctttgtgaatggagtgggaaagttggggtcctcccttcctgtggcagagtctggggggaagggtcatggtgtgtggcctcagcaaagttggacagtctgtggtgggattcttaagcaggcagcctggctgcctacatgaaacgtgtggccatagatccaccttagagatggtgggagacactcatgtgggatttatcaagcagtaattaaagtgtttcattgtggggtgataacagactgcattccaattaggagatgttttctggagaggaagttgtaaagaatagcaagaggggttatcagaggctgcttttctggaacgttttgggaaacatcttccaaagtgtttgaacctggaaatataatttaccaggttagaaatagaccattgtgttgttcagggatactgagcttgaataagaccatgactctttgaaatacacagttctgaatgtgtcctttcagcccagatgggcacaggttgatgctgtggtcacccgaaggattacaactcaacataaagggtagaggaatgcagaagctctaaaatgggacaggaaaggagagcaatagggctgggggtgttggtggatggttggaggttggttgctttcctgaagatcaggaggcaggctagcctacattctggatataaatgtctttagaatcaggacattcactgccactagtgcttgctgatgggggtggaactggagccccaggaccctctcgcagcccctctgtttgaaaagaaggttgaccctttgttgtcagtaaccacattgagagcataaagctctgttccgctgcaaagcttaggagctgacaacctaaaaaagcagaccagcagcccggtggctcacaccagtgatcccagcactttgggaggctgaggcgggtggatcgcttgagctcaggagttggagatcagcctgggcaatattgcaaaaccccatcttggcaaaaaaaaacaaaaaacaaaaaaacaggaattagctggtggtgttttgggcctgtagtcccagctactcgggaggctgaggcgggaggatcattcaagcccaggaggtgtgctgagattgtgccactgcactccagcctgagcgacagagtgaggacctgtctcaaaaaaacaaaacatcatctggtcaggggagatcctctttcaacggggtgagaaggagtggggtggacaggtgcggctgtacctgtgactcaggagctcaggtggatgtcttcagggcctgtaatgaggagagtttgctagtcagcagttgggggatgtaacctgtttaaagtaggcttcctggggtcatcttagcagcatgacttggtggctttgtgactctcaacagattattgagccttaagcttctcattcccttatcttcaaaatgagggcttttatagcgcctgccttatagggtggtcaagaggattcactggcaacgcagtgaagctcttagcacaggggctggcacacagtaagcgcctggtgtgggcagggcaggaggtgggcaggggtcgatttcaggatgtaaccatggagacctccacgacaacagcctagggcttgaaacccaagaaagatgaacaagcgattcgaggaaggcagggcactgagggtcggaggcgcatgcccggccacagcaggtgccggggcgggggcgcgccgccgccgccgcggcggcctcccggcctcccctttaagagccgccaccgcccacggcccgccgctgcggcagggacctcccctttaacggcggcgctgggcgctccgctgcccccgcggcggctgctgcagcggctgctgctgctactgcggctcctgctgccgccgccgccgccgctcggcctcaggcagctgcatcctcggccgggccgggtccccgccccgcgccgcgcccggccccgccatggtgtcctggatcatctctcgcctggtggtgtgagtgcggcggcggcggggggtgatgcgggctgtgatggagggcgggggtgttaaagcccgggtggacttctccgaagcttcgtgcagcagagtcacctaaaggcgctgcgtccttatttggggcccccagagacatggagatgtggcacccaggactggaggggggaatattaggggagcgtggcaggcctggcttcccagggacctcacccacattctttattaataacctcttttatttctaccgtccttgctcctgcgcccatcctagaggctgagcagcacggcttgatttaaaaggggaggcaggcgcgtcccctcccccacctagcaggtctgggctggaggagatcctcagacccgggccctgtccctctgggggaggtaacagggtgatggaagagagtggagcaaggcagggcctcatcatcattccgcagctcagagccatcaccaggccccttggtctctcccttccactcactgtcaggagactggggacgagggcatatgcccttaggccccctagggaggaagtctgggtatcgggaagcagaaatgctcggaggacaaagtgtgagaggtaactgggagaggggatgtgtgtgctcagcctgggattgtggaccccgctgggggaggacgctccgtggccttcattccaggctgccagccacactgtggagctgtgtctctggcacctccccgggccccaggagggaacacacaccattccccacgagcccagactttgtccttgaggattctgctccgcactccacttgcaccagccggtttggaagtatccctcctgtccatgtggaaacaggcgacagccacacattgtcaaggggctgagcctgacaggggctcctcgtggttctcggagctatcccctgccct

SEQ ID NO: 2374 - DNA, 6000 bp, Homo sapiens
atctacaaacacacacacaaacacaaacacacacatcaaagtagaagggcaaaacccaaagacaaagtgaatcttaaaatataccagagaaaagacagatttctaacaaagaaatgaaaagcagcctgacagaggactttttatcagtatataaaatcagaaaactatggaaaaatgccttcaataataattgtcaacctatagttctatatatagctaagctgtcattcaaaaataagggtgaaccttttagatatgcatttatttatttaaaaaaatatacatattttttggccaggcgtggtggctcacgcctgtaatcccagcactttgggaggccgaggcaggcggatcacgaggtcaggagattgagaccatcttggctaacacggtgaaaccccgtctctactaaaaatacaaaaaattagctgggcacggtggcgggcgcctgtagtcccagctacttgggaggctgaggcaggagaatggcatgaacccgggaggtggagcttgcagtgagccgagatagcaccactgcagtccagcctgggtgaaagagtgagactccgtctcaaaaaaaaaaaaaacaaaaaacattttttttgagacagggtgttgctctgtcaccctggctagagtgcagtggcagatcatagctcactgcaaccttgaactcctgggctcaagctattctctgcctcagcctctcaagtagctgggactacagaggtgtgccacacctggataatttttaaaaatttttgtagcaatggggtcttactatgttgtccaggctggtcttgttcaactcctggcctcaagcaatgcttctgccttggcctcctaaagtgctgggattccaggcatgagccaccacacctggcctgatgtacatttttagatatacacagagcattttctagggctgccacaacaaagtaccacaaactgggtggcttaaaacaacacaaatttattgtctcagttctgggggctagaagtccaaaatcaaggtgttggcaaagccatgttttatctgaaacccgaaagagaagaatccttcttgccttttccagtttctgatagccccagatggtttttttgagacagagttttgctcttgttgcccaggctggagtgcaatggcacaatctcggctcactgcaacctccaccgcccaggttcaagcaattctcctgcctcagcctcctgggtagctgggattacaggcatgcaccactacgccccgctaattttgtatttttggtagagacggggcttctccatgttggtcaggctggtcttgaactcccgacctcaggtgatctgcctgccttggcctcccaaagtgctgggattacaggcgtgagccaccacgcctggcctgatagccccaggtttgatgtggctttctccttatgtctgttcacatagtcctccttgtgtgtgtgtctgtatgtgtccaaagttcccctttttataaagacatcagtcatattgcattagggcccactctaataacctcatttaacttgattacctctgtaaaaactccatttccttccttccttccttccttcctttctccctttctttttattttttgagacatggctttgctctgtcacccaggtgggagtgcagtggtagatcatagcttactggagcctcaatttcctgggctcaagcaatgcacctattgcagcctcccaagtaactgggaatatagataactgccaccacactcggttaattttttttattttttgtagagatgaggtctcgccctattgtccaggctggtctcaaactcatgggctcaaagaatcctcccgcctcagtctcccaaactgctaggattataggtatgagccaccacgcctgtcccaaaaccctactttcaaatagggtcacattctgaggtactgggagttaggacttcaacatatcttttgtggggggcacaattcaacctgtaaaacaaagatgaagagaatttacttatcagacattcttactaaaagaacctactgaaggatttcctttatcatgaaggaaattaggctgggtgcagtggctcatgcctgtaatcccagcactttgagaggctgaggcaggtggatcacctggggtcaggagttcaagaccagcctggccaacatggtgaaaccccatctttacaagaaatacgaaaagtagccaggtggtgacatgcacctgtaatccaagctactagggaggctgaggcaggagaattgctggaacccgggaggtggaggctgaagtgagctgagattgaaccactgcactctagcctgggtgacagaatgagaccatgtctcaaaaaagaaaaaaaaaaaaaaaggaaattaaactcatgaggaagaagtagtatacaaatacacaaagagaaacaatgaccaaacaaacaatgcagagaagactcttgcctaagatcatattacccttaagtagtataatcagtatttgtacccaggttgtctgacagcttagcccaggctcttaacttttacagtccatacatctctatgaggactctttcaaaagtctcatgaggtaatgtacaggacagtatttcagactttttttgaatttcaatattcaatcactattttattttattttattttattttattttttgagacaaggtctcactctgtctttcaggctggagtgcaatgacacaattgatccccactcactgcagccttggcctccaggcctcacacaattctcctgcctcagcctcctgagtagctgggactacaggggcatgccaccatgcctggctaatcagtcagtatttattgatcatctgtaatgagaatctaagaaggtcccagagaatcaaaatatcagatcctttttactctttctcaaattggggaggaatgagtcttcttttttttttccagaataatttattcacatccagtatccattttgtatttttttcccgtgatgcactgtgacaggtgttctaggtacaagaggtggaagaaccattattccatagttcttgatttcaaggagcttacagtctaagaaaaatgttttctaaaaaaaggtagacagtgttatatgccttgagagagaaatagatgttgtgaggggagttcagaggagagattatctttgctctgtgtgatgggggatgtagtgcccatttgctggactttgaaagacaaacaggacggcgattaacaccagtgatttattgagtatctacttgtgtgcatggagctatgtttggagctttttatcctgatctcatttatttctcacaataaccctgttaggtcaatatggtcactctcaaacatgagaagactgaagctcattaaaaataggtggcagatgctggacgtggtggcttgcctgtaatcccagccctttgggaggccgaggcaggcggatcacttgaggctgggagttggagaccagcctgggcaacacggtgaaacccgtctctaccaaaactacaaaaattagccgggcgtggtggcaggcgcctgtaatcccagctactcgggaggctgaggcaggagaatcacttgatcctgggaggcagaggttgcagtgagccgagatcgtgccactgcattccagcctgggtgacagagcgagaccctggctcaaaaaaaaaaaaaaaaaaaaaatgtggccgggtgcggtggctcaagcctttaatatcaaagcactacagcactttgggcgaccaaggcgagcggattgtttgagctcaggagtttgagaccagcttgggcaacaaggtgaaaacccgtctgtacaaaaatataaaaattagctgagtgtgggtggcgcgcgcctgtagtcccagcgctactcacgaggctgaggtgggaggatcgcttgagcgcgggaggtagaggctggagtgagtcgtgattgcaccattgcactcgagcctgggtgacagagcaagatcctgtctcaagaaacaaacaaacgtacaaaaaaaaaaaaaaaccccacaaaatatccaagtgacttgcttaaagtcacacaattagtaaatggaaccagacataggctaaaggcagaccaagccttgaatctagattaggctggttccaaattccctgccctttcatctccctaacagtttgttttctttctctctttctttctttttttaaaaaataaaataaatttcctaattatttatgtagcactttctcttagcataacagtttttagagtaggttaacttttttttccatttccaaaagtcaattattatctattctggttcaaatgccaggtccttttatggcagagattctcaaaaaagtgatccgcggaggagttgcaccattaggtcactggggtagtctgcaaaagtgcaaatttccagaccccattctcaaagattctgagtacgtttgagatgagacccagagaacctgcatttttttgtttttaaacaaacgtattcagcctctcttgagaaccactgtgcctagaatgtctttgggaagcttttggaagtaataagttcgttttggaaagaacactccagacaagctttccaatagtctttcccaaactgtcatgcctgaggttctggacttactcttactcattcctgagagcacagcgactagctgaaggactgatcgactgatgagggtttgacctcatctacatacatctcaatttagcagcacatattaagctagctggcaaactgcttaaagccacatgggaaatctgcgcgttgggctatgtctggaagatacggaggagcaagccagacctgaccggtcaggtagtgaagacacggaatccgaaacccaaatatttcaggagtcaattctcagagaaagataagaagcccggttagtccaactcatgcgcaggcgcagaagaaagaccggcgcacaaagtaagacgcgcccttccccaccctatttcagtccaactcccactgcgcaggcgcttacagtgcaccaagatggccgcccccgtggatctagagctgaagaaggtaaaagagggtctttggcaggcggaggtcttctttttggaggctgaggggactatagacaagaatatcaagtgaggcacgagccttgcagaaggaaggagggtccagtggactagggaatggtttcccagagtcctaaggcctcactgggtctccataaacggggtggggggcgagcggctcttgctgggtaggagccggttggtctgggtcgggtaagtctgcgggcctgtctcgggcttgtccagtctttctgagctccagagacatttcgttgcgtttggaggcttcagggactcactttcatagtaagaactaaagagagcatttcaaatgggggtcccttcggaccccttgcctgagctgtggcatccgtaattctgcctcatttgctttgaaaaactccaagtccaacctttgtttttaggccatttattcggttctgtaccttgaaagttgcaatatctacagttcggaaaaccaagcattgtagcagcaatgttcatttcaggattttgccccccctccacttcttttgaaggactcgtcaaacaaaacaaaacaaaacctccttcttttgaaggaattgtcaaaaacaaaacaaaaccagtaaagttttccaaataaaaccggtatcggaaggaattgggtttcctgttttcctcagttgcttataaatgtgttgttattcagatttttgctatctaagaatgatcagcattctaacaccactaatgaccccaaaccagtatgctttgtgcggtggggtggattggaaaggaccctagaatttatctattttaaatctacttttctggaaaaggaaccagtgccagaaaagtctgtcagaagttgggactagaatccagtattctctgccttatctcacacttttttgaccactattttgagttcttcagatgagcaacatcttagttaagactgcctgtggtcaacttgtgtaaa

SEQ ID NO: 2375 - DNA, 6000 bp, Homo sapiens
ggggttaggctgctgtccctgagtcctccattctgtactggggggctggctaggacctggggctgtggcctctcagggggcagcctctccatggcaggcatccctgccttgggctgccctcccccagacccctgaccaccccctgggtcctgtcccccaccagagccccagctcctgtctgtgggggagccatcacggtgttcgtgcagtccatagcgcttctcaatgtgtgtcacccggaacctgggaggggagggaacactggggtttaggaccacaactcagaggctgcttggccctcccctctgaccagggacatcctgagtttggtggctacttccctctggcctaaggtaggggaggccttctcagattgtggggcacattgtgtagcctgacttctgccggagctcccagtccaggaggaaagagccaaggcccacttttgggatcaggtgcctgatcactgggccccctacctcagcccccctttccctggagcacctgccccacctgcccacagagaacacagtggtctcccctgtccgggggcggctttttccttccttggagcgtccctgacggacaagtggaggcctcttgctgcggctgcaatggaggcaaggggctgcagagcccaggtgcactgtgtgatgatgggagggggctccgtcctgcaggctggaggtggcatccacactggacagcagggaggaggggagtgagggtaacatttccatttcccttcatgttttgtttcttacgttctttcagcatgctccttaaaaccccagaagccccaatttccccaagccccattttttcttgtctttatctaataaactcaatattaagatgttagtgaccatatgttcttcctcccagggctgtttgctaaaaagaacactgcttaacccaaaggagtggcactagaggtgaatgttaggcttgatgatatctagatgagagagatggtttgaaggaatcgcgatttctacaaaacaactttcttcctataagttagccagctttgcccttcccccaaccccatacatgcaaggaggctgggagaggattgtgctggaggagaggatactctccaaggcaagctaagtcatgctggcccttgtttccagctcacctggacagctgcactgtcccttctccttcactgtcccccagcatctccttcaaggcctcagcattggctgagggaagaaggaaaagagggagtcagtggaggtggaggtcagggcaagagaaggttggagaagagggagcaaggggctatgctagacccaccttcattctggatgatgcagcgaacaatcctctctactgtgtcctcattcatgtcatcgtcctcagctgaaggatgaaagagattggcaaggaagcaggaatgagtcagctttgggggaatattacctggtggctcccatcatttattgcttaggacatacccttttacctacttgctatcatgctggacctcagcatttcagggaccagaaaagatggggacaccaatgcaagcccaagactaccatccagaggaccgttcctgcccatgctgctttctctagttttgctttcagagtggtgtcaccccacttgctaactcaagagtgcatcactaggcttcctgagcaggtttgatcaggatttggcctgggtctgttggtcagggaggcagaggtgtggggagaagggtgaaaggtgactgagccagggttccaggctcctcactcacggggctgaagctgggcatcgtcaggctcagagcccctcgacgtgcggcagcggtagcccttcttcttgagcacgtggcagatcatgaagcctaccaggcccatgaggaagaagaccagcacaagcaggaagagcatatatagcccatgttggggcggttccaggtcaggctgtggttccgacatgaggccctggggggcgagcgcgggccagggcgcctcctgggtttagggggctgcagctgggaatgggggaggggtaggaatgccgtcctcaggatctgaaacaagcacgtctaagacgtccggctgaggtccggccccaccccctacccaaccagggagctgtccgggccaggagtgctgtttcgcctttcggcaagaggtcagcggcaacgcaagctctctaccacgaccctggtcccgcttccccgacgccccgagcgttcccctttccagcttgttcgcgcttctgtccctcccaaggacactgcagcacgagatgggacggcattcttaggcggcgggagcagaaatcctgcctgagtcagcgcccgcacctcctccacgccggcctgagccaggcctctgcagccccttcctctcagtactcccgcacccctctccctttttggtttctcccaccctgaccacctggccgacccggtaccggtgatttggttctggttccggcttctgctggggttccggctccaggggcgtcctagtgcggctcagggcccccgacgcccttccggcgctcatcccttgattcctcccctcccccttcgccgcctcaccggccccgggctgtggctgcggatacccgcgccgtggcaggcggggggagggaagaacagagaaggatgcgggctggctgagagcggtggcaggctccgggcaactccggccctgggtcagggagatcgcctccgcagccgccctggcttcccaaatgccttcacccgtcgcgggcccaggaccagggggcggagcgcaggtgtgcggggcggagagcgtgagctctgcgcgcgcgtgactgcgccgggcccccccggggcaatgtgcggcgccgagtctgggtccgggtaggggacaggcggtccggcgtgggtgttgtccactggtctatccggtacgcctggcgcagctcctgccctcagatgccccgaccgagcggagagtcaggaatcttctccgagggctgggggaagccggctttccgcacctttgagggacggagtggcgggatcttcggagcttcctagagaagtgaccacggcctgcgcccggtttggggcaagcggctggatgggatggctcggcttcccgaggatctgacccccggccggagacaaatggccctcgcatcctaggagctatgctgccagttccctgcccaacccgggacgctcaaagccccagataccgggagagctgagccgggcgaggggcggagctcccctgggggcgtggcctgggtgtggatggaggcggggccgcaacgcccagttccgcagaggccggctacgtgcttgcgcagcacgcacggccggggaggggctggcggcggccgcgggcggcgggcggcggaggtgcggggcctgctcccgccggcaccatggccaagaccgtggcctatttctacgaccccgacgtgggcaacttccactacggtgaggaaacagggatatgcatgaggagttgggacacggaggttttgaggcggggttgcaactccaggggtgagagctgacgaactctcttctccccacccccaggagctggacaccctatgaagccccatcgcctggcattgacccatagcctggtcctgcattacggtctctataagaagatgatcgtgagttccgccgcctcggccgggggttggggggtggggcgagctgtggccgtagggataggtgggctggactgagtgcatgaagtgcgacccgcccctagagtatcggggagctggatagaagtcaccaggagtaccttgaaagtgcagggtgttgggggtggcgtcctctgcttaatggaaagtactttctcacctcaggtcggccaccctctgactgtaggcacactagcccttggcctagggttagcgtgatgtggggctggtttgaagacagaaggtgtgttcctcctctgcattttagagtgtggatagggccttggcctcaggaattagggttaggggagcggatatcactgtatcagggtgtgaggtttaccctcagttcccactcctcttttaccacctttctttacctccaaggagctagggctccagggtggaacgatgctgccgtctttgtaaatgtgtatgtgcgtgtggaacagaggcgatattttagatattcctttttcagcctggaatacctctacatggttctgcttaatcgctatccagtttttcatctaccagacatacacatgctgtcttcccagcttggaatttatggctgtgatatgggatagtaacagttaagccacgccaggcgtggtggcccatgcctgtaatcccagcactttgggaggttgaaatgggggggatcgcttgaggccaggagttggagaccagcttgggccacagtgggacccacatctacaaaaaataaaaataaaaaaagtagccatgtgcggtgggtgtgcctgtagtcccaactacttgggaggccgaggcgagaggatggcttgggcccaggagtttaaagttacagtgatctatgatcagcagcctgagttgacagggaggaccttgtctcaaaagaaaaaataagacaaaacagctaaacccaggctttatgtgttgctagggaaactagtgaacaatatgaatgaatgttcattgcttgtgccaaggcacagacaaatggactggtcatagaaaagactgaggtgatgttagtgcaggaatctatatcccttgagattgtttgcctgtatgtacctgtgtgcattttctgggagaagaaaagctctttcttgtgcagttttcaaagaggtgtgacacatccccctgaccttccaaagataataaatctttgattttaattagaaagttgacatatatcccatatatttgactccagaaagaagaatccagaggaaagaggacagaatcagagcttgggggaggagatgagcatggagagaactgggaataggagattccaaggaacagggcaggtggatcagggctcaaagttgagaaggtacgataggctgagctggaggtggaaaggaaaagaagtggtcttcagggggctcatttgtaataacttacctggttaatcggagtctctctactgacttaaggattgtgggatgaggggaatgctatgtttggcttcatatagtctccaggactgggttcagtatgggtggtctgagcctgtggagtggggctgaccctgcctgggttcatcttgtgtctccatcccgaggtcttcaagccataccaggcctcccaacatgacatgtgccgcttccactccgaggactacattgacttcctgcagagagtcagccccaccaatatgcaaggcttcaccaagagtcttaatgccttcaacgtaggcgatgactggtgagggaggactgggagttttgatgtctaacagtttaatgccaagcccttcagtgaggtcttttggcagcagtgggaagatctcaaggggggcctacttgtcaatgcatcataattcattttatttgtttattcaataaatatttattggtcacttgttctaggcaggccctgtgctaagtgctgggaatgcagtgatgaacaaaaacaaaattttaatatcgtatttttgctaagtcttataaagaggaggtgtatgacagattatgagagtgtatacgtggaggattgtttagcttggtggagtggctggtcggtggggccttcctagaggaagtaaagattgagctgagatctgaaaaaagagtagaagtaatcagatgaaagatggttggagggtgaggggagaagtatagcaggcagtagggacaagtgctaagggtctgtggtaggactgagtatgactcatttgaggaacagaaaaaaggccaagtgcagagtatgaagaggaggtgaactgaattgaggctaaagaaataggaccttttaaaagcaaacagctctattatgaattggggtttttacccgtagagtagagggaagctatcaaagtgttttaaaaagcaagggatcttaagagggctatgg

SEQ ID NO: 2376 - DNA, 6000 bp, Homo sapiens
agtctgaagactgacttgtggttcttatttccagacaaagccctggacttccctgggttcctggacatgatggcacctcgactcaggccggtaagggcccttgccttggaggagattgtatgtagaggggttattccaaccagtcctgttttgtctgcagggctgagggaatagacagggatacccttaagggagaactctggagcactaactgtgtgttccctacagatgcgtccaccacctcccccgccggctaaagccccggatcctggccacccagatcccctcacctgaaggccagggaagccttgacccccagtgatgctgctgtccctatcttcaagctgtcagaccacaccatcaatgatccagagcaacacagccaaaagctggaatcgcccttatttccaccctcacctccaagggtggaaacttgccccttcccatttctagagctggaacccactcctttttttcccattgttctatcatctctaggaccggaactaccttctcttctgtcatgaccctatctagggtggtgaaatgcctgaaatctctggggctggaaaccatccatcaaggtctctagtagttctggcccacctctttccccaccctggctccatgacccaccccactctggatgccagggtcactggggttgggctggggagaggaacaggccttgggaatcaggagctggagccaggatgcgaagcagctgtaatggtctgagcggatttattgacaatgaataaagggcacgaaggccaggccagggcctgggcctcttgtgctaagagggcagggggcctacggtgctattgctttaggggcccaccacgggcaggggcctgctcccagctgccacgctctatcatatggagcgaggtgttggggaaggcggggcaggcagcctgttgcaggcaggggaaggagaagagactgaggggctgtgacctctcctgaggcccccagcctgagactgtgcaactccaggtggaagtagagctggtccctcagctggggggcagtgctgtccagtggaggggagggctttcacgcccacccaccccctggccctgccagctggtagtccatcagcacaatgaaggagacttggagaagaggaagaataacactgttgcttcctgttcaagctgtgtccagcttttcccctggggctccaggaccttccctacctccaccaccaaaccaagggatttatagcaaaggctaagcctgcagtttactcggggggttcagggagccgaaaggcttaaatagtttaagtaggtgatgggaagatgagattacctcatttagggctcaggcagactcacctcacatactccctgctccctgtggtagagacacctgagagaaaggggaggggtcaacaatgagagaccaggagtaggtcctatcagtgccccccagagtagagagcaataagagcccagcccagtgcagtcccggctgtgttttcctacctggtgatcagaagtgtctggtttgcttggctgcccatttgcctcttgagtgggcagccctgggcttgggcccctccctccggccctcagtgttggctctgcagaagctctggggttcccttcaagtgcacgaggggttaggctgctgtccctgagtcctccattctgtactggggggctggctaggacctggggctgtggcctctcagggggcagcctctccatggcaggcatccctgccttgggctgccctcccccagacccctgaccaccccctgggtcctgtcccccaccagagccccagctcctgtctgtgggggagccatcacggtgttcgtgcagtccatagcgcttctcaatgtgtgtcacccggaacctgggaggggagggaacactggggtttaggaccacaactcagaggctgcttggccctcccctctgaccagggacatcctgagtttggtggctacttccctctggcctaaggtaggggaggccttctcagattgtggggcacattgtgtagcctgacttctgccggagctcccagtccaggaggaaagagccaaggcccacttttgggatcaggtgcctgatcactgggccccctacctcagcccccctttccctggagcacctgccccacctgcccacagagaacacagtggtctcccctgtccgggggcggctttttccttccttggagcgtccctgacggacaagtggaggcctcttgctgcggctgcaatggaggcaaggggctgcagagcccaggtgcactgtgtgatgatgggagggggctccgtcctgcaggctggaggtggcatccacactggacagcagggaggaggggagtgagggtaacatttccatttcccttcatgttttgtttcttacgttctttcagcatgctccttaaaaccccagaagccccaatttccccaagccccattttttcttgtctttatctaataaactcaatattaagatgttagtgaccatatgttcttcctcccagggctgtttgctaaaaagaacactgcttaacccaaaggagtggcactagaggtgaatgttaggcttgatgatatctagatgagagagatggtttgaaggaatcgcgatttctacaaaacaactttcttcctataagttagccagctttgcccttcccccaaccccatacatgcaaggaggctgggagaggattgtgctggaggagaggatactctccaaggcaagctaagtcatgctggcccttgtttccagctcacctggacagctgcactgtcccttctccttcactgtcccccagcatctccttcaaggcctcagcattggctgagggaagaaggaaaagagggagtcagtggaggtggaggtcagggcaagagaaggttggagaagagggagcaaggggctatgctagacccaccttcattctggatgatgcagcgaacaatcctctctactgtgtcctcattcatgtcatcgtcctcagctgaaggatgaaagagattggcaaggaagcaggaatgagtcagctttgggggaatattacctggtggctcccatcatttattgcttaggacatacccttttacctacttgctatcatgctggacctcagcatttcagggaccagaaaagatggggacaccaatgcaagcccaagactaccatccagaggaccgttcctgcccatgctgctttctctagttttgctttcagagtggtgtcaccccacttgctaactcaagagtgcatcactaggcttcctgagcaggtttgatcaggatttggcctgggtctgttggtcagggaggcagaggtgtggggagaagggtgaaaggtgactgagccagggttccaggctcctcactcacggggctgaagctgggcatcgtcaggctcagagcccctcgacgtgcggcagcggtagcccttcttcttgagcacgtggcagatcatgaagcctaccaggcccatgaggaagaagaccagcacaagcaggaagagcatatatagcccatgttggggcggttccaggtcaggctgtggttccgacatgaggccctggggggcgagcgcgggccagggcgcctcctgggtttagggggctgcagctgggaatgggggaggggtaggaatgccgtcctcaggatctgaaacaagcacgtctaagacgtccggctgaggtccggccccaccccctacccaaccagggagctgtccgggccaggagtgctgtttcgcctttcggcaagaggtcagcggcaacgcaagctctctaccacgaccctggtcccgcttccccgacgccccgagcgttcccctttccagcttgttcgcgcttctgtccctcccaaggacactgcagcacgagatgggacggcattcttaggcggcgggagcagaaatcctgcctgagtcagcgcccgcacctcctccacgccggcctgagccaggcctctgcagccccttcctctcagtactcccgcacccctctccctttttggtttctcccaccctgaccacctggccgacccggtaccggtgatttggttctggttccggcttctgctggggttccggctccaggggcgtcctagtgcggctcagggcccccgacgcccttccggcgctcatcccttgattcctcccctcccccttcgccgcctcaccggccccgggctgtggctgcggatacccgcgccgtggcaggcggggggagggaagaacagagaaggatgcgggctggctgagagcggtggcaggctccgggcaactccggccctgggtcagggagatcgcctccgcagccgccctggcttcccaaatgccttcacccgtcgcgggcccaggaccagggggcggagcgcaggtgtgcggggcggagagcgtgagctctgcgcgcgcgtgactgcgccgggcccccccggggcaatgtgcggcgccgagtctgggtccgggtaggggacaggcggtccggcgtgggtgttgtccactggtctatccggtacgcctggcgcagctcctgccctcagatgccccgaccgagcggagagtcaggaatcttctccgagggctgggggaagccggctttccgcacctttgagggacggagtggcgggatcttcggagcttcctagagaagtgaccacggcctgcgcccggtttggggcaagcggctggatgggatggctcggcttcccgaggatctgacccccggccggagacaaatggccctcgcatcctaggagctatgctgccagttccctgcccaacccgggacgctcaaagccccagataccgggagagctgagccgggcgaggggcggagctcccctgggggcgtggcctgggtgtggatggaggcggggccgcaacgcccagttccgcagaggccggctacgtgcttgcgcagcacgcacggccggggaggggctggcggcggccgcgggcggcgggcggcggaggtgcggggcctgctcccgccggcaccatggccaagaccgtggcctatttctacgaccccgacgtgggcaacttccactacggtgaggaaacagggatatgcatgaggagttgggacacggaggttttgaggcggggttgcaactccaggggtgagagctgacgaactctcttctccccacccccaggagctggacaccctatgaagccccatcgcctggcattgacccatagcctggtcctgcattacggtctctataagaagatgatcgtgagttccgccgcctcggccgggggttggggggtggggcgagctgtggccgtagggataggtgggctggactgagtgcatgaagtgcgacccgcccctagagtatcggggagctggatagaagtcaccaggagtaccttgaaagtgcagggtgttgggggtggcgtcctctgcttaatggaaagtactttctcacctcaggtcggccaccctctgactgtaggcacactagcccttggcctagggttagcgtgatgtggggctggtttgaagacagaaggtgtgttcctcctctgcattttagagtgtggatagggccttggcctcaggaattagggttaggggagcggatatcactgtatcagggtgtgaggtttaccctcagttcccactcctcttttaccacctttctttacctccaaggagctagggctccagggtggaacgatgctgccgtctttgtaaatgtgtatgtgcgtgtggaacagaggcgatattttagatattcctttttcagcctggaatacctctacatggttctgcttaatcgctatccagtttttcatctaccagacatacacatgctgtcttcccagcttggaatttatggctgtgatatgggatagtaacagttaagccacgccaggcgtggtggcccatgcctgtaatcccagcactttgggaggttgaaatgggggggatcgcttgaggccaggagttggagaccagcttgggccacagtgggacccacatcta

SEQ ID NO: 2377 - DNA, 6000 bp, Homo sapiens
taagacagagtctcactctgttgcccaggctggagtgcagtggtgcaatctcaggtcactgcaacctccaactcccgggttcaagcaattctcctgcctcagcctcctggagtagctgggactacaggcacgtgccaccacacatgactaatttttgtatttttagtagagatggggtttcaccatgttggccaggctggtcttgaactcctgaccttaggtggtccacccgcctcggcctccgaaagtgctgggattacaggcgtgagccactgcgcccggcttgggactacttttttatttttttcatttaaaggcctatagtacaatttggctacttatgttagaatactttgaaaccaatcagaaattcattaaacagaagaaaaattcctgattctcatcggaaatacagataagcacaactgtaacttgtttgacaggaagactgatgcagcataaatagcccagagatagtattctaattagcattccctaatcgcacaaagagcatctacgggaccccagtgtggcgtaagggctgaccctgtattcacagagctagaaagtgagctcagaaataacagcaggaatactaacaaaaaaacaagaaacctccccaaacagcatgtgactgaacaccaaatgagcagtgcagtgtgtgcaagacagagctctatgggctggtgtggtcaagaaaggtttcatggagatggtgtgaaggctgagaaggccttgaagaggttgaatagagaactaagggcattccaggaaggcatcctgtgcagctgaggtgtagggataaagttggaaaggtgccaatgccagcctaatgagttggcctctatcctacagccctggctgcttctgtcattaagatctttcaggaaaacagattagtggtttaaaaacccgggatctggatcatgccccctccaatgaccagttatgtgactacggctaagttacctagatattcccaaacctcaatttacttatatataacatcagaaaaaggtctattataatacatctaaggattggtatgagaattaagtggatttaccagcaacccttggcataatacctagcagagtaagcactcagtaaatggtagctatcataagaaattctacaggatcaacaacctggtttcttcaagaaataaattcaagggggtgacagaaaagctacaaattaaaagtcttaagagacatatcaaccaaatgcactgtatagaccttgtttagatctggatttaaattagctacaaaataattatgagacaactgcagaaatttgaatattgatcccatatttgatgacattaaggaatcactgttaactttttaggtttgataatgatactatgtttttttaaaagagtatcatttagagatacataataaaatatttatggataaaaggatataacatctaggatctgctttaaaacaatctaacatgagggagtatagatgaagtaagagtggccacttgctcagctgggtgcgatggctcacgtctgtaatcccagcacttttggaggctgaggctggtggatcacctgaggtcaggagttcaaaaccagcctgaccaacatagtgaaaccccatctctactaaacatacaaaaattagccaggcatggtggcaggcgcctgtaatcccagctactcgggagtctgaggcatgagaatcgcttgaacccaggaggcagaggttgcagtgagccaagactgcaccactgcactccagcctgggctacagagtgagactctgtctcaaaaaaaaaaaaaaaaaaaaaaagagtggccatttgctcataagcgttgaagctaggtgatggacgtatgggaggtcactgcactacttcactttcagaaatttttgaaattttccctaataaaaagtttaaaaacaaaagtaagtagaattgagcaactggtagctgtgatggttactattttttcatggatatagagtagagtgtggcttatctttgttgtccactctcttccccagagggtctaaccctgactcttctatggatgatacaagctcaatgtaaacctaatgatatcaaaccactccttcgttgttttttttgtttttttaactgcccatagccctcttaagatcccttgctttttaaaacactttgatagcttccctctactctacgggtaaaaaccccaattcataatagagctgtttgcttttaaaaggtcctatttctttagcctcaattcagttcacctcctcttcatactctgcacttggccttttttctgttcctcaaatgagtcatactcagtcctaccacagacccttagcacttgtccctactgcctgctatacttctcccctcaccctccaaccatctttcatctgattacttctactcttttttcagatctcagctcaatctttacttcctctaggaaggccccaccgaccagccactccaccaagctaaacaatcctccacgtatacactctcataatctgtcatacacctcctctttataagacttagcaaaaatacgatattaaaattttgtttttgttcatcactgcattcccagcacttagcacagggcctgcctagaacaagtgaccaataaatatttattgaataaacaaataaaatgaattatgatgcattgacaagtaggccccccttgagatcttcccactgctgccaaaagacctcactgaagggcttggcattaaactgttagacatcaaaactcccagtcctccctcaccagtcatcgcctacgttgaaggcattaagactcttggtgaagccttgcatattggtggggctgactctctgcaggaagtcaatgtagtcctcggagtggaagcggcacatgtcatgttgggaggcctggtatggcttgaagacctcgggatggagacacaagatgaacccaggcagggtcagccccactccacaggctcagaccacccatactgaacccagtcctggagactatatgaagccaaacatagcattcccctcatcccacaatccttaagtcagtagagagactccgattaaccaggtaagttattacaaatgagccccctgaagaccacttcttttcctttccacctccagctcagcctatcgtaccttctcaactttgagccctgatccacctgccctgttccttggaatctcctattcccagttctctccatgctcatctcctcccccaagctctgattctgtcctctttcctctggattcttctttctggagtcaaatatatgggatatatgtcaactttctaattaaaatcaaagatttattatctttggaaggtcagggggatgtgtcacacctctttgaaaactgcacaagaaagagcttttcttctcccagaaaatgcacacaggtacatacaggcaaacaatctcaagggatatagattcctgcactaacatcacctcagtcttttctatgaccagtccatttgtctgtgccttggcacaagcaatgaacattcattcatattgttcactagtttccctagcaacacataaagcctgggtttagctgttttgtcttattttttcttttgagacaaggtcctccctgtcaactcaggctgctgatcatagatcactgtaactttaaactcctgggcccaagccatcctctcgcctcggcctcccaagtagttgggactacaggcacacccaccgcacatggctactttttttatttttattttttgtagatgtgggtcccactgtggcccaagctggtctccaactcctggcctcaagcgatcccccccatttcaacctcccaaagtgctgggattacaggcatgggccaccacgcctggcgtggcttaactgttactatcccatatcacagccataaattccaagctgggaagacagcatgtgtatgtctggtagatgaaaaactggatagcgattaagcagaaccatgtagaggtattccaggctgaaaaaggaatatctaaaatatcgcctctgttccacacgcacatacacatttacaaagacggcagcatcgttccaccctggagccctagctccttggaggtaaagaaaggtggtaaaagaggagtgggaactgagggtaaacctcacaccctgatacagtgatatccgctcccctaaccctaattcctgaggccaaggccctatccacactctaaaatgcagaggaggaacacaccttctgtcttcaaaccagccccacatcacgctaaccctaggccaagggctagtgtgcctacagtcagagggtggccgacctgaggtgagaaagtactttccattaagcagaggacgccacccccaacaccctgcactttcaaggtactcctggtgacttctatccagctccccgatactctaggggcgggtcgcacttcatgcactcagtccagcccacctatccctacggccacagctcgccccaccccccaacccccggccgaggcggcggaactcacgatcatcttcttatagagaccgtaatgcaggaccaggctatgggtcaatgccaggcgatggggcttcatagggtgtccagctcctgggggtggggagaagagagttcgtcagctctcacccctggagttgcaaccccgcctcaaaacctccgtgtcccaactcctcatgcatatccctgtttcctcaccgtagtggaagttgcccacgtcggggtcgtagaaataggccacggtcttggccatggtgccggcgggagcaggccccgcacctccgccgcccgccgcccgcggccgccgccagcccctccccggccgtgcgtgctgcgcaagcacgtagccggcctctgcggaactgggcgttgcggccccgcctccatccacacccaggccacgcccccaggggagctccgcccctcgcccggctcagctctcccggtatctggggctttgagcgtcccgggttgggcagggaactggcagcatagctcctaggatgcgagggccatttgtctccggccgggggtcagatcctcgggaagccgagccatcccatccagccgcttgccccaaaccgggcgcaggccgtggtcacttctctaggaagctccgaagatcccgccactccgtccctcaaaggtgcggaaagccggcttcccccagccctcggagaagattcctgactctccgctcggtcggggcatctgagggcaggagctgcgccaggcgtaccggatagaccagtggacaacacccacgccggaccgcctgtcccctacccggacccagactcggcgccgcacattgccccgggggggcccggcgcagtcacgcgcgcgcagagctcacgctctccgccccgcacacctgcgctccgccccctggtcctgggcccgcgacgggtgaaggcatttgggaagccagggcggctgcggaggcgatctccctgacccagggccggagttgcccggagcctgccaccgctctcagccagcccgcatccttctctgttcttccctccccccgcctgccacggcgcgggtatccgcagccacagcccggggccggtgaggcggcgaagggggaggggaggaatcaagggatgagcgccggaagggcgtcgggggccctgagccgcactaggacgcccctggagccggaaccccagcagaagccggaaccagaaccaaatcaccggtaccgggtcggccaggtggtcagggtgggagaaaccaaaaagggagaggggtgcgggagtactgagaggaaggggctgcagaggcctggctcaggccggcgtggaggaggtgcgggcgctgactcaggcaggatttctgctcccgccgcctaagaatgccgtcccatctcgtgctgcagtgtccttgggagggacagaagcgcgaacaagctggaaaggggaacgctcggggcgtcggggaagcgggaccagggtcgtggtagagagcttgcgttgccgctgacctcttgccgaaagg

SEQ ID NO: 2378 - DNA, 6000 bp, Homo sapiens
ttccttagctgccaaatgggggaactcagacaatgccttgagttcagtcgaggacagcttcccttttctgttaattaaactttggaatgttggggcattaaaacaggctagggtaggtgattgcacagagaatactattctattcatttccttcctagccaaaaacaaaaacaaaaacaaaaatactttcctaacagaatttgaggattaattaatgtaatgtgcttagaaccatatctggcatacagtaaatgttcaagaagggtcattatattattatttgtggacatattttattatttacggataggtccagagtcggctattgagtaacaaatggtagggcaagccctcagcatttctaaagagataacaaacacatacttcaaaagactgcatctggagaagctaaattttctaggtcaaggggaaagaaaaaaaagatgcagccaacagaccatcttcctataagctggaatgttggctgatttcgagaaaggaatgtccttgccaggctggttctggaaattgtaacttgcacaacaacagattcaaaagatttttggagacacatcagtaagagaaggctaaaggaggtggcgaagggctgccagagcccctgcagaatcactttgcatttggcgtgaagccctggggctttaatgtgtccgtctgcaggaaggatatttccatttaagatgtgtgcaggtcttcaggatggcccagggccggccggatggtttggaccgtggtgtaccattaaagttcagacagaatgggggccggcagagcacaccattgcaccagggagcactctgtttttccttctggagtggatactgttttctctaagcacttaaaagaattcctgacctccaactgaatgatgctctatgagggggagtgttttgtggatgaataagccagactgcagggaaaaaacatacagaatcaagggaagaaataaaggatactacaggacacgtgtgtgtgtgtgtgtgtgtgtgtgtgtgtgtgtgtgtccgcttgtagttctctctcttcgttatgaagtgtgcaagctggggctgggactgagctgtttggtgacacagctggattagataacagccccacttcctgccagttacactagatgcaagcatctatgtccctcttatctgaaacatggcttgatgagtctggtgtggctagactgtaaactccttaaaggcagcaactgatttctactaccaacccataatcccttatttgaaaagccttgggctagatatgtttcagaatctagaatttgggtaattttagcgaggtagtatggtgcatatgttgtatattatggaacaactccagtggtgtctgggacactaccctagaatcaaacacattagtaactgtaccagattatataagtattattaacacaatgcagaacaaatagactttaagtctcaggacagtttgggctaggttttgccacagtctgttatgaaagaacttctagctttcagagctttttgaatttcagaattgtggattagggatctcaggtctttctttttctttcttttcttttttaaatttccaggatgtctacagcattctgcccatggcaggcactgagtagaagttgttgacttctagagtatgtgacatcttgatctccctcaaataatatttgattctagaaaccaggggacagtttattctcagtgacttggggagtctttagaattaaaagtatcctaaattaaagagcagaagagaaagactattaagcacattctctgtcatcctgaacagtaacacatgtagacccatgaaatatactgaaaattcatcactagcacgtcatgttgagcacctaagcaaatgagagcagtgcatcagtgcttataaatgacaatggaaagttctaacctatcacttagaacatggtatttttcgaatactcctaaaatattactaaatgggccaggcgtgatggcttatgcctgtaatcccagcactttgtgaagccaaggtgggaggattgcttgagcctagaagtttaagaccagcctgggtaacacagtgagaccccatctctacaaaaaagaattttaaaagttagccagacagccgggcatggtggctcacgcctgtaatcccagccctttgggaggctgaggcaggtggatcacctgaggtccagagttcgagaccagcctggccaacgtggtgaaaccccgtctctactaaaaatacaaaaattagccaggtatggtagcgggtgcctgtattcccagctactcgggaggctgaggcaggagaattgcttgaaaccaggaggcggaggttgcagtgagccaagattgtgccattgcactccagcctgggcaacaagagcgaaactctgtctcaaacaatcaaacaaaaaaaagttaaccaggcatggtggcctatgcctgtagtctcagctacttgggaggctgaggtgggaggatcgcttgagcccaggaatttgaggctacagtgagcatgagtgtacactgcactctgcactccagcctgggtgacagagcaagaccctatctcaaaaaaaaaaaaaaatttttttaatgaaatgacacaaaatatttctaaatatgaaaaatcaagcttgttcaatcctaaatcaataccagatgatttgtaaaagtgacaaaaggggccaggcactgtggctcatgcctgtaatcccagcactctgggaggctgaggcaggtggatcacctgaggtcaggagtttgagaccagcctggccaacatggtagaaaccccgtctctactaaaagaatgcaaaaattagttggacgtggtggtatgtgcctataatcccagctacttgggaggctgaggctggagaaatcacttgaacccgggaggtggaggttgcagtgagcagagatcgcaccactgcacttcagcctgggcgacagaacgagactctgtctcaaaaaaaaaaaaaaagtgtcaaaagggtacacagctggtgatagtcaagctaatatctatcgaatgcttacaagttctcaagtgctgagattacagtgactctgttcagtagctactgttatgcagccccattttgcagatgaggaaactggggcactgtgagaatgagtcatttactagtgagtgtccaaccaggattcaaacccaagtttagcagtatgctgggtaaaccagctatcagaggggaaaaaaaaggagaattttaaaagccctggcatttgccaatttctatgatataaatactctcaccagggttgatttcaagatattaatggtttaataatagtaaaattcctgaatatttaataattggctttcatgagcttctgggagctgtctcctgcacaccattgtcaagtccatcccatagtcaagtccacagtttactgtcaaccacggaagatgagatttcagctcatggaacagaactggtttgggggcagcatgctgagatgctagcccaggccaatcagccatggctacactcctacctcagacccagtacagaccatggaacatggagcaaaagaaatagaaagcaaagaacacactgcctccctttcttcggcaaactttccttcaccagggagtggaaggtggggccctgccagcctaacacgctgtggcagaaataaaaaaagcctggatgttttttccaggccctacaaatatttttcttggttagataagttcagacttgagactaaaggagctgatcacttcctttctgagatccttagtttccatagtattttctttaaagaaataaggaagtatttattacaagatgaggacagggtttgagcctgcctttaaccaaaggtagggtattctggcctaatttgaacccaattaaaatacatttagactcttggcttagcttctttgtcaatacctataggacatcacctgctaattaggtagtctgataagatgttccacaagaggctcctgagaaaggactggcccttcaatcaacaagaattcacaggacactaataatgcataggtatttgctcaatgctagatacagaaagaaaaggcatagtttctgtcccagggtctcagagactaatgaaggagtcagtgaagtaaacgtagttaaattacattcatttgcccattcaacagatgtttatcaaatgcccatcaggtgtcaggcattttgctaggcactgggataccattgtgagcaagaccaattggtttgtactatcatggagctgacagtccagtcatgaaaagagacattaaataatcacaagagtgaatgtgtaattaaacactggtagtaagagccatgaagaaatgttaaatggtcctatgagaactggaggaacctgactcagttcagggaagacaggaaaggctttcatgaggaattgagagttgaactaaaatttgaagaaaaattaggagttaaccaggggagtagggtagagagaaagagaggaacatcactccagagggaacagcatgggcaaaggtcctagggtggggggaatcagaaaatggaaggcaagtttggagggagacgtgatgggaaatgaggcagagggggagtaagggctgaacctcccagagtcctgcaggccacagcaaggcttttgtttttgtcccagagcaatgggaaatcactgaagagtttaggcagggggatatagatgggaattacacccagcgctgcagtgaagtaaaggaaatgctgtctgctgttgggagagcacaggggaatgaacccacctaaactggtatatgtgaattttaagaaagagtagggaggttagggttgggggatgtgtccaaataaggcttgctcgaggaggaaatatccgaaatatccagctaaatttttgaagggtgagtgtgacttagtcagaccatggtgaaagggtggaggaaaggagggaaggagggaggaagggagggagggagaaagagaaagagaaaaagagagagagaaaaaatactgttggcagcagcacaatgtttgggctaagacctgggtgagtatgagggtgtagggggactataaaaagaggccaataagagaaaaagtcacagggttaagaaggggtcaaatgatgagagcctcacaggtcatggcaggagtctgggttttatctggaaagacaacgggaaatcaatgacccagtcaaagatctacagcaggggagtgatgagttagaatggtcactagcagcagaattgacagtggattgaaagaaggcagtgctggaaaggtgggacctgctgcagcagcccaggtgagacaggtgctgggtctgtgctaaggcaacagaagtgaggctggagaaaagaggatggctttaggagacactaaaaaggtaaaactgaaagggcattttcaccaactgaacaggtgggagtgatttctattctgcccaaagaatagtctgaatgaaacaaatttttctatttgggttgtcttgccttatgacctggtacatggtcaattttcgtaaatgctccatgtatctttgataagaatgatgttcacttcattgttgggtacaaggttcttttatacactcatcaattaagtttactagttgtgtatttcaatcttctacatattaatatttggtgtctgtttgctctatcatttatgacagaaatgtattataaaatctcccaccataattgcggagttgtcactttctctttacatatttgtcaatttttgttttatgtattttgaggctatgtcattagatatatacatgtttggaatttgtatatctttctgttgaattaatccacttattatgtggcaatcccttttatctttagtcattctttttgccttagacctactttatctgatattaatatagccacacgagttttcaatttttttttttgagacggagtcttgctctgtcacccaggctggagtgcagtggcgcgatctcagctcactgcaagctccgcctcctgggttca

SEQ ID NO: 2379 - DNA, 6000 bp, Homo sapiens
cctcaaggaagggggatagaaatgttatgaaaaagggaatcaagagcgatcacaactttctaacattttatttcttttatataaataaagatctgaggtaaattccagaaaacatgaacatttgttaaatcagagtaaagtgcacacaggtgtttcttattttcctttttgtttttcttaaattaaaaataaaagtagtcccttcgcccctggtcgccttgtttcctctctcggccgtcctgctattgttttcctggatctgtctaggtctaggcctgcccatgcattaataagcacatacatctcatccatattcttcatctgattctctccgacctcttccagggcctggtcctatcgattaaattctctccccatcttcaaaccgttcagtccctttccctgcaggcttattctccagtgacaaacattctcaggtctctcatttgagaaaagcttctctccattcctcctcaagacacttgttcttttttttttttttttttttttttggttggtgggggacaaatcactttttttttattattatactttaagttctgggatacatgtacagaacatgcaggtttgttacataggtatacacatgccatggtggtttgctgcacccatcaacctgtcatctacattaggtatttctcctaatgctatccctcccctagccccccaacccccgacaggccccagtgtgtgatgatcccctccctgtgtccatgtgttctcattgttcaactcccacttatgagtgagaacatgcagtgtttggttttctgttcttgtgctagtttgctgagaatgatggtttccagcttcatccatgtccctgcaaaggacatgaactcatccttttttatggctgcatagtattccatggtgtatatgtgccacatttttttttatccagtctatcactggtggatattgggttggttccaagtctttgctattgtgaacagtgctgcaataaacatacgtgtgtgtgaagacacttgttctcttggtgtgaacacagtacaagctgagaatctttgatccaaaaaatcgttaagtccaaaatgctccaaaatccaagttttgttgttgttgttgttgttttgagatagagtctcactctgtcacccagactggaatgcagtggcacgatctaggctcactgcaacctccacctcctgggttcaagtgattctcctgcttcagcctcgcaagtagctgggattacaggtgcgcaccaccacgcccagctaatcttttgtacttttagtatagatggagtttcaccatgttggccaggctagtctcgaactcctgacctcaagtgatctgcccacctcagtctcccaaagtgctgggattacaggcttgatcccacccaccgtgcccaacccaaaatccaaaatttttaagcactgacatgatgccacatgtggaatattctacacctgacctcatgtgacaggtcaaagtcaaaatgcagtcaaaactttgtttcatgcataaaattattataagtattgtataaaactaccttcagactaggtatataaagtgtatatgaaacataaatgaatttagtatttagatttgggtcccatctaaacaggtaggagtggagtggtctaccatcttaggcccattggtgaggccctttaaattagactgacaaaagacaaattaagaggagaactacaagtttatgaacatgtgcattgtgtgtgcacatgggagcacgcagtactgactacctcaacgcggtggtgagaacttgggtttatatagcagctcaacagaagggcgaaagatttttagagaagtgacaagacaaaggaaaaggacttcaagtttctagagcagcaaattttgaaagtaaacatatgggagaaatgaacagagaggagggctagttggtaaggtttgttccagtggttaacttcagtctttcctggtggtgagggggcaacttcacaaatttatgctctgcttttaagcaaatgagaaatggcagagagccttatctgcttcttctcaattgtcttcaactaaaaataatcgatatgccaaattggcttatttggaggttgcatactctgccacccttcccctccctctcttcaccacttttctttctgtgggtgcgtgtacattatactggggccctggaaactggtattgggtgctgaaaactggtgttgagccctgatcgttttatgaccttatgcccaatctgtccatgaggcttccttcaactccgattgatttatcctaatacattttgcttcacagtgggccaggtcccagattctgaagtggggaagaaacgatgacagggtcagacatcaggtggtgaggtcttagcacacaggttcacagacacatagaaaaggagagaaaaggccgggcgcagtggctcacacctgtaatcctagcactttgggaggccaaggcaggtagatcacgaggtcaggagttcaagaccagccaggccaagatggtgaaacctcgtctctactaaaaactataaaaaattagccggggccaggcgcagtggctcacgcctgtaatcccagcactttgggaggccaaggcgggcagagcatgaggtcaggcgtttgagactagcctgaccaacatggcgaaaccccgcctctactaaaaacacaaaaagtagccgggcgtggtggcacaggcctgtaatcccagctactcgggaggctgaggcaggaaaattgcttgaacctaggaggtggaatttgcagtgagccgagattgcgcgccactgcactccagtctgggggacagagcaagtctcctctcaaaaaaaaattagctgggcacggtggcaggcacctgtaatcccagctacttcggaggctgaggcagcagaggttgcagtgagctgaaattgcaccactgcactccagcctgggtgacagagtgaaactctgtctccaaaaaaaaaaaaaaaaaaaaaaaaaggccaggtgcggtggctcacgcctgtaatcccagcactttgggaggccgaggcaggcggatcacgaggtcaggagatcgagaccatcctggctaacacactgaaaccccatctctactacaaatacaaaaaaattagccgggtgtggtggcaggcgcctgtagtcccagctacttgggaagctgaggcaggagaatgacttgaacgcgggaggcagagcttgcaatgagccaagatcgcaccactgcgcttcagcctaggcgacaaagcaagactccgtctaaaacaaacaaacaaaaaaaacaaaaaaacaaagtaagggagagaaagacaagatagaaatgagcagtgactgtggagggaggttgggctgtggcctgagctcaggagaatatcagaggtaaaggatgacttctggaggaagtaagggtgtggaagctgagtgagattaacacagaaataaaacagaaaggatggaggagtaatggaggccgttggaggaaggtggtaaaagaacaactctgtcaatgacagcagctgtcaccctactgaatgttgattacatgccaggcattgtgataaggatttgtagggatagtctttcttacttatcccaatgcctctgtagtaggtactattattttactcattttacagatgaggaacttgaggatcagagaggttagagggcttgcttggagtcacagagctagtaactagaagagctgggattggaacccaggtcagttggatgccaaagcccaggttctcatccactccttctaccaccttccaatattgactcaggggcatttcttcccaccacgcctgctgtaggctgaggaatgcgatgtctcccagcaccccaaagagtgaggtgccgtgtgatgagctaactcggaggtgtagctcaaaagccctgctatgactgagccgtctgccagggctgtgagtgctcagagtggagacgttctcatccgccatcagggaatactcactccattgtgctggccccacctaaatgtttttttattgcctgcccttcaccatgagtaatgccactttccattttaagctgggagcttcaggagatgactgcattacaagccagggtttaaagctaagagctgcctgggggattactcacccatttcaagacgctgcccacaatgcaccctcccactcaggatgctgctggaagatcttcttccttgccaaagcctaaaagaaatctgatttcccctggaatccgactaggagtggtgccagaatatcagaaagctggcgagttaactggttctccaagtggagctaccgtgcttgtttctggtcctctcatgtgtgctaaggttttgttgcttgttcattcatttggcatttgctgagggtctactatgtgccatgcactctgcccatgatggagagactatcacaagctaaacagctttagtccttgtcctcagggagctaacagtctgggggtgtggggataaacagacaattatagtaaaatatcataacagaatatgctaaatcatatgacatgcatgctcagggagttttggaaaccaacagccagaggatttatactaaggtaggtatgaaggatgaggaggagctggcttggtttcttaattgtaagcaaccaaaattgactctagaaggagagttcagagaacctggggttgctcccagagtcactgggaaggtgtggtggccccaaatcacactgcaggaatggtccagccagaccaagatgtacgtgtgtatgtgtgtggtggggaatgagggggcgggtgtaactttcaaatacatggggtggggattcagatgccgggccgtcaaaaatgatgacaaatttccagaacagcaggtagaattagggaaggtgtggaggagaaggctgtctcaaaatgacctaagatattctgagtcagagaaaacaaaaggaacagcttaaagagagcaccaactcagtgaggcaaccaggcagtggggccggctggccagactcttgggggattccttagtgagtgagttcactgctcaaagaagggctttgccacttctgcagggaagccagccacgggccagcaggtaagcatgttttaaggctttccttttttgttttagggctcctggggacattctggaaggccacagttctcactacaagccttgagattacagagcctagctaagtcgggaaaatgttctctgcatgagaattggaaaagatgtttgggggaagccaataggataatgataatagccaacttttattgcttgcgctaacatgagcttacatgcattatttcatttcatactcataataaacctatcagtttagatgaacagactgaggcacaaggattttaaatgacttggctaagatcccatggttagcaaattgtggagctggtatgcaaatgtagatctgttttactataactaagagtctgttgacagaaaacatgaaaaagtgagggccagatgaagaagaatgttctgtgcataataagcgatcggaaggaagcctgattccttagcggtcacctctctcatgggtacaattttgaaacttaaggtcagctgttggtccctactgagaaattttcaaatagaatccaaaatggaaaagccctattttcctagagggagacttgagtgaggaactttagccagtaactcagggtattgcctcctaggttgcagcaagaggtatatatagcattttaaaattgattttgtcagaataataatttctctgattatacaaataatacatgctccttgtagaaaattaggaaaaaatagaaaaacataaagaagaaaacaaaaatcatctttactgttagcacccaggaatggcttttgtcatattttggggtatgtgtgtgtgtgtgtgtgtgtaatttgtagtctctttttctgatgcatatatggtgatactgtcttttaaattacagttctttatatcttcgataattgttatgaccttgatttag

SEQ ID NO: 2380 - DNA, 6000 bp, Homo sapiens
ggctgcaggtggcctgagctgagacaagaataacaggaaagagccagccaggcaaataacctagaggcagaaaataaatgcataattctgggcagagggaatgggaagtacaaaggccctgagctaggaccaagcctggcccgttatgaggagcaggtgactggagcacggtgagcaatgagtatgttgggggagaacttgcagaggcaggtggtggtagtgagcttggcttttgttcctagtgcaagggaaaggccctggacaggtctgaacaaatacgtacatggtctgatttaccttttagcaggttccttctgaaatgaactgtagagggttagggtagagcagggaggccaattaggaagataccccaatactccaggcaagaaatttggtgcttggatgaactagaccaatgtgcaaacatctattattaagtgaaaaacaaacaattacgcaggacattgtgcacagtaatgtgtgtttttagcatacacatattcagggtacaaagacagttttctttcctgaaaggatccatacattcaaagtgaatagtggttatctttggagaaaagagggttaatgagtgtcgttttatacctcttagtgcagtgttatcatgtgcacagagtgttcgttttaagtaaaggtaaaatttttttttattttttattttttccccagacggagtctcactctgtcacccaggctggagcgcagtggcgcgatctcggctcactgcaagctccgcctcccgggttcgccgggttcaccgggttcacgccattctcctgcctcagcctcccgagtagctgggactacaggcgcccgccaccacgcccggctaattttttgtatttttagtagagacggggtttcaccgtgttagccaggatggtctcgatctcctgacctcttgatccgcccgcctcagcctcccaaagtgctgggattacaggcgtgagccaccgtgcccggccaaggtaaaatattttaaaattaaaaaactaggattgaggggccgggcgcggtggctcacgcctgtaatcccagcactttgggaggccgaggtgggcagatcacgagatcaggagatcgagaccattctggctaacacggtgaaaccctgtctctactgaacaaaatacaaaaaactggccaggcgtggtagcgggcgcctgtagtcccagctactccggaggctgaggcaggagaatggcgtgaactcgggaggcggagcttccatgagccgagatcgcgccactccactccagcctgggcgacagagcgagactcttgtctcagaaaaaaaaaaaaaaaaaaaactaggatcgaggaaaacacagtagaataggcgacagacaatcaatattagaggagaggaaacccagctctcatgggtaggacccttcccaagcatcctcccctgaagttgctgaagaatcaggctaaccagcggcgggcaagcgcatatgattggatttcagtgggatcagggtgaggcaccttccttcttgagggtcattggactcagcttctgtcctgcagttctggtgatgtttgtggctggctggtctccttgagcaacgaatacaatttcccatgaatgtctgctgcatttcccattgccctctgtcatcgtggcgcttgcttcaccatgagaccaggacacccttcatctaactgcctcattgggcataaacagagggaaatgtgttgctggagggagagagtggcatgcagcatccaatttctcccgtcagctgattaagatttgttgtgcctgaacacggtcaaatgagattagaaagaaaatgcaatgtgtctggtgtgtgtttcacataactgtatcatttgtgtaaacaggatgaatgaaggggaatttttaaggcaaatattgaatgtcattctcaagaatcaaggacaagacaccagggcttatgttctgcctggagagaaaaaaaatgtatatattgggggcattttgaaccctgttgattcaataatgctctgcttctttcatgctggtacagttaaaatgtgatagttatatgtctgattttcagagacactgagcacaaaataagtaaaaccacagaaccaccacattctacctttgttgcccttctaaagctcttaggagaggtgtagagccactttctgtaatagcagctgcctaagtgctctgcattgagtccatctgttaggatgcgaaaggaaaaatctcacctctggcaagagccacaacattttagatgtggatgactccggggcaagcccacgtctctgtggataaacctactagaattttttttggtcctccaaacctgtaattttcttcctttctccagggacccctctgcagtactagcagcctctcctacaaggttttatcagggcagaaatggcttttaaagtggtgtaagagctttggaggaagacatgatttctgttacatgttctgcatacgatctagcatattgtggatgcttaataagcagcttcgacggctattatttccactgactatttccaggcacagagctggagggctattctgagaccagacttttcgactaggtcattgcaaagtcccttcctactctaaataacagtggggctgaaaagcattcacatgatcatgtctccagactgggaaaaatctcaatatatgttatttaaaaggtaaatctagatagtaacagaagttcaaataaatgtagaaattgaaggatattataatgaaattttaaaaaatttccacattggcgggaattatattacagtaaataccttaactgaggattatttcccagtatttggacagtaatattgccaaacacccaatatgcagtagataaattagcatatgtcagtagctagggattatatttgcctaaaagctgtgtgtgtatgtgtgtgtgagtgtgtgtgtttaaacagggtttcacaactggacataatggagaaataaaataaaataatgacttgcatttgcattccctgcgttcaaggtgctcgaacacacttggacacatttgattgtcatgataatcctgtgagtttgcagggaagatatgagtaggaaagtctcattaatttccactaggagggggggaatctggagcccttgggctgaattgcccaacaatggccaaccacacagtgcaggcaggttaacacggggttaacctaaagcagggagacctggttttagtcacaatgaggactttaactaagggtaccacctgagtgagtctctgagtctgcatctctgtccttaggatttttagggtattttctaactttcaagtctatcatttcacgtagttaaaaagggttaacatgcatactacatctagcataatgattctttaatacttggaaaaccattgtccaaaatattttctttaaggattcagaaggccctttggaaacttgcagatactcaggaagattattatgttttaaagcaaattatcagtatcctttgcaggtgtagaagtggtagttcatgagggttccaattaatagggtctcaagaaatcaacattttctgtatattcaagtcccttttgggagctgctgcttatccgtgattggagttctgtgatgattgagcctctagctctttagtacaggacacgagctccttctccaaggctcatcccttcagaaggcacatggatggcttccccacacccccatgctctgtggggagtgtggggaacaaactgcaactccatcctctctacacctaagcaactacccagaggaggtagagactggagagcatatttctagttctgacaggtcgatctgtacctctctacctgaatcatcaggtgagcaggcttgtgtacatacatgggagtgcatgcgtgcacacacacacacacacacactcatgccttctgggctcaaacgcctgcataagcaggagcgactcttcaattattggaaactattaatcatgttttcatttggtttcttcaaagacagctcttgatccatatcctttcagtccaccttattccccaccttctagccaaagagttatttgtccagacagctccctcccttccttaccctgtcctggccagaagtctaaagaggatgtccatggcccattgaagaatttcccacccctgaagttgagctcacctgaggattcacctcatccaacggggacaggcttgaacagtggagagggaggacagagctgccacctctgcagcccctcgccagtcccaacctggatggcttttgcctcgattgacttcgtaaaatgccatttgtagggcttggctctggggatggcacagacagacacacacacgcacacatacacgttgccacacacagacacctacaccccatgcagggatgccagatgacagaacagaaaaggcctccctttcatccagcagccttctgactccagaggagagtctccgagccacgacctgctgtttccctggcaactcaggcctcaaaataaacaggattctgctcagacgggccagaagtccattcggctcacacatttgccccaagacaaaccacgttaaaataacacccagggtagctgctgccaccgtcttctgtctctacctccctcctggctggccaatggctctgtgttcctgggcctgctgctggctgtccagagtaggggttgcttagagctgtgtgcatccctgcgggtggtgtgggagtgggcggttgtctaaaggcaggtcccctctactgataaacaaggaccggagatagacctagaggctgacattcttggctcccccagcctacaccccccccacctcgatttcccacagagccctagggacgggtagccagctctgtggcatggtatctggaggcaggccagcaacctgatgtgcatgccacggcccgtccctctccccactcagagctgcagtagcctggaggttcagagagccgggctactctgagaagaagacaccaagtggattctgcttcccctgggacagcactgagcgagtgtggagagaggtacagccctcggcctacaagctctttaggtaagaatcagggcatctgatctgggaaacagagcaggttatagctgaggttgtgtgtgtgtgtgtgtgtgtgtgtgtgtgttttgtgtgtgtgtccaagtgcaaatgtaatgctacttggagaagaaagaaaatgtttcaagcagatagcactggaaccaggactcctgcaagtgaatctcaagaagctcacctttggctgggtttaaaccatggtgcagactgctctgggggaagggcatgctgatgtcacagacatgtaaaaatagtacttctagtttagagactgcaaaaatatgaatgcaccatgccgccacattatctccattcctccagtgcccgcctgacactggccctgaatcagggctggagggggcaggcatttctcatttactaaagtgctggatgcagcccttgaggttcggcagaagcagaaagctgcggtgagtctggctgtggtgagtgtggctagcattatcgtgctgtgtcacactagctctctcttgggaagcctggatattcagctgccttggaaaagctgtccacatggtgggcagcttagattttattaaccttttgatatagaagtcaggctgaagtttaggattatctgggtgtgtcagctcagggttttggtagggtggtattcccatggccccatggtcactcggattacttctttccttcctttctgatcttggaatatcacatcctcgtttcagtacccctccgatgggcactaggaaagaaggagtcagaatggacagagtctctggcacatacactatccacacccacatcacaattacatgccaaaggtatgcaaggctgctgcagaggagcacttcagaaatgcagccctccagatactgagatggaaatttcaggcatttaatcaagtacgcacttttcagagacccaagggaggcccaag

SEQ ID NO: 2381 - DNA, 6000 bp, Homo sapiens
caatggagatgaaccaggaagaagctgatcagtatgaaagggtggaattaggtaaagagctactaccaatgaacacattacagtttttgtttttgtttctcattctctagaggtagccattattaagaatttggtgagggccaggtgcggtggctcacgcctgtaatcccagcactttgggaggccaaggagggcagatcacgaggtcaggagatcgagagcatcctggctaacacagtgaaaccccatctctactaaaaatacaaaaaattagccaggtgtgatggtgggtgcctgtaatcccagctactcaggaggctgaggcaggagaatggcatgaacccaggaggcggagcttgcagtgagccaagatcacgccacggcactccagcctgggcgacagagcaagactctgctttttattaaaaaaaaaaaaaaaaaaaaagaatttggtgagaatttctccagcaattgcatgcacatgcaaacacacacacacatacacaccaatttaaaaaaacacacatctcatcaatcatattctacctgcaattctgaaaaaaaattccagctgataatatctccatggttgttttccatgttaccacaaagagatttgcctttctttttcattggcagcttagtatgccatagtaccactgtatcacagttaggcaaccattctgttgacacttaggttgtttccacaattgcaaacaattcttcagtgaccatccttgcaaataatatccatgcatttcaatatcttctttcttcaggcaataagaccagctttgtcaccattctaatggtaaaaatgttaagctgagtaacaaaggaacacaaccaggctagctatttgagatggttatttttggttaatgggtgacaggtgggcttcaactatgcccagaatggtgtttaaaacatagtgggcactcaataagtatttgctgaatgcatgaatgcataaacaagtgaatccacaaccactatagacacttgtcaggcctgccctgcccccatttatgataggatttttcaaccccagcactatggactgttagggccaggtaattctttgttatggggagctgtcctgagcattgtagaaagtttaccaccatccctgacctctactcactagatgccactagaacaaccccagatgcaacaactaacaatgtctgcagaaactgctaaatatcccctggggaaaaatcgctcctgattgagaaccactgatttttaatacgggttgaagttgcgtaagggcaaaggccctttatgaaaacagctaactctaggctgggcacggtggctcatgcctgtaatcccagcactttgggaggctgaggccagcggatcatttgaggtcaggagttcgagaccaacctggccaacatagagaaaccccgtctctattaaaaatacaaaaaaaatgatctgggcatggtggcacctgtaatcccagccatctatccatccatttatccacctattcctcaaatacctattgagcacccactgtgtgccaggcctgtaatcccagctactggggaaggctgaggcaggagaattgcttggacccaggaggtggaggttgcagtgagccaagatcgcaccaccacactccagcctgggcgacagagtgagactccaactcaaacaaaacaaacaaacaaaaccccaactaactctaaaaacgttgatcctacttctccctgatcctctcatgttatagaggcctttttttcctgggtcttcacagttttttcatagagattcttggataccttatttttggtttggatttcgtttctccagggctaccttccctgatgcctcccccatcaactcatgtatatatacatgaggattataatgtataataatcttcattatacattgttaatctccattattcattctctaattaccaaatacctctccttggtgtggaggaaaaaaatattaaatttgaactcaattgaacgtggacacaaacaatggtcaccaactcccggaacaggttgtgtgaaccccttgaggcattcatccagcacagtttcggagaaatctccatttcaatctattcctatacattagttattgaaaaataacagacaatcacaaaaacaagttgacctttttgtgttccttgagcccagttgcgaagggccctcgtgactggacctcatgccaaacaactcgttacaaaagagctagagtcccagactgtgccgaagcttcacagacctctcctcgtctgtgcacagatgagtggctgactctggagtccaggctattgcttcctggcctggtgatgaatcctccatagtctggtggtataaatatatatatatatatttttttttcttctccctttcccattgcaatttgcttattatatcatttgcttattatatctgcattgctagttatatgggattcaaaagtattgtgtgtgccttttcttctcccctcacacgtttcccgcacagaacacttagtagtgcttatcactgttgaattcttacatttattgaattaattattaaaagtgtatccataatctgtttccctccctgagcttcctagaggaggccatcactaagaatttgccatggaacatgccattttttgctcactatttttatatctagtgcctaaaacaaggcctggcacacagtaggtgctcaatgggtatttgaggaatggctggatgaatggatggatagatggcaacctaatatcagtcagcaatagccagcccaagggtacagcagacttcacaaattgttcttgtaccttctaaaacaattttgaaaaacaatgttacatatacccacatttaaacatttatgttaattttcatcattaagtttatatggtttcaagagcataatttctaatatattataaagctggaatttaaaaattaaactgtgggccaggtgcggtggctcatgcctgtaatcccagcactttgggaagccaaggtgtgtggatcacctgagatcaggagtttgagaccagcctcaaactgatgaaaccccatctctactaaaaacacaaaaattagccaggcgtggtggcaggtgcctgtaatcccagctacccaggaggctgaggcaagataatctcttgaactcaggaggcagaggttgcagtgagccaacattgcaccattgcactccagcctgggcaacagagcgagactctgtctcaaaaaaaaaaaaaaaaattaaactgtggcatcattcttcaagtgtacctattaatctgttattatttctaatattctctttgatttgcttccacagttctgtccctcaatattcaaggaaggaaaagcaaagttgttgaattaaaaaatgcctaattaatcattaaaaaagactgaattaaagtattaaaggaagttcctagtttggggactttgatatttttatacttggggcaatggcaccttattaagatttgtgaagactgacaggtatgatttcctttcatacagtaggggaagggttatgaacacagacacgtgctcaggcaaaccaggtttaggaaagagtagctgcagaaatggagaactaactgattgtctaaaaataatccttggtgtggccctcctctttggaaagccttgcagactcccatctggggtaatgcagcccagtgacctgcagagggcagtgttggacaagctgttggttcaatctctctgtctctttctcagggtagtggaaagtgcagtccagcttggatacagtgggaacccggcctgggcggcccagcccagtcctctctggtgtgtgtgtttgcacaacgaattattcacaggaaaatggctccaacgagaatggtggccagagactccatcctgtacctagaaccagggcctgggactgtaaacaggtgaaaaccttattttctctccccttcaataactggatttggaacagaaatcaaggattgaagttgtgggtctgaatcaaccctaagggttttgttttccctcttatgaagtgaaaacaacagtgaaatgtcaacgattcacatcttcaggagacggtagggcaaagtggccaagagctcagacagtcgggagttcccatcccactctaccctctccaaagcttaggtgaggagcctttccaaacctcagcttccctggatatcaaataggagcaatcttaccctcctggcagcggtgttgtgaggattaaatacaagaatgcagaagtactcctcaaatgaagggcattcagcaagaaagagcccagtaaataacagtgataatggtgaagaggacgatattgaattggcatcttgccaggcatgacattttcaaaactttccattcatgtctgaagaggaaggatcagaggtgaaaaatcaaactgtctcaatgttgtaagttttacaagcctaggagccagaggcagaaacagccagggcagaaggcagaatcaacacattgagagcctagctctgtggcgttgcccacatctgcctttcagggtcggggctcccatcctggtgttgaaaagaggatctttgcatctaaaatagtgtgtatgatgactgtgtgacacgaccaccagactcagaaatactcacctgcctcagacataaaagtaaggacttcgttcattacgttgatcctctgtgaaacctcaaaaggtagcaatcagctaattgaagaaaaatgataagttggacacattgcttggatgtactgaaagtaaggctcagagcaaaacccgctcccttctgcctcatattgggaaaggtaacagggactagtgcagagagaggcatggagagaattcggatgagatcattgtcctttcacctggcagctgtccagcccccaaatagcttttgtgtccagtccaaaaataagatcacatgagagggggagaaataaatatacagtgcttgtccttagcctttctgtgggcataccagtgtcagctgcacttgtaggggcccaagtgcctcatgacccactcggcagccttcctctccaggatccccaaggctaggaggccaacctactaacaggtgggtgggtatggtgtgtggtttcactcagttcttctcatggggtttctctgagctccattcataccagaaagggagcaggagagagaggacaagtggatccaacagccttcgctccaggggaatcagggcatcgcctccttttctgggaggacactcccttctgatggtgaatgggaactcccttcctcctgcagcagcctgcctgcagctgtcctggtagaacagtgtggacattgcagaagctgtcactgccccagaaagaaagcaccccagagccaaggcaaagaggtgagtgcatctgtttctgcaaagggctcagattgctacagactttctgcttggcttcatgttgtgctcagcgtgaacgttctccctcacccccgccttcctgttctcctccctgatctgggtctgtggcaagcttgagtctatgtgatgaatgctagagtgaaatattcctgtactgccttctctcattcaaaggccaattcactcccagaaagaactgggtaggtctggttcttagtggggaagcaggaaatggttcctactaagtgaattatctttgctgagatccaagaagacgtttaccaggaaatcattagacaaatcccattacagtagacttaatgcttcattttaaaaagcactgaatgaaatagaaaataaaaggatgccagctgattctttgtcgttggcaaaaaggaaaaaacaaaaatgagacatgcagagcctctttttccccatcacctcccttccccatctcttcctgatttcttagagccctgcaaaacatacttaacagattcaagagttcctttctctggttgaaaacaagaggaataaaatcaggggtttggggaaaattgctctgtacacagacttcagagacaaagaggagaaacagattttgcagcctcggtc

SEQ ID NO: 2382 - DNA, 6000 bp, Homo sapiens
caaaaacaaaaacaaaaaacaaaaaaaaaacccaagccccgcttgattcctaaccagattgaccaaaccccatgcagacggtctaacagaacacacttgcccatttccgagcattaatatgatttacctcattctcttctgttatataagcaatgacttggccgggcacggtggctcacgcctgtaatcccagcacgttgggaggccaaagcaggcagatcacttgaagccaagagttcaagaccagcctggccaacatggtgaaaccccacctctacttaaagtacaaaaattagccaggtgtagtggtgcaggcctgtcgtcccagctactcaaacccagatgtttgaactaatggacagagactttaacatgttgttggggctcagaaaatgataccccaaattaaggctctgaagcagcctcagaagcaaaagtttctctctgaccttctgccttcctgtctctggcccttcattcttccccaagcctagccacagacactgaatcccttttcctcaaggtgggtcatagagagaaccccttttccccaaagccagccataaaatgtaaaatactactctaggccgggcgcggtggctcacacctgtaatcccagcactttgggaggcagaggcaggtggatcacaaagtcaggagttcgagaccagcctgaccaacatgatgaaaccctgtctctactgaaaatacaaaaattagccaggcatggtggtgcgtgcctgtaatccccgctactcaggaggctgaggcaggagaattacttgaacttgggaggtggaggttgcagtgagccgagatcgcaccattgcactccagcctgggcgacagagcaagactctgtctcaaaaaaaaaaaaaaaaaaaaaaactactctaacttccgccttgcttttgtgtaaaaactggctctgaataaattatctgagctactttgttttagattgtaggtcataagacccccattccaaagacggtcctgtacatacccagaaggaaggaatgctgccgagagaggccaagaatctagacagacaggcctcgctgggtttccccactcagtctattagcgctaaatcagtacgctttttgtccaatcctatttctacatagctgtccatactttgttgaacctaggcatataaatggacaatttcccatctgtgtcttcattctgaaggctcctatgtcaggtaaaactatgatcaaataaatttgtatgtcttttctcctattaatctgccttttgctagttaattttcagtgaatcttaagagggcaaaggggaacttttctgttggcccctacaatgttaaaaaatctggtggaaaacatggagccaggtgccatggctcacacttgtaatcccagcactttgggaggccaaggctggagaatcacttgagcccaggagttccgagaccagcttgggcaacatggtgagaccctgtctctacaaaaaagttaaaaattagctgggcaccgtggcctgcttctatagtcacagctacttgggaggctaaggctggaggatcccttgaacccaagaattccaggtaacagtgagctatgatcatgcctgggtgacaaagtgagacccccatctcgaaaaaaaagaaaaggaaaatatggattatatatattgtgaaaggaaattaaatcttgggaccccaaactcattaagccaaagggaaaagtcgagctgggaactgggtcacacaaacctgcctcctgcttttggttcctaaataagatggctataagatgaaaagctacatgcctcccccatatgttgcccagtaattcagacccttccattaaaccagcaaacctttttcatttacaatctcattggacatgtttggtattccagtgctatgatcacttagcttcaatctttgtaccacagataggtatcgaagatgttatatggcatatagaggccataacgaattacacccaaaggccctaaatggtagctgcatgagtacctctttgctaagcaatgaggtcatgcttatgaggaaagctgtgttgcaaaactatgtggctttagatatactcatggcagcacaaggggaacctgtgccaccgtaaaaactgaatgttgtgtgtatattccagatgaatcaaagaacataaactgaattatgaccagtatgaaaacccagataagcaactgtcagatccaaaaccctcactaatccattgcttgagtggttggtttggatcctggggaatttagtggcagaagctattgcttataatagaaggaataatttatgttctgtcctgtttctgcttacaatgttgttatagtacgtgtttgcaaataagtcaatatgcaaccgaaagggctaaggtaatgattgcccagagaattgctttaattgaggaggcagtaatataataaagcttgacccagcttccaggtttgctttccttttgttgctataaatctggcctagtccctatatatattttttcatctcttttcttttttcctttctaggaaagtaaaattcctcactaggaatttccttgtgggcaaaatatgggggaggcatgtagctttccatcttgtagccatcttatttaggaaccaaaagcgggaggcaggtttgtgtgacccacttcccagcttgacttttccctttggcttaatgagtctggggtcccaagatttaatttcctttcacatttccccctttttttctttaacatcttttggagaaagcattttaaaaggaatatgtgttcctggcctcagttcgctttttcctccttttttgagctggtttcttgtcgctaggatggtttattccaggaaattcaggtctcacgttactaggaaggctcattcctaggaagtcatgttccatgttgctaggaaggctcattcctagaagtcatgtcccacaaagattaaaaaataaattgggggaggaaagagggaaaaaggaaggaaaggagatgattctgagggctccagacttaaaggagaaaagggtcctatctcttttctcttaatgttaaatgttattttgtttgtggaatgttcactctataatatatatgttgattaagtataccattatgcatgatttgcaatattgattgacctgtggagtgccttgagcctgtgtgtccaagactctgagtgctgagtgagtgggaagtactaaggagaattgctttcttggaaactccatgtagttcgtggcttttgtgattgaaatagcatcagtaaaagtctggcattgtggaaaaacacaaatgtacgtggactctgttatttctgaccttgcactcctcacaaggcatgtgaaattggagtcacagatgtagaaaccaggcagaagacagtctgaagagatgatacttgagaattttccaaatataataaaagacaacaaatcacagatccaagaagctcagataaacccaaggactttcttataaaggaaaagatatacttaccatatgatcaaataatctcactctaaggcatttacacaagcaaaatgaaaaccaatgtccatacaacgatctgtatgtgaatgtttataatggttttatttatattcactaaaatctgggaacaacccaaatatccagcaactggcaagtgaattgtatgatatatccatacaatggaattctactcagtaatacaaaggaagaaattattgatacatgtaataatatggatgaatctcaactacaaaatactaagtgaaaaaatatcagatccaaaaggatatataggattccacttatgtgacattctggaaaaggcaaaactagggacagaacacaaattagtgattgccatggtttgagtatgggataagtggactaactacagaaacaagggaactttggggatgacagacaattccatatttgactgtaagtgaatgtatgtacaaaattcaaaactaaaaaggataaaactttatgtaaattatactttaaatcaacttttttttttaatgaggtgatttaaataaatgtgttaggtagcttgatgacacggtaagtatgaaagtggtaccagaatggcttgaaactcataaaatattggcagagtggttatgagttattccaaaaatcaaataatgcatatgttgattcgtaagacccttgtcatttcagaagctggaaatgaaacagtactaatgaatttgtggcttcaccactttttagctccacaaccaggagctatatcaggagagattaggttaatctctctaaacctgttttcttttctataaaagagggatcatcatacttgcctacagggtagagttaccagataaaatacaggacgattggttaagtgatgtgaatttcaggtcaaccacgaatcctactttaggacgagtaggtaccatatatatttataattaaaaagcgattcgccgttaatctgaaattcaactttagacgttctgtaattcgtgcgtgtgtgtgtgtgcatgtgtgtgtgtgagtgacagagagagagagagagagagagagagagagagagagacagaatcagaatctggcagccctacagagagccctacagagaggttatgcgaataaataagacactggaaccgcaagacgttcgcccagagtttggcataataagcgcctcagtggtagcgaacgctattttaaccccagcctctgatgcattacgtcttcctttattctttcgcccaattgttaaatgaatcaactgtacgtgtggcccttcattccaagcaggcaaaaactcgaaggaagcatccaggtgcattataccaggaccccaattgttaagcttagaaattccaagagcgggcgacgtcatgacgcaaaggccccgccccggaagaagccctagacgcgtaaataagacgccgaccggcgcggcgctagcctcggggcttgacgggattgtggcggtcctctctcccaattcggaagctacagctacctccggacgctctcaagatggcgacctctctgggttccaacacctacaacaggcagaactgggaggatgcggtgagtgtgcctgccggaggaggatggaaggaggaggcgaagccgcgcaccttgcaagctggcaggacagggcctgcggcgcggccgaaggaataccggggaggagccagcgcggcggcctagcttggccggagcaggagggcggagggcgatcctcctgcgggcttgaagggagggggcttagccagggtcccgggaccagcaccctttccatccctgccccctccagcctattagagctggttttcttttctcccgccgcctgccggaagtgcagacagcgccccctcccgcgatcgggtcgtgatggacttcgggttcctgccgtgcctagttccccaccctcgcttcccgccccctcgccaccccaagtgtcactgaggtgtcagggtcttcggagggtggtcctcaaccagatttcccattttcaccaggacttccccattctgtgccagacatgtcttggagaaaacccatatatccgaatggtgagtgatcgcgtgtgaaacgagttattcatgtcctgtcgatgttgtggtacttgcacactgtgaagtgtttctcttagacaagcagaaaaaatgatgctcttttactaacgcgaagtgctggacgacttgcaaagaactgtcatgtgtattctcttacgaatccggtaacactcctgtaatgtaggggtaataacgatagctagtatttgttgagcatttacctaggaaataggtctgttgaccagaaggtgagagcgtttgtgtcttttcatacaatagtaaggaatggagctgggatttaagttcacatattctggctctaggaatgtcagcatgataggaggagaaccagaactagaaactaggtttcctgaatcctggtcaaatgccttttggccagtgtactttatctctttaaagtaagcattccccctttgttacaaactagg

SEQ ID NO: 2383 - DNA, 6000 bp, Homo sapiens
gggatatagtacatgcaaacagagaacggaacagcagacacttatcatgtgtctcctctgctccctgcatgcttcactgtcctgaaggacttcatttacaaaacacaggttcaacgataaaattttctatatggatggagctggccctgcgtgagagggaggtttatttttcacttattccttctgtgcctttttaaatttaaaaaagtaatgtggaccagctttatgaatgtcctaggctttgagttctgtttgcaaaatgctgcttttttattcttcctgccttgttctcagacctaatctgccgactcatatctcaagaacttgtagtcaaggatcataaaggatttggcaaatgttctcttgactaagtagagcacacgattaaaaatcatttaaaggcattggattggtttttggttaaagatcaaagtggtaataaggcagatgtcttccgtctgtctctataaactgagccaggcttcatgcttttggtcctgaatggagcagtgccaaccattaacaccatgaggaaacactattcaaagtatatgcctcaacttcccctggacagttgagtatttgaggaatttatatgcttgaccctgtcaggatattcactgcagtatggttacatggaagcaaatattcactgcagtgtggttatatggaagcagaaggctagaaatgtatggacattcccaggctaaatgtccacacatcatgatggatccatactatggaactacgggatgccatgcagttctttgggcactgccataaaacaacaaaacacaaaacagtaaggcacacaaggatgtgtagagtatgctacctttcatgtaaaaggagaaaaaggcatgaatgtctacactggtgaatgcataaatcacttccgaaggaaacataagactctggttatcattggggaggaggagaacaaggcctgggaccagagggagaacgtgtacatttttccatgtttgagagtttgtatcatatgaaaagcaaaaggaaagttcagtgcaaactgggcagttgataatatcacagtgaaaatattagaccaatttgtcctctaaggaagattgaaaagggcagatttttttttttttagggatatataagaaagctgaagataagtagaatgcacttgctctaaatctgttgttcccaacctgtgagcttcagaggttgagggtggagggatggtaactgactcatggtaagcacttaatgaaagtttagtttttgaatggcttaatgaatgcttcttcttgtcttggttgggggtggatgggagaagtgattccagttgcattggtacttcctgctgcccggcacaggaagccttctctgctaagggcacctgtggacagtgactcagcacaaaaccatctgtttattggtgcaatgtatatttactcttcagaaatactgagaaaatgagggactctggagaatgatacacaaaggggtgtggaatgagtatgcttagaatcctactgaaatacccctggagaaaagcccaaagcttctgctttccctcttagttatccaaactcctgataattgatagctgaagtttaggaaaagggcagtacatattagtgaataataaaggcctgtcttctttcaatgtacccagcatagaaagactgggaaataaataatactgctatgaaaaacaaaacaaaacaacaatgctgttcattgttgttgaatggaagaaccctctagtacatattgatatgtcatgtgattattttaaagtaacattcactctttttttctggttatgaaataatgcatatttcttgttgaaaatttagaaaatacagaaatattaggaaaaaaggtaaattaaaatttaccataatcctaccactctgattacacagttaatatttttgcatatgtgtgtgtgcatgaatgtagtttaactgggatcgtactctaatctttttttgtttttattcatccccttaaagacagcttattctttctcttgtttttgtttttgttttcagaggcagtgtctcgctctgttgcccaggctggagtgcagtggcacaatcacggctcactgctgcctcaacctttggtgctcaagtgattcttctatttcagctttctgagcagctaagactacaggtgtataccaccacacctggctagtgtgtgtgtgtgtgtgtgtgtgtgtgtgtgtgtgtgtgttggggggcgggggcgggatcttgctatgttgcccaagctggtcttgaactcctggcctcatgcaattctcccacctcagcctgccagtgtgctaggattacaggcatgagccaccgtgcccagcccagtttatcctttttatttaataaattataaacattttctccaattcatcatgcatcctttaaaaaatgcttttaagagacaaataattattaaaccagttccctgttctaatggttcactatgatgaaaaagcatttttgatgaaacacctttgaaataaatctgctttttttaaaagaataaatttctacaggtggaagagttggatcaaataatacagtttaaaatgttttgatttatgttgtctttcagaaagatggtcttaatttatattcccaacaacactgtggattgaccaaaattccttaacaaaaaagtaccccactgtttttttaaaaaaagcttttaatttgcatgctagggagtatgagcattttaaaaataacatctatccatatgaattccttctctgacggcatacctactcatgtcttgcatccatttctgcacgtagggtgttaatgttttacataccgatttatcagaggtctagaaagtagcatcaaccttttgtcacatttgttaaaaatattttctcaaatttgtcgtttgcctttttggcaatgataattgatgtatctagatcctgcatatttattcaaatttgtctactcaccttgcctttggtttcttcccatgtcttagtatctaggccttcccctccgtataattcgtgtatgttttcttcttatcctcttgtgatttgcttgtttgtagttctctgagttcttatatttattttggtgatatttaaacaagtccttagttttacttttttcccccaacctaatttattaaataatttagccgtttatacttgtcccaacaaagtgaaatgccacatttatcatacagtgaatttttaaatatattaaattttcctagactttcagttattccactgatgcttaatccatccattcttgtgtgaacactacactgttttaactatagtgttgcaatatgctttaagatttgataatacaggtctgtccccccagtttttttgttcgtttgtttgttgagacggagtttcactcttgttgcccaagctggagtgcagtggcacgatctcggctcactgcaacctccgcctcccagatgcaagtgactctcctgcctcagcctaccaagtagctgggattacaggcgtgcaccaccacactcggctaattttttgtatttttagtagaaacagggtttcaccatgttagccagtttggtctcaaactcctgacctcaggtgatctgcctgcccttggcctcccaaagtgttgggattacaggcgtgagccaccgcgccccgccatccccccatttttaaaatataaatttcttagcttttctcgcagatattctcccatttgaaggttagaaaacatgttaagtgccccctcctccaatctacccacaaccattaaaattttattaaatagagtaatttgggttaagttggtgtttgtgcctctattccttcaagccttctttattatgtttcaacctttgtaatgtcttcattaagagcctgcacatttattcagtttatttttaggtatcttacacttttaaaatggttcgtttgttttacattaaaactgctcttcaaggtccaattgaagcttatcaaagctgatttaatttttttttcccaggtgtgtctttatgtgcaggaaagcagtcagaaactaaaggctcttcagtcacagttgtttactgagtgttcacttaatacctggtgtagtgattatccctttacacgcattatctcctttaattttcagcaggttggtttaacttttatttccattttacacacgaggctctgagtttgaggaacttgacaaaaatcacccagttggtaagtggatttgattccaaatttgtgaatctccaaaactatcacaaaaatcaatcagccaagaaggatagcccaatgctatgccatcagatgggctgactcaaaaggatgactttccaaaagcaagcaattgaattaaaaagacaatgttttccatccaccggacccggcaaaaaaagactggttttcctccaatgtgaggcatagttcatattctgcaggagcacaataataccagtgacttaggctcctttagaattagggactcgtgggtgaacaagggtggtttttctgcagctttcactggaattgtccgtttggaaatctacctccccatggcagggcgggtttcaaagaagaggagaacaaacaaaaaacaaaaacaggaaaaaaaaaaaaagagagagagaaagaaaaacaggtggaaccgacgtaaggatggctagagcagtgcgcgcggaaggcagaactttctgggggcgtcctgtccgcacgtttcacgcgtggtgcgcgcaggtggcgccgcggtccctttgctccctgcgcaagccggaggggtgcccagaaggctaccactagcctcagcgaaggtgagagagaagctttccgccgaagcgagggaggagggcgggcaggaagcggagccagagctggcaaagaaaggctccaattcccagccccccgccccgcggggcgcgggggcgccggcagcgcatgcgcgaggcccggcccccaattcccccagcgagggagggaggcccccggcggccgggagcctgcgagccgcggcgggacccgagcgcacgcaggggcgcggcgacggcgggggctagtcgggctgcggaggcggccgtcgggagtgcggagcgcctcggacgagggtccaaccgccggcaggcaccagagggcacggctggctcggcactgggaggggcccggcgctcgcagccccccacgcccagagaggatgcgtgagtttcgccccggctcgagggcaggatgtgggagcaggacaaaggctgggcggcgggggaggagttggggacggcgagcctgtggccgccgccagagccccagcctcgagcgagctagcggagttgacaactttctctgcaacttttgcaaaagggaagataaaaattctgcaagttgttgcacagctccatatcgccccgtgtccggcgagcagaggggagggggcaccgcagccttccgcggaccagaggcgacctccagctcctctgagcggcgcaggagggggcgcccgccggggcccggggccaggggcgagagaggatagggacaccgggggtcggagcccggggtacgctctggccgctgaagttgcccgtgtccacgcagggtgcgccctgagagccgggtagcctcggatagcggcgctgcgtacgcgatgatggatgagccgtggtgggaagggcgcgtcgcctcggacgtccactgcaccctgcgcgagaaggtcagtccctccctgcccttgtcactctcaagactgggtacagtctccttcggtctcgacttcgtgttctcaggtcgcctgcgtgggaactcagaactcccgggtgcctttttttcctcttaccctttaccttctcccggagtgtctgagcggaattggggggcgggggttagagactggagatgggagagattgaagttggtttttctgataaggagctcagaactctgggccaactagtcagagacagccactgtacctctaaggcagtgtttcctatagtattgccaccctaggttattttaaaccgtacgtgaagggg

SEQ ID NO: 2384 - DNA, 6000 bp, Homo sapiens
gaaagagcccaaagatggctctggaaaatggtggggtttgtttttttattttttattttttaaacattctccatctactttatacttttgcctcagattggccctgacttaaaaacaataatgaagagttcaacctcatcacaggtgtttatttttgctgatgccgttgcaaacttccgacagtcatttatctccaccccaagtgggtttcaagctgatgctgacagcggtccgaaatggcttcctcgtgtgaaatgtccatattctatttggggctctcttatcccataaaacacacttaatgtgtgagcttcaagacatggagatcaagggcctcagaggtgaaaggctaacggggcattaatcctcaacctcctcagtttcctgtcacttggcagaactagatgggcaaatcacttttgaaaagctcctcattccctgatgttgagtctggttctaggcatcctacaacctgaaaccgaggagggtgtggagggtctagaagtgccacctgccgtaggagtgttggctgttcaaccttgaggagagaagactgggagtcctggtgagactgtcagggagtagcactggtggagtaacagcagagctgaagggcaagtgggagttggcaagggaagctggatggagagggctttccagggaggggcatggcaggcaaaggccccgtggtggggcagggcatgacacaggagaggaatcaaagaagcccctccccaggtcatgggggcaaagtgtgcaaggggagaagatgagggggcagagcccagaccttgaaggctgataggtcaaactaaagatggctatcttgaccatgagaataacaggaaaccacagaatgattttaagggggcaagtgacataagcagacttgggttttgagaagaccactcttgcagctataggagaaacatttcaacttaccctatagaagagctttcattttgtttgttggttggtttgtttgttttgagatagagtcttgttctgtcgcccaggctggagtgcagtggtgccatcttggctcactgcaacctctgcctccagggttcaagcgattcttctgccttagcctcctgagtagctggaattacaggcacccgccactacacctggtgaatttttgtatttttagtagagatggggtttcaccatgttggccaggctggtctcgaactcctgacctcaggtaatccacccacctgggcctcccacagtgctgggattacaggtatgatccacgtcgctcggcccagaagagctttctaatagaatgctagaccttgggaaagtaataacaataaaaactaacatttactgagttcttactaggaatgaaacactgtgtgcttttcatggattaatacgtttggccttgagaacaacatgtaaggtaggtgtattacgatgatccactttccacagatgaagaaatagaggctagaagaggttcagaaagttgactgaggttacccagttggagaagttgcacagcaggagctcaaatccaagtccttcagacctcagaggtcatggtcataatgactacagccctctgacatccaggctgccagggaccacaactctggttctaaccgtggttgcacctgggtggagtggtaagacttctaatcctgtctcccacccaccaagtgactctaatgcaattagtctggagtacagcctggacattgggaatttttggaaactccccagctgagtctgtggtgcagccacattgagactcataggcagatagctcgtaaaacacttgagagagctgttgcagggaatagccatctctctggctggactcagtgatctctgagttcccttctagcttggatttttttttgactttatgattcaccagttctgctgccagaaggctttctccaaggtgactgaatttctggaactgacagatggagcctgagggaccttggtaatactgtgtcagctcccgtggccagtcagggagagcagagtcttcagggctgtatctccgcaccctgcccaccatcttccctctgacgcagaccaagcctgcagaccagtgagaggagaagaaatgaagtcagctgacccacagttggcactgccaggactggatgctgctggctgttggccaggatctgatccactcctttgagagtgtcaggagctgtggaaggtatggggtggggggcggggttcctcccaaggcaaagttcctgtggaggtcagatgagactgagcttgagaactgagttatgaaaaaaacctcaaggaacatccttcacctgccctctatggctccttagcttcttgaggttctgctgctcagagcctagtgtgataaataacctctttctctttagccacctggtctcctgtcacttgaaggggtggcaagctcattccccactccaggcctttgtacttgctggttgaccaaactgtgatgcatccataccatgatataccactcagcaataaaaagaaacaaactattgatacactgaaacaacctagatgaaaaattataaaaagtagtcatcccttttggccccaaatcccaacttgaagaagggaaatgctgaatacgtaaaagacgagttattgaaataaatgctgtcaaaggacaaaattttgacaaatttaaagatcttaattggcttttatttgcaattctagaatcaggcaatacctcatattccgtaaaccagaatgagtgttcctagaatcggagcagagaatgttggttttatagacctaaaagggctgaggaaagcagaaacagaaagcaaaaagcggatgggttgcttcaaagttactttccttgtgaaggttaaagaagagaggacttccttatcataccagctaaaactagcttgtttagaaatttggctattgtctctcctgatttctgggaaggtcagataaacaacttagttttggctgggtgacacggaacttcagcatgactgatcccattttggtttattcagttgggcctaacgcaggagttcagtctaaaccaatggcctcctacacattttatttaacagcacttactgaggacctttatatgccaggctctgttctgggccctggagataaagcagtgaacaagacagagaaggattcctgccttcgtggaacttacattctaatacagagactggcaataaaccaagtaaacataaaataaaatggggttagatggtcaaagtgctacggagagaaaataaagtaggggagaaaatgggggtgctggttaagggtggattacagctttatgggggtggttagggaagctgttactgcaaaggcaacatttgagtacagtccttttagaaagtgagatgagaatatatgagggtaggggtggaaggtagcagggagcatttcaggcagtggaaatatctgaacctgaagcaagagtaagcctggtgggttgaaggaatagccaagaggccaccatggctagagtccttggtcagagagatcatggatggcatttatggaccattgacctgacggtggtccctggagttttgctgttgtctttttttttttttttttttaagatggagtcttgctctgtcgcccaggctggagtgcagtgatcttggctccccgcaacctccacctcccgtgttcaagtaattctcctgcctcagcctcctgagtagctgggattacaggcacctgccaccatgtccagataatttttgtcctttttgtagagaaggggttttgccatgttgcccaggctggtctcaaactccagacctcaagtgatccacccacctcagcctcccaaagtgctgggattacagggcatgagccaccttgcccagccccctggagtgtcttgtacaataaaacactcacatgtaaacaggaaataaatgtgaactcaagatccccctgcagagatgctgattgtgtgggtcagaatctgaccttgtcctgaagtaggtttcatagtgagtaacaagaaaaggggggcagggtaggaaacagctcaagagaaatgcatatctctgaacaaactataaataagaaataatcccccagagtaggatggggatgcttttcctgggctttttctgctcaggttcggtgaggtgatggtggagatcttagcaacacacaggagtaggaagtggaacatcctcactcaggctgcagcccttctcacttgccctcatcggccctagggtccagacactccgaaatgctttacagacaaccccacactttaacaaattgaatcctcacagcaacctcatgagccaggtcctgtcttctttgttacattttaaatcaacaccatgtaaaagaaatgctttcaattttaaaatttgtctgttaaaagacccttcaaatggattaatttattaattaagacacattctcaatagcagaaatgccaaaaaatcaataataggattgaggaaattgcaaatgggcatccatttcatagataatgaaattgaggctcctgcagttggaattaaaccatcaggggcttgaacctgaaactgttccagccccaactccctcattttaataactggcaactccatccacccaggtgctcggctcaaaaatgtagaaataattccctccaccacagcgttgtcacagagggtttgtcttagtcctaaattagcgggaccttgaattggcagatggcacctcctactataactcccatctgttgatttcttgatccatggcccagctcgtgaattttgctgatgtgttttaatctttcgaatatatgtgattttgacattctccttattaacatctctatttgtatgaacataaaaataaaatgtttttctcagccaaatctttgaatcatattgaagcttgaggaaaatgggccgtggccttgagtacctggaacacgctgataaagttgatccatttggttgtgtgtttccaattagtcaaccacagcttgcaacttggcagatatgagtaacagatgaaaaaacactttctgtgtcagcactaatggataactgaaagcaagtcgacaaagatttggaaaatgaggcatacgtctaaaagaaaaccacaatattatgaggctgaaatggtactgaaatattacaaacacttggaggagtaagtaaatcttaatgtatttaaattgaagaacgtgtttggatgtgttttggggttttggcgtttttttttgttttttttttttgttttgcatgttgctcattatatagagttacaaagtgataatcactttcactctggcaattatacatttgatttgtttataccatacatatatatatataaattatatatatatgcacatttcttaagtattatccatgtcttggattttattgctctatcttcaaagccatctcttgtttatagagattgaggtttaattgcaagtgctaggctagagcatggcactgtggttaattttgccaggtctttttgaggtttaagagtagttttagcctgggtgcggtggctcatgcctggaatcccagcactttgggagtccgaggtgggtggatcacaaggtcaggagttcgagaccggcctggccaacagggtgaaaccccatctctactaaatacaaaaatttgccgggcatggtggcaggtgcctataatcccagctgctcaggaggctgaggcaggagaatcgcttggacccggaggtagaagtggcaatgagctgagatcgcgccactgcactccagtctgggtgacagagccagacttagtctcaaaaaaaaagaagaagaagagtagttttagtatacctaggatgaatacagttactgagcttttaaaatgtgccaggccctatggtaagtgctttatacgcattacctaagtccttcttacccatctgagatctcatgggccaagattataatcattcccttatacaaatagcccttacattcttgcccttttctctcatcattctttcctagcaaaa

SEQ ID NO: 2385 - DNA, 6000 bp, Homo sapiens
agagtaatctctatttcatttgcagaaatcagtttattctctctttcgattgtgcctttgcatatactgttgattttgtctgcaatgccctttgcaccagcctcttcacttggctaaatccctaaaaaactcagatcaggagtcacagtatcttggaagacttctacaaagatcccttcccttcactccttccctgacccccctgattttgtttaagtcttcttgtgtgttcccctgataccctatgcatggctctgtcatagcacttatttttatggttattcatgcatttctctggaaagttttttatttgttttgctttgttttgtttgatttgaagacaaactgtaatgtggaatacattaccctaacttgggtgtttttcctccacactcacccaccaacccttggaatgccaagggagggctcctcactgccctctaccagccatagaacctgaaagccacgaagaggctctgaccctaccaacagtacaggcagtgaaaaacaaccttgggatgtactaattattagaaaactgaggtttggggagagaaaagagaaaagggttggcaaaatcagagagggggataaaagagttaaaaggctagaaagataaggaaggtagtaacgtgaaacaaggaaggccttaagtccaattctcaactccgccaaaacgttttgtgtacatggggtgtgtgtgtgtgtgtgtgtgtgtgtgtgtgtgtttgggtgtgtgtgtgtgtttgcttttgggggaggaaggttagcaacctaggcagaaacctggataagaaaggaaattgttcttgccttcccattccttctccttccaaagcaggagacaacagagacacctgcagtgttggcttctgactggaggacaatgacccagctgatccttctgacgtcttacgttcacagagaacagcagccaacacatcctgtggctcaaaagctgtagcagcattttttatctgggattacaaaatacaatggtctggcacttacaaagttctcaagaaatacttgttgatagacaaacaaagtaaacagtcaacatgggcaaaatgttgattattgaagctgggtaatgagacttaaatgttctgaaatagaaactttttaaaaaactgcagaaaaatccaaattcaagttttgtgtgaagtatatttagtaaatagtaaacagttactaaacatgagatatataaaatatcccacatttctgaagagaataaaaatatcagagttgtcaaaggcaggtgtgtttaagttcagcacgatgacctggcacatgggaaacatataataaatgcaaaccctatatagtacgtttttggctggtcttggctttaagctttgtactcaacagagtctaaagccattagagaacagaggatccccctctaatgtgacccagtgcctttatatagcagtggttacttgatgagtcaaaaatttagtttttcatgaaatatatagtaaaacctcaattaattggaaggggttactttatctgagtatagaagtggtagctagaacctctgagtagaaggatattcatggaattgttaatctatgttttttatgtatccttctctgtctttctcctcccaaccatacttaatttcactggtgtcccataaactaataaagaattaaaggagccactgacaagcaagttaacttcaaatgaataagatagactagatgcactagagaacagctagagaagtggaggaggctgtaatgcacagttacaggaaggatcagaaagcagaagggaactcagctgagatctttttgaccctcacttccttggcccttatcatagttggacaaggctacacacaaaagtaccagacatttattagggagcctgaaaagagggtaaggtgattggacattgtgtgcaggagggaaggcacagactcccacatctccaagatggaaacaaacaaagccaaccgggaatttccctgtgagtcagggcagtatttgacacaccaccactgttttatacctgcttgttataatctttgttgttgaaaggcatgtctacagcctaccatgcggagaatatgattacatcttcccgttactgcctggattcttgcccagcctcaaggccattattctgaccattagttcttgttgtacttaactgttaatggagaagaaggtatgaggataggaattgaatacatcattgagcctagaatatacccccagaagtcagtcatttaacaaattttcaataggaattcatgattaaatccacacttctttaaaaataaaatcatagttaacgaagggctcattatctttattttacaagagtggataactgagtattacatttccacattttgctaattaggtcttttcaattatttaaatgatggtctatattctaacattttgaaatgaaaatggcagagggggttaagggaggaagaaaagtaaagaatttcaatttgacttgatttatatttaattaatgtctctccagtactagtgaaatatttttatgtgagagattttaataaaaagtaaaaatattctaatgtacgagaaaatactgtattatataaacaatgatatattacctaaaagccctcaagtgaaaatttcaagtataaaaacgtatagaaattaatacatgcaatttagatatttttatctgtgttaaataaacagttctaatactctgattatccttctaggctgaaaacagaagactagtctgataacagagaaaacacatcaaagtgtgtttaagcaagatatttaaaaagaaatagtaatttaatactaagggctaccatttatcaagaaatctactgtgatctgggaatagtgactacctctttatgcactttctattatttaatcctcttcataaccccatgaataatgtattttttacttctcattgttgagaaaagaaaatgtgattaaataacttgctgaaagtcacataacaagttatgagctattcctggatatgaatataagtttattttattctaaagtctatgtgtttatattgcccacaggttacatgttctacaaggacgggtaccagtctaatttgttctccactggcctatgctatgtgttcaataaatattagttaatttattcgtgcttttgattgctataaagaatttttttttttttagaccaagtcttgctctgttgcccaggctggagtgcagtggcaccatctcggctcactgcaacctctacctcccaggttcaagcgattctcctgcctcagcctcccgagtagctgggattacaggcacgtgccaccatgcccagctaatttttgtattttcagtagagacggggtttcaccatgttggccaggttggtctcaaactcctgacctcaggtaatccacccgcctctgcctcccaaagtgctgggattataggtgtgggccaccgcgcccagcctgccataaagattttatgattttttagccattttttttaaaaattgtgcatatacattcctaattttaggaattaggaataataggaactaaaagccaaaaggagaaactacatttataaactcacacattacagcaaaaagtatttttaaataaaatcacttgttaaaggttataaattgccaatttatattcactaggtaagcttttattttcaaaaggaacaaaggcctcttccccatttgagccccagtttcttaaactgacctgattatgtggctaaggtattattgtgaggtattgatgttttctcctgtttttccttccccttcctccccaccccttttccccctttccagagttttgttctgtggcattgccttgggtaagtacacggcagggcaaatagcagagtgacggcaaatctttcagattttcactttttcaaagtaagagagaccgaactggggccatgagaacagagacatccaactactgtgtaattcataagagtttagaaatgactccttgtgcaccctttttcaggcccttttacaaatggacttttctcacttgtgatgatctgggagagtgagagtgaggagagtctaagaagagttcaggctaattattttcccactaatctggcataggagaggctcacagagattaaattcattatggtaaatacaaagagtaatactgctttacactcgggtctgtagactgagattcacactcaccacaattattcctgttaacagtctgccacatacctttcattttaagcaactgaaaaattgtaccaacttttctctttaaatttgctttaaaagcaaattcagaaaattggtagagggtcaagaaattacacagtccaactccattatttgataaattgtataaaaagcaaactaaggcaagaatcaactgacttccaaagttcacgaagagagcactctggaagttgataaaccaccaaaccatataaattccaccacctctttatctgtaattaaaaatcaaaggttgacttttttttttttaactactcactgtatttttagaaagatggggcagaaccactgtagaactcctaaaccccacagaacaaacagtacattctggaatgatacgccggccaatccggctggcagccgattgacctgacccaggcgagggttgctgcaccgagtatttagtttggccccctactgaatgaagacactttgttaaattctccaatgagagacgcttagaggtaggggcgtggaagggggccggggaatttgaggccagataacgggaagtgtgagccgattggccggacttctcactccacggcccagccgtttacggatcgcggaggccatccatcaaaagaattacaccaatcagcggcgaaaatgcccccttctcgcgagaaagccccgccctccaatatattcctcgttagggcaggcgcggccccttcggctccgagctgaccctgatcagggccgagttgtctcggcggcgctgccgaggcctccacccaggacagtccccctccccgggcctctctcctcttgcctacgagtcccctctcctcgtaggcctctcggatctgatatcgtggggtgaggtgagcaggcccggggagggtggttaccgctgaggagctgcagtctctgtcaaggtgagtgggactgcgcgggagttgaccgccaggtgcgggtggggagctgggttgggggcgcggggcgaggagtaggtctggcccgcgcccttttccacactaaactctaccgctgttgtgagcacaagcccaggctagtccgaggctggaggggcggagccggatccggcctcctgaggtgcctttcgtgtctgccgacccagtcccagggactagcctggggaggaagaatggaacccctgcagttagaggttcctcacatgactagctctgaagacctcctgccttcctgtctttagttggtgtgggagggaccttccatgtatccagggcttagcttgtgcccgggacatggttgtgttatgcacacttaaatcaatggaattcccaggttcatctttcagactaggttagcaacaacccaccgcacccccccgccccaatacgtgctcctaatgtcaccttttaagtttcctttcctaacaacaataaaagttaagtaatattgagtattgtgtgccaagcactgtgctatactctttaagtggtgaatcatcttgttcagtcttcacattcagcgacagatattgttaccctcattttataaatctagaaagaagctcaagctcattattattgttcagtgttttttaagcgtctactgtatgtgctaagctctttacgtgatttcattttaactcacaaatctgtgaggtaggtcataaaccttatccctactttatcaatgtggaactaagtacaattaagtaacttgaacagttcattttgttaatatgtggcagaatacttaactaccatctgcttttcactttcggtatcctgtcttacggtgttta

SEQ ID NO: 2386 - DNA, 6000 bp, Homo sapiens
ataaaatcacttgttaaaggttataaattgccaatttatattcactaggtaagcttttattttcaaaaggaacaaaggcctcttccccatttgagccccagtttcttaaactgacctgattatgtggctaaggtattattgtgaggtattgatgttttctcctgtttttccttccccttcctccccaccccttttccccctttccagagttttgttctgtggcattgccttgggtaagtacacggcagggcaaatagcagagtgacggcaaatctttcagattttcactttttcaaagtaagagagaccgaactggggccatgagaacagagacatccaactactgtgtaattcataagagtttagaaatgactccttgtgcaccctttttcaggcccttttacaaatggacttttctcacttgtgatgatctgggagagtgagagtgaggagagtctaagaagagttcaggctaattattttcccactaatctggcataggagaggctcacagagattaaattcattatggtaaatacaaagagtaatactgctttacactcgggtctgtagactgagattcacactcaccacaattattcctgttaacagtctgccacatacctttcattttaagcaactgaaaaattgtaccaacttttctctttaaatttgctttaaaagcaaattcagaaaattggtagagggtcaagaaattacacagtccaactccattatttgataaattgtataaaaagcaaactaaggcaagaatcaactgacttccaaagttcacgaagagagcactctggaagttgataaaccaccaaaccatataaattccaccacctctttatctgtaattaaaaatcaaaggttgacttttttttttttaactactcactgtatttttagaaagatggggcagaaccactgtagaactcctaaaccccacagaacaaacagtacattctggaatgatacgccggccaatccggctggcagccgattgacctgacccaggcgagggttgctgcaccgagtatttagtttggccccctactgaatgaagacactttgttaaattctccaatgagagacgcttagaggtaggggcgtggaagggggccggggaatttgaggccagataacgggaagtgtgagccgattggccggacttctcactccacggcccagccgtttacggatcgcggaggccatccatcaaaagaattacaccaatcagcggcgaaaatgcccccttctcgcgagaaagccccgccctccaatatattcctcgttagggcaggcgcggccccttcggctccgagctgaccctgatcagggccgagttgtctcggcggcgctgccgaggcctccacccaggacagtccccctccccgggcctctctcctcttgcctacgagtcccctctcctcgtaggcctctcggatctgatatcgtggggtgaggtgagcaggcccggggagggtggttaccgctgaggagctgcagtctctgtcaaggtgagtgggactgcgcgggagttgaccgccaggtgcgggtggggagctgggttgggggcgcggggcgaggagtaggtctggcccgcgcccttttccacactaaactctaccgctgttgtgagcacaagcccaggctagtccgaggctggaggggcggagccggatccggcctcctgaggtgcctttcgtgtctgccgacccagtcccagggactagcctggggaggaagaatggaacccctgcagttagaggttcctcacatgactagctctgaagacctcctgccttcctgtctttagttggtgtgggagggaccttccatgtatccagggcttagcttgtgcccgggacatggttgtgttatgcacacttaaatcaatggaattcccaggttcatctttcagactaggttagcaacaacccaccgcacccccccgccccaatacgtgctcctaatgtcaccttttaagtttcctttcctaacaacaataaaagttaagtaatattgagtattgtgtgccaagcactgtgctatactctttaagtggtgaatcatcttgttcagtcttcacattcagcgacagatattgttaccctcattttataaatctagaaagaagctcaagctcattattattgttcagtgttttttaagcgtctactgtatgtgctaagctctttacgtgatttcattttaactcacaaatctgtgaggtaggtcataaaccttatccctactttatcaatgtggaactaagtacaattaagtaacttgaacagttcattttgttaatatgtggcagaatacttaactaccatctgcttttcactttcggtatcctgtcttacggtgtttattcgtggttatctattgacagtgaataacttgaacaagtatttcttgaagatttgcattttatttttctaaaaagcatggttccgaccgggcgcggtggctcacgcctgtaatcccggcactttggaaggccgaggcgggcagatcacaaggccaggagaccgagaccatcctggccaacatggtgaaaccccgtctctactaaaaatataaaaattagctgggcgcggtggcgcatgcctgtaatcccagctcctcgggaggctgaggcaggagaatcgcttgaaccagggagtcggaggttgcagtgagccaagatcgtgccactgtactccagcctggcaacagagcgagactccttctcaaaaaaaaaaaaaaaaagcatggttccttccctctaggaactcaatttaggatgtgaccaacttgtagaagggaaataaataacagatggcactttgcaatgacttagatgcactagccgcattgggggatgggaggcttataaatcatttcttggcccagtgcaaagatggccaaggaaagcaggaaggactactcttacactccttgctggtctttttttctatatatagatgatagaggtactgacaacaactgactctcagaaactgctacaccagctgaatgccctgttggaacaggagtctagatgtcagccaaaggtctgtggtttgagactaattgagtctgcacacgataatggcctcagaatgactgcaagactaagggactttgaagtaaaagatcttcttagtctaactcagttctttggctttgacacagagacattttctctagctgtgaatttactggacagattcctgtctaaaatgaaggtatgtttgaagctacatttttgtaattttgctcagtgtgttttggagatggaattgttaccttttggctggtattcataaacttgaccttttttttttcagcacgtagccaaaacattaattttgtctactacagcattaatatttcttatcataatcaagagtagtacatcaggtattagacttaaattctgaaatgaaaaatagtctaatatcaagtaacaaattgcagtttcctagtaagaaaattggctgtttttaaaaaacccttcttgataggttggatttgtccatttatttactatttttagatataaacaaatttattagtggcagaaatttattagaggctacattgtggctaagaattaagatatatttgttaatcactacccatatataaaattgtaaatgttttagccttagacctagtcaagacttgcttatgcttggcatttccagcttcagtgtacatgcagtagggaggagagtgtgtctgaaggaggagcaactattttcctatactagataaacaagactgtcactttcagagcttaactgttacaaatgcatctgcctttcctgtacacccatggtcactggaggaaaataagatgatgtgacaattggaaggaaactcatattttagtcctcggtatctaacacagtgcatcataaaaaaggacttcaatatttgttgaagattcaagaaatttgcttcaacagactaattaagctctttagacatttcacatgtagtcattacctttgaatctgtaaatgttgcacaaatgaataatatacagctattcctcaggtataattcagtcttatgtgagaataagatcgttgctcttatgtacaagtcataataagaaaaataactacattatgcctttaaagaggcataagtgtactgctgaagagtttacaagaagagagagagcacagagatattaatactggtaaaagcttagtttcatgtgagctggaagtaaactggataaagttttgactgtgtctcatacggcagacattcagaaaattaaatgataaagattagtagtggatagaactcttagaggcagagtaaacagtatatgccatagtattttaaaactgttttatatgtgttcccacaaagacaagagcctggaaaaaatacaacatcctgcaaagaaatggcttattttgtaaataagccataaagtatttcagtcctcatatatctttgactagttaacttatttgatcaaactagaacaatgtttacttatagttctacagtgattaataaaaacacactttttctatgctgagccaaacattatactgaaactcagtccagttactcaaaaattggttctaagtggggtccatagtgttgacaggctatagtttaggtatgagtggattgtgttaagtccatcacagctgagaaataaacctcaaatatacattttcaaaatgttgggtcggagttctagattatcctttatgttttaattgaaataaggtagagtcatgggcttactggttttgtttttgattttttaggtacagcccaagcaccttgggtgtgttggactgagctgcttttatttggctgtaaaatcaatagaagaggaaaggaatgtcccattggcaactgacttgatccgaataagtcaatataggtttacggtttcagacttgatgagaatggaaaagattgtattggagaaggtgtgttggaaagtcaaagctactactgcctttcaatttctgcaactgtattattcactccttcaagagaacttgccacttgaaaggtaagtgacctttgttttgaacaagagacatttggaaatcagaatggtattgtatggatattgcataaaatcagtatcctcatagaattctaataaaaataagtaaaatgacagctgtggctccttgaactttaatgtccatcataagtgagaaaatgttccattgtcaatagcttcgttaaagctaattcttgggattaaagtacattttgactttatagaacctagtaggaaagcatctaacacaaatttatggaaaaaaaggaccttcagtggatgttgaaatatttattaaaactaaaagaaaataaatcttgtatttgtggcatagtactattcattttaattttttggcccaaatcatctaaaactcccatatggtgcctttagaagttagtatctctgatggaaggggaattcctttcaatagttcatttgctatgttaagtgtgcataagctttactttaaaaattgacttcaatgtttttctaaaaacatcttttgactagatgtagtattacctaataaaagtaataccattttctttttaaaggagaaatagcattaattttgaaagactagaagctcaactgaaggcatgtcattgcaggatcatattttctaaagcaaaggtaaatattttataaagattatgcctattgatatgatctgtttttatatttggcatttactttaaatttatctcttttagccttctgtgttggcattgtctatcattgcattagagatccaagcacagaagtgtgtagagttaacagaaggaatagaatgtcttcagaaacattccaaggtatgtgaaggacatagcctaaatcctattaacagctgtaaaagaaactaaaccccttctatctcctgaagtaaaatgagatgtcatatgtttatttgaaacttaagtagctatcctcaaatgtttttaatgagc

SEQ ID NO: 2387 - DNA, 6000 bp, Homo sapiens
cagacgcggaggcctcaacagacccaggcccagctccctctctcaagtcagacaggcgctgggtttggatctgtgtctgatgattaccagctttataaccttaggcatgtgacctttggtatgtctcctctctgagcctcttgccttgcctataaaatggggacaacaagcacctcacaggatcactgatagattcatggaatgatacctgtaatgcacctggcccagaggtgaggcctaatgagtgtcagtgaccaccctcctctcttctgacacttttcaacagtaccctttgaaacaattctaccgtttcccaaattgtgaacctactatgtgccaggcactgcatcaaaggtagtaggctggggagtgcaatgttgagaaaaacacaccccttgccctcaagctgaccaacttagaacctggggagagtacgacaaagatctaggtgacttgtacacaatcagaatatacggacaatgtcctccagacgcaggagagggagaagttggagaaaccagaggagtcttcacctggaaagactatgggggagcccagaggggccactgtctggcagggggagggggaggaatgtgagcaaagatgtgggagaggacaagaacattctaggaacacaggcccacagaattttcctggagcacaagagagaaagcaaagagagtgggaagctgagccatatagatggccgaggcccagtggcagtgagttttggatttgctaagaaatggggagttatagaaggctattgaggggaggaacccccatacagcacaggggagacaggaaaaacgccgtggtttttgaaagagggaacatgaatgtggggccctgctccctctcttgagagcaccctctttgggtgtcatccacatcaggttcttatacactgttttacttggtcctaaatggatgttattcccagtttacaaatggggaaacagaggctcagaaacggtaagctgcttgcccaaggtcaccaagcagacagtgagcgggggcctctttctgactgtcatcagcgggagctcaactcttttcttttcctgtgatcccaagagagatccaaagtcgcctttgagagcaggattaggacagggattgtgagctagggccaaccctggctacactgagtctccccagagtccctggaggtgaatgttattattcttctctccatcatgggaaggagggggtggagctcagcaccatgggggcacttactcaaggccacacattaaaggtagaaaatccaggccagctttttggggagtgtggaaccctgaacccttctttccgctactcctcactgtctccaggtttattcctaagcaggactaggtagaattgggaacagcccaggtcagaaaggcccaattctctcccctgagtcaacatccactgatttatctgcttcactccctctggcagccaggcccacaaggccagtccctcactccttctgtggttacagagaccagattatgctgggctctctttggctccatcctcagtcagaagcagcatctccactgcctggattgggggcctaggtggctacacgtttaccacttgtcgccgggcaggtgacccactggcccgagcactgtgtgttagtgggccttaaagaggagctctgcctgagttgggcccctgtccactgatgtatctcataagcagatggcttgcagtgaccttctccctggttctgaggcaagtctctgaaaggcacaggggcatgatgatatataaagaaccattctgctgggaaggggaaaccctagagatacagtgaatcataaagagcaggggtgaggtagggcctgagttccctaaaccccccatctctcacttgggcctcaaaccatctacaaagtgggccagtgtagacgcactgtacagacgtgggtttggaggctcagtaggggtcgagactcacctctgaccatccagcagcaaaatgacagggttcaagtctactctctgcactctttccagcaagggaggagagagaaaagcaggagaggccagcagacacctggctctagggccagactgcgccactactactatgataacggcattaaaaagttttcttttcttttttttttttgagacagagtcttgctctgtcaccaggctggagtgcagtggtgtgatcttggctcactgcaacctctgcctcccgggttcagcctcaggctctcgagtaactgggattacaggcgcccaccaccacacccaactaatttttgtatttttagtagagacagggtttcaccatgttggccaggatggtctcgatctcctgacctcatgatccgcccccccacggcctcccgaagtgctgggattacaggtgtgagccacagcgcccagctcttaaaaagttttctttttgaaaaatttcggtaggggaaggtataataaatgctcttggtgagaaaaaaaatgggacaaatcaagtcggtatgcagtgaaaagtcagcagctgtaacattctatgattcaacgcaaaaactatgttgagttcctcagctgaataagtagtataaacaatttctttttcttctatctctccatacagggagggcgttgcccttatctgaggacctctttgctgtcctcgaccaatgttcaaatgaaggtagaagacgcccttttaaaaaaaaaagcactccatgccctgaacttttctagaagaatccaggcagaacatttgcgcaggcgaaaacacacaagctaagcgaggcaaatgcagaagttgccactggtgatacagctcgcacagcgacgacacagggtggccagcgaaatcccctcccccaggaggggaggaaaccgcagaatgttcctgactcggcacccgggcgggtggcgcaatgtttatgtttgtgtacccagcgcgtcgcgtcgctgcagcaggctccgctgtccagggggccgtcactgggactcagggcacggagatcgctgggcggggcgggggtcttcccaagtgttgcgatccaggtcctggcaatccgcccacaatggcccgggattggattttgctttcggcctataacggccgcgacgacagggagcgagggttgtggccggcttctgttccgggttggaggcccccagcccagcgcttagtgggcgctcactgtgtatactgcctatttgtataataaagaaagggatggagaagctcagtctggagccaaggtgacagaaacgtgtcgggcggcccctggggggcgccgtcgagtcgcgctgcgggtcgcccctcacccctccaaacgccaaaccctggaatccactgcggggccttgcgacccctcaccgggatttcagccccctgacctgcctcccttggctccaagtcttccgggggccacaagactaggaatagcattatttcccggtgggagtttgcttgctcacactttcatggcaaatgtagatattttaaagccaccttaaagaaaagtctgggaaacaggaaagcattgccctgaacctctccgccccaactcgctcgagtcggtcttggtagggacgacttttctatcggcagagttgttcatttttctctaaacttcatcttaggcgcctatttgctgcccccaccccagtagtgtggttctgggcaagtcagtcgcttcgcctggggaacctcagtttccccgcctgttagtgatgaggaaatgaggaaaaggggcacaagagtatgcaaaagcacaggaagcccctttcggttcaggtcggcggccgaggggcacggggaaggggactcggggagggagagagggaggagcggcgaggccaaggcaggtggcacgtcgcccgttctcccggccgctcgcatcccggaggtcagcctcagctggcagcgagccctcctcctccccgctgggcctggagcgcggcgcgggtccggtccctggggacgcgccaagagcaggccggacagcagggcgggggccgggccgcgagccagcgcgcggcgagcggacccagctccgaggctgatgacgtctccccctctggctcggcggcgcctggcctggcagggcgggtgacgtcaccgccccgtcacgtgatcaccattcaaacaaacaccccccctccccctgcgcgcgggtctggcccgccccgtcccccagaggccgcatataaacgcgctccccgggccaggctcgctgcgaaggacatttgggctgtgtgtgcgacgcgggtcggaggggcagtcgggggaaccgcgaagaagccgaggagcccggagccccgcgtgacgctcctctctcagtccaaaagcggcttttggttcggcgcagagagacccgggggtctagcttttcctcgaaaagcgccgccctgcccttggccccgagaacagacaaagagcaccgcagggccgatcacgctgggggcgctgaggccggccatggtcatggaagtgggcaccctggacgctggaggcctgcgggcgctgctgggggagcgagcggcgcaatgcctgctgctggactgccgctccttcttcgctttcaacgccggccacatcgccggctctgtcaacgtgcgcttcagcaccatcgtgcggcgccgggccaagggcgccatgggcctggagcacatcgtgcccaacgccgagctccgcggccgcctgctggccggcgcctaccacgccgtggtgttgctggacgagcgcagcgccgccctggacggcgccaagcgcgacggcaccctggccctggcggccggcgcgctctgccgcgaggcgcgcgccgcgcaagtcttcttcctcaaaggtacgccctcggggaagctcggggcgggccgcacacccctgaggttttgcccggtacccctggctctcggctcccgggggatcgccccacctgcagcgcgtgggcgctggagtacatttatctctggaacttgtcattggctttgtttggctctggaaacaaagacttgcctgggcctttccgatgtaaacttccagcccttggtgggtgggggagttgtatgaaggtgccgtgtcccggtgtcactaatggggaaaaaaaatgtctttgtattcccaggaggatacgaagcgttttcggcttcctgcccggagctgtgcagcaaacagtcgacccccatggggctcagccttcccctgagtactagcgtccctgacagcgcggaatctgggtgcagttcctgcagtaccccactctacgatcaggttagtaggtgtccctgccacagggaagaagtaagaactggcaaaggcatggaagagtagtgccagggagaatatagaaagtgacctgcagcattatttataacggaggggacacagggatatgatttattccacagttaagtggtctgacggagccgagtctccaattgtaggctctacggaaatgaacttgctggtcctgcccaggcaaatgggcttagttccctatttatttatcctccagcaacagaactgagttcactcggtatctgaaattgacttttccagcagaaagtttttgtgggtatgggcactggccttggctttgagcaagcttgatgaatgttggatatttctggatttcagggtggcccggtggaaatcctgccctttctgtacctgggcagtgcgtatcacgcttcccgcaaggacatgctggatgccttgggcatcactgccttgatcaacgtctcagccaattgtcccaaccattttgagggtcactaccagtacaagagcatccctgtggaggacaaccacaaggcagacatcagctcctggttcaacgaggccattgacttcataggtaaatggaatggatgcctggggcttttctgcctttctcttctcattttagccactaagcccaacctctgtggcaagagcttgaagttttctgagccttcttccacacattcagtatcagtctggtgtgggcaacattcctgtaaaatatgaatttgattcgatgtccc

SEQ ID NO: 2388 - DNA, 6000 bp, Homo sapiens
tcactgtcttatataaccttcctatcagccctacaagatcgatatgattattattcccgctttaaagatgagaaaactgagtctcacagaggtaaagtaacttgcccaaatacacacagctggtgagtaagcaagctgggattctaatccaggcagtctaactctgtaacttggttttaacaacaatgctgttacctacatatgattgccttctaatcttcttttattcttcgttacaaaagttacacatttaagtttaaaaagttcaaatcattcagagtcataaggaagaaaatgagaggaactccaccttccaaagataaacactgttaagggtttggacacacagctcacacaatgctgactacggttagaatgttctgaacactgtgtgactttggacagattgcctaacctctctgggctcttgcctctcaaatgaggaggttagacaggatgacacagctctgtgggccctgccaggtctgagcatggagatctgtttgtaaagattgtgcaatggcagctagctctgtcccaactgcctgggtgtagagggtgaagtcagccccttgccagtccctcaaggtaggcctgagtggctacagagtctcttcagcagcggcactagggcctgagttgggagtcttagaaggctccaggctccctgctgggctgacaccagggaccactccgtccagcgagaagaactccaggaagctgggaggcagaggcttcagccagtgctgccagacatggggctggcagacgcggaggcctcaacagacccaggcccagctccctctctcaagtcagacaggcgctgggtttggatctgtgtctgatgattaccagctttataaccttaggcatgtgacctttggtatgtctcctctctgagcctcttgccttgcctataaaatggggacaacaagcacctcacaggatcactgatagattcatggaatgatacctgtaatgcacctggcccagaggtgaggcctaatgagtgtcagtgaccaccctcctctcttctgacacttttcaacagtaccctttgaaacaattctaccgtttcccaaattgtgaacctactatgtgccaggcactgcatcaaaggtagtaggctggggagtgcaatgttgagaaaaacacaccccttgccctcaagctgaccaacttagaacctggggagagtacgacaaagatctaggtgacttgtacacaatcagaatatacggacaatgtcctccagacgcaggagagggagaagttggagaaaccagaggagtcttcacctggaaagactatgggggagcccagaggggccactgtctggcagggggagggggaggaatgtgagcaaagatgtgggagaggacaagaacattctaggaacacaggcccacagaattttcctggagcacaagagagaaagcaaagagagtgggaagctgagccatatagatggccgaggcccagtggcagtgagttttggatttgctaagaaatggggagttatagaaggctattgaggggaggaacccccatacagcacaggggagacaggaaaaacgccgtggtttttgaaagagggaacatgaatgtggggccctgctccctctcttgagagcaccctctttgggtgtcatccacatcaggttcttatacactgttttacttggtcctaaatggatgttattcccagtttacaaatggggaaacagaggctcagaaacggtaagctgcttgcccaaggtcaccaagcagacagtgagcgggggcctctttctgactgtcatcagcgggagctcaactcttttcttttcctgtgatcccaagagagatccaaagtcgcctttgagagcaggattaggacagggattgtgagctagggccaaccctggctacactgagtctccccagagtccctggaggtgaatgttattattcttctctccatcatgggaaggagggggtggagctcagcaccatgggggcacttactcaaggccacacattaaaggtagaaaatccaggccagctttttggggagtgtggaaccctgaacccttctttccgctactcctcactgtctccaggtttattcctaagcaggactaggtagaattgggaacagcccaggtcagaaaggcccaattctctcccctgagtcaacatccactgatttatctgcttcactccctctggcagccaggcccacaaggccagtccctcactccttctgtggttacagagaccagattatgctgggctctctttggctccatcctcagtcagaagcagcatctccactgcctggattgggggcctaggtggctacacgtttaccacttgtcgccgggcaggtgacccactggcccgagcactgtgtgttagtgggccttaaagaggagctctgcctgagttgggcccctgtccactgatgtatctcataagcagatggcttgcagtgaccttctccctggttctgaggcaagtctctgaaaggcacaggggcatgatgatatataaagaaccattctgctgggaaggggaaaccctagagatacagtgaatcataaagagcaggggtgaggtagggcctgagttccctaaaccccccatctctcacttgggcctcaaaccatctacaaagtgggccagtgtagacgcactgtacagacgtgggtttggaggctcagtaggggtcgagactcacctctgaccatccagcagcaaaatgacagggttcaagtctactctctgcactctttccagcaagggaggagagagaaaagcaggagaggccagcagacacctggctctagggccagactgcgccactactactatgataacggcattaaaaagttttcttttcttttttttttttgagacagagtcttgctctgtcaccaggctggagtgcagtggtgtgatcttggctcactgcaacctctgcctcccgggttcagcctcaggctctcgagtaactgggattacaggcgcccaccaccacacccaactaatttttgtatttttagtagagacagggtttcaccatgttggccaggatggtctcgatctcctgacctcatgatccgcccccccacggcctcccgaagtgctgggattacaggtgtgagccacagcgcccagctcttaaaaagttttctttttgaaaaatttcggtaggggaaggtataataaatgctcttggtgagaaaaaaaatgggacaaatcaagtcggtatgcagtgaaaagtcagcagctgtaacattctatgattcaacgcaaaaactatgttgagttcctcagctgaataagtagtataaacaatttctttttcttctatctctccatacagggagggcgttgcccttatctgaggacctctttgctgtcctcgaccaatgttcaaatgaaggtagaagacgcccttttaaaaaaaaaagcactccatgccctgaacttttctagaagaatccaggcagaacatttgcgcaggcgaaaacacacaagctaagcgaggcaaatgcagaagttgccactggtgatacagctcgcacagcgacgacacagggtggccagcgaaatcccctcccccaggaggggaggaaaccgcagaatgttcctgactcggcacccgggcgggtggcgcaatgtttatgtttgtgtacccagcgcgtcgcgtcgctgcagcaggctccgctgtccagggggccgtcactgggactcagggcacggagatcgctgggcggggcgggggtcttcccaagtgttgcgatccaggtcctggcaatccgcccacaatggcccgggattggattttgctttcggcctataacggccgcgacgacagggagcgagggttgtggccggcttctgttccgggttggaggcccccagcccagcgcttagtgggcgctcactgtgtatactgcctatttgtataataaagaaagggatggagaagctcagtctggagccaaggtgacagaaacgtgtcgggcggcccctggggggcgccgtcgagtcgcgctgcgggtcgcccctcacccctccaaacgccaaaccctggaatccactgcggggccttgcgacccctcaccgggatttcagccccctgacctgcctcccttggctccaagtcttccgggggccacaagactaggaatagcattatttcccggtgggagtttgcttgctcacactttcatggcaaatgtagatattttaaagccaccttaaagaaaagtctgggaaacaggaaagcattgccctgaacctctccgccccaactcgctcgagtcggtcttggtagggacgacttttctatcggcagagttgttcatttttctctaaacttcatcttaggcgcctatttgctgcccccaccccagtagtgtggttctgggcaagtcagtcgcttcgcctggggaacctcagtttccccgcctgttagtgatgaggaaatgaggaaaaggggcacaagagtatgcaaaagcacaggaagcccctttcggttcaggtcggcggccgaggggcacggggaaggggactcggggagggagagagggaggagcggcgaggccaaggcaggtggcacgtcgcccgttctcccggccgctcgcatcccggaggtcagcctcagctggcagcgagccctcctcctccccgctgggcctggagcgcggcgcgggtccggtccctggggacgcgccaagagcaggccggacagcagggcgggggccgggccgcgagccagcgcgcggcgagcggacccagctccgaggctgatgacgtctccccctctggctcggcggcgcctggcctggcagggcgggtgacgtcaccgccccgtcacgtgatcaccattcaaacaaacaccccccctccccctgcgcgcgggtctggcccgccccgtcccccagaggccgcatataaacgcgctccccgggccaggctcgctgcgaaggacatttgggctgtgtgtgcgacgcgggtcggaggggcagtcgggggaaccgcgaagaagccgaggagcccggagccccgcgtgacgctcctctctcagtccaaaagcggcttttggttcggcgcagagagacccgggggtctagcttttcctcgaaaagcgccgccctgcccttggccccgagaacagacaaagagcaccgcagggccgatcacgctgggggcgctgaggccggccatggtcatggaagtgggcaccctggacgctggaggcctgcgggcgctgctgggggagcgagcggcgcaatgcctgctgctggactgccgctccttcttcgctttcaacgccggccacatcgccggctctgtcaacgtgcgcttcagcaccatcgtgcggcgccgggccaagggcgccatgggcctggagcacatcgtgcccaacgccgagctccgcggccgcctgctggccggcgcctaccacgccgtggtgttgctggacgagcgcagcgccgccctggacggcgccaagcgcgacggcaccctggccctggcggccggcgcgctctgccgcgaggcgcgcgccgcgcaagtcttcttcctcaaaggtacgccctcggggaagctcggggcgggccgcacacccctgaggttttgcccggtacccctggctctcggctcccgggggatcgccccacctgcagcgcgtgggcgctggagtacatttatctctggaacttgtcattggctttgtttggctctggaaacaaagacttgcctgggcctttccgatgtaaacttccagcccttggtgggtgggggagttgtatgaaggtgccgtgtcccggtgtcactaatggggaaaaaaaatgtctttgtattcccaggaggatacgaagcgttttcggcttcctgcccggagctgtgcagcaaacagtcgacccccatggggctcagccttcccctgagtactagcgtccctgacagcgcggaatctgggtgcagttcctgcagtaccccact

SEQ ID NO: 2389 - DNA, 6000 bp, Homo sapiens
tttctagttatgtaattagagttggaattgctgggtcataagatgtgagtgttctattttctttttcatttttttttgagacggagtctcactctgtcacccaggctggagtgcagtggcatgatcttgctcactgcaacctccgcccccttggttcaagtgattctcctgtctcagcctcccaactagctggtttaagaggctgctgctaccgtgcccggctaatttttttttttttttttttgagacagagtcttgctgttgcctgggctggagtgcagtggcacagtctcagctcactgcaagctccacctcccgggttcacgccattctcctgcctcagcctcccgagtagctgggactacaggcgcccgccaccacgcccgccaaattttttgtatttttagtagagacagggtttcaccatgttagccaggatgctcttgatctcctgaccttgtgatccacccgtctcagcctcccaaagtgctgggattacaggcttgacccaccgcgcccagcccgagtgttctattttctaaagtggcagcaccaacgtacagtgtcatcaagaatatattgtcatcacagttgctccacatcctaacatttattattgtcagactttcggtttttaccagtttggtgggtacagaatgatatttcagtgtggtttgattttgcatttccatgaatgataatgaaattgagcatctggtcataagttcctttgtcacatttgtttcctcttacgtaaaatatctgtttaagtcttttgcccatttttctatgagattatcttagttttatgaattggtaggactttattctggatactaatcatttattgattatacattaaaatatcttctctaaatttatgacatcatttcatgtattatgatgtattttaaattattatttaaaacaattttttttttgagacggaatttctctcttgttgcccaggctggagtgcaatggtgtgatctctgttcactgcaaactctacctcccgggttcaagtgattctcctgcctcagcctcccaagtagctgggattacaggtgagcgccaccatgcccggctaattttgtgtttttagtagagacagggtttcgccatgttggccaggctggtctcaaactcctgacctcagatgatccacccgccttggcctcccaaagcctgggattccaggcgtgagctactgtgcccagacaaaaacaattttttttttaagagacagtctggttgtgtcacccaggctggagtgcagtgatgtaatcatggctcattgcagcctcaacttctcaggctcaagtgatcctcccacttcagcctcctgagtagctaggactacaggttgcatgccaccacacacagctaatttgtattttttatagagacagggtgttgctatgttgcctagattggtcttgaactcttggccacaagcaatcctcccacctaggcctcccaaagtgctgggattacaggtatgagccactgtgcttgacctatgatgtcttttaatgaacagaaattattttatcaaatgtgccagttttgttttttttaatcacatacttactgtttcaaaaaatgtcagtctttttctttgtggttgcattttctgtattttgcttaagaaatctgtctctaccctgagatcataaaaatattctacattttcttctaagagttttaagggtttattttcacatttaggactttgatccacctagaattgagtttttatgtgttaaggggtattgtctttccaatttggatagccaattgtcccagctttatttatgaaataaattgttctttgcccactagtcttcagggcatcctccaccagaaagcaggtattctggatccctgtgtggatccattttgaggcccttcattctgttccatcatttgtttgtcaatctctatgtcattttcatactatcttacttgtggttgtttatagtaaatctcaatatttggaggccaagtacctgcccagaattctgctttgggcaagacttagccttccttggtcctttgctccttcatataaattgaagtttcagcttgtcaaattatacgaaaaactgcttggggcttttggttgaaatagcattaggacactgggtgcagtggctcacacgtataatcccagcactttgggaagctgaggcaggcggatcatgaggtcaggagtttgagaccagcctagccaatatggtgaaaccccatctgtactaaaaatacaaaaattagccaggtgtggtggcatacaactgtagtcccagctacttgggaggctgaggcagaagaatctcttgaacccgggaggtggaggttgcagtgagctgagatcataccactgcgctccagtctgggcaacagagtgagactctctctcaaaaaaaaaaagaaaaaaaagaaagaagaagaaaaaagaaatagcattaggacaatgtgaagataattgcctttctgtccatgaacatggtatgcatctccacatatttaggttttctttaatgccacttaatattatttataattttcttaaagaagtcttgacaactgtgcagggaaaacctctctcaaaccatgtttttcttctgctctcacaccatcacaacagtcaccaacacagcagaagacttctgtgaccaaataaatgtgtgggattttccccatacaccaagcaatggataacagctgggtgtcctccaattcaatttcaacactatctacctggagatagtgtcagataccacagagtgagggctcagttcccaagactggccatcctctcccaaccaaagaagaagagatgtgtagggtgaggtataagggaagggatgcggggtttccatgccctccctgggtacgctaccctccgggaacctccacatgttcagctacttggaagctctccaaacctcgtcctcttgggtttttatggaagcttaatgatgtcagtcagcattccttcctccatgatataggacaggaccctttctggggagggtcttaaaacccacagtccaaaagatgggggaagattagagttcttccttgaagtaagtgaaacgaggtcaggagagtttgtttcctgagacccaactcacccaacattataataaaacactgtaactagggctatgggattatgaaccaggaactgtggatgaaaatcaatacagatcataacaccacaacgacttatcttggagactttatatttgtgattgcttttgtaaatattatcttgtatccatgtataggtttcccaaaaatgtgcttatagtcaactgcatataatgtgcttttcctctccttatggtgactaacctgctattatcggacacccacatttctggttctcattttgttgcagtctcactaggtgtttagttttcccctaacaacttggggtttgggggctgggctcaatggtttaagcctgtaatcccagcacctcgggaggctgagtgggaggattgcttcagcccaggagtttgagatcagcctgggcatcatacggagaccccatctctacagaaaaataaaatcttggctggtgtggtggcacacacctgtggtcccagctattcgggaagctgaggcaagaggattgcttgagcttgggaggttgaggctgcagtgagccattatatcgctactgcattccagcctggacaacacagcgataccccatctgggaaaagaaaagaaaacaaaacaaaacaaaaatcaaataaaaaaagaatttaggggctgggcgtggtggctgaggcaggagaatggcatgaacccggggggcggagcttgcagtgagcagagatcgcgccactgcactccagcctgggcgacagagtaagactccgtctcaaaaaaaaaaaaaaaaaaaaaaaagataaaaaagaatttagggttttgggcctgacaggccttttaagatgtcttttcagagttttgcatttctgacaactggatggccctacctggacccttgactctccactcaaccagtcctgaggcctccacccagaagtggactcagtacatgaggaccattttcctcacccctacgattgcatccccacccagtcagcagcacccataccctagccccctaaactatcttcaaaaaaccctagcctccaaattttctgggaggctgatgtgcacaataatgaaactccggtttcctgttcagcaggctctgcgtgtataaactctgtctctatttccattcccctgggcagcagacgagatgaacccactgggcggttacatacctatcactgaccaaactcctcttctgtgtcttacacatgttggtggttcgatatacaaaattgttgggtagaaattgttcaatcattcattctctctctttttttttttttttttaaagagacagggtcttgctctgtcattcaggctggagtgcagtggtgtgatcacacagctcactgtaacatcggacgcctgggctcaagcaatcgagccaccccagcctcccaagtagctgtgactatgggtgggaacaaacatacccagctaatttgtgggtttttttcatagacatgggatcttgctacgttgcccgggctggtcctggactcctgggctcaagcgatccccccacctcagcctcccaaagcattggacattcttccattttatagatgaggaccctgaggttcagagagctaaagtaactcatcagagaccccacaactagaaagtacagatgcaagatttaaatccaagtctcttgctcccaggctggctttcttttcagcggtaccccagctttctcaccaagggacaaaacctcagtttaaaaagaaaataaccccaggaaaggtaacacactgatttgagctcttttacacgtcatctgtggaggtgagtaagagggtctgaaagggggcagggaaaggataaaggttaaaagagcggccggaggtaaaacagaaagtgtgcgggctgacacttttcacccaaggctgagatctgggctgggggctgggctaaacgtgggggcaggcagtggtgacgcagctaatgggaggggcagggcgggtcggtggtgaggtcagggctgagcatgacagaagccggggatggaggaagtgattatgaccaggaagtaagcctgctgaaaccacccttggagggctggcagaatattcctggcatcaattgacgtttaaaaaatagtaataactgcatcttaaaaatctctgtgccattcacgtggttattattattcctgttttacagagaaggagactgaggctcaagacagccgaggggacttgctcagggcacccggctaagacttgacaaaatccagaatgtgctaccggtcttcgtggctcctcaggcctccccttcactgtgcttcactgtgtagtcatctcgcttcctccaaatgtggccgcacaatttggagaccacacaaagatcatcagggttctgcttgatagaaaatacagaatacaggccgggcgcggtggctcacgcccgtaatcccagcactttgggaggccgaggcgggcggatcacgaggtcaggagatcgagaccatcctggctaacacggtgaaaccccgtgtctactaaaaatacaaaaaattagctgggcgtggtggcgggcgcctgtagtcccagctactcgggaggctgaggcaggagaatggtgtgaacccagcaggcagagcttgcagtgagccgagatcacgccactgcactccagcctgggtgacagagcaagactccatctcaaaaaaaaaaaaaaaaaaaaaaaaaaaaaaaagaaagaaaagaaaatacagaatacagaagaggtgatgaaaggataaagatgctggtaatcttatcattgggtggatgcagtattaacctcccctctgttctgccactccacaccccatgctctgggcacccaggacataattccctgctaaaatatccc

SEQ ID NO: 2390 - DNA, 6000 bp, Homo sapiens
tccaacctctacccaccctcttgcatcccctccacactaactgacattcatcacatattaaatcagcatttagagaaagaaatatagtcataaaatccccacccttttaggaaacaagcagacagtgtgagaattgtggagagagtaaggccttcagggttcagctgatgctgggttgtttctccatagctgtatatcctttggtaagttactgaccatctctacgccttggtttcttcatctgtttaatgggaatgatactaactacttcataggctgtcgtgagaattaaacagaagcatacatagaaagtccctggctcagtgcttagcatggcaggggcttaaaagaatgcattcctctcaccttgcgtttcctttctcagagtttatttcctactacatcagccctgttgtgtttcttacgacacaccgaaggtacaagtgctttcttgctaacacatatgctgtgttttttgagtgtgtggctttctctttggttctgcaagaattctgcaaagggtggaaaaaaactctccaagttatctgaaaaccatatacgctgacacctttacttaatttcattggtctttttcactctgtgttttgtgcacagggccgttttatccattaggcgttgtaggcaatatgcccagtgcctataagaatgtttgggagctgaataaaagatcttttgactccaaaatatgaaacacaaaaactgcaaaatagaaattaataaacatttaggtcaatgtctaggaaaccatatcatgtctgccccattaattgttttatttagggcttataactatttcatcatattagaaaacagtatgtaggttatatttttctcactttgcaaagatttctaaatatgcatcatggttgccaagaacccacaggcaatcctaaattaaataagttactcatagtcgaataatttgaaaaactgaattataaaggaagaaaaaaagttttcaatttttaacagcaaaaattctacttaatatgggattatggtttggggtaaatgaaatctacaaatgttcaaaaccaaaagcctaaaaagatctaaaatagtctcatttctctgcttcaaagatcagtgaaattgctacctgagttcatccatttcacagttgatctgcatgggaaattatatgtgcttctctgatttttctttggatgtgtcgcttttattctaactgctggaactatttgttgtacctctttctgaagatcagtttggggctaaattacaagctccatcagcacaggggccatggctgcctcctgactgctgtaggctgagcacttggtagagcatcagcccacagatagcagcccagtgaaccaatgaacaggtggaagcaagaatcaaagtgttaaatgagagttaacctttaattaactgaaaggtggttctgatcttatcacacatccaccctcacacgctgctgctcgaatcccatggttcagctcattaccatctggtatgagaggtgtcagattatatacagtcatttccctcgctgaaggaccttccagaatgtcactgcctgtgtcctgtaagggtaactattcatatacaatcaatgagcaccttgatgcaaagcatgagtgatgtaaagaagggcttatctgagagtttaacttctgtgcattttgcccaatttagacaagattagttaactcctctgtggtcacctaaggaggaaaactaggctttttttttttttttttgagtcagggtctcgctctgtcacccatgctgaagtgcggtggtgccatctcggctcactgcaacttctggctcctgggttcaagcgattctcattcctcagcctgcccagtagctgggactataggcatgcgctaccaagcctggctaatttttgtgcttttagtagagacggggttttgccatgttggccaggctggtcttgaactcctggcctcaggtgatatgcccgcttcaggttcccaaagtgctgggataataggcatgagccactgcgcctggcctaactttttctactgaggggcagaacttcctttgcatatgttatgatttacctagaatgcctttcccttctattttccctgtgaactcctatccattctttaaaacccactccaaggttcatccccctcatgaagcttcctctctgcaacccagcagtttctcccttccctatggtcccagaatgtgttgtatattccattgatctcaagggcttcttaaaaatggaatggtctgccattgcaatgtgtgtgatggtctggactggggtaagtattgctttgaggtggcacttggaaaactgaagtaatattcagatttaccaagatcctatgacatcatctttaaggaccattttctaccttccaaaatgggtcacggccaaatgttggcaggaaatgattcaaaggttttagccaggtcttccaggcccattcctgaaaggtaatgtaagaaacagaaatagattagctacaatgtttgtaccttcctagacactgagtcatcacaaattacacacatacacgtacatacacatacacatacacacacacagacacccataagctgttggctaaggaacaaggacttcccttattggaatttgaggcattgtgcaatctggttgcccagagcgacactcagatactagccaactaagtgctatatattagcagcatgacttgtctaacaacaagcaaaaaataggtttagaggaaatgaaagcttccagaaaagttaaattctgacttcacctcactttctcctgttccttgcctatacacacacaaaatacgtacacacccaaaaaatactcctagggcagagggtacttcggtttcctcatttataaatcaataaagtacaactatgttccagaattgtacatttctacataaagataatcctaatgtatatgaattgtttgcctcgatacatgggttttggggctatgcagagaactgtacttgccatctaaaatgtcacccctgaagtttcaagatacattttaatattacacaaaactggaggtcattcagctcttgaagggcaggactttatgagctcactttgaaaatgagaagttatcttttctcagacaagtcacccgagccaaagcaatgagcaaactctaacacccctccttaaaaattaacaaaggtcctttttgtttggccagtgccaaagccttcaaactcagttgcacttcgttctaaattttatagataatgcatatttctaagagtgcattagtaacttcttataaacccacaccaaagcaaacagaggttaaccctcctttttcaatgatttcatgctaaatgactgtgcttatcagagtgaagaggtaagagactgctttaatatgatgtctggctaagtaggagaacactgtgagagagagaaaacagaataaatttatttatttaatttcatgataaacaatattcgttgaacacatctttttttttatttttgagatggagtttcactcttgttgtccaggctggaatgcaatggcgcaatcttggctcactgcaacctccgcctcccaggttcaagcgattctcctgtctccgcctcccaagtagctgggattacaggtgcccaccaccttgcccggctaatttttgtatttttagtagagacggggtttcatcatattggtcaggctggtctcaaactcctgatctcaggtgatctgcccacctcggcctcccaaagtgctgggattacagacatgagccatcacgcccggcctggttgtacaaatctttaaaaaaagacttgcttgactacattgtgcaaaatgcagaactagaaactgtcagcaatcaaaagcacttcattctaactagctgtgccttaaacgttgtcaagataacttctagagagatgtgctgctcctgtttaaagtgtgtcagtgccactcacataggacaatgtgtgttcctcaaaagtcggatgtaggtcgggcgcagtggcgcatgcctgtaattccagcactttggaaggccgaagtgggtagatcacctgaggtcaggagtttgcaaccagtctgactgataccatgaaaccccgtctccactaaatacaaaaaaattagccaggcatggtggtgcatgcctgttaatccgagttacttcggaggctgagacaggagaatcgcttgtacctgggaggcagaggttgcagtgagctgagatcacgccattgcactccagcctgggcaacaagagcaaaactctgtctcaaaaaaaaaaaaaagtaggatgtaactccagtaacatttgaagagtgccaaggagtcctctctttaaagggatcctacagtatatcagttttttgaagcaaagaagcctttagcaatgccacaatcgcctctgatttatttgattaatttttgtaatacttggttttcttaaagcatggcacacttaaaccagttatttattggaatagtttttgttttcaaagtcactaccaattgaatgtgcagccttcactggtgtcattaccccatgcttccgtctcattttgcaagatagtgttagaactaaagtgggggtgaccccaaggcgccttgagccttggctccatgttagggatcccatagaggtactaccacctgatcctctccacagcctcgtgaggtgcacctcacagcatttgctgttcagaggagggaactgaggtctgagaaggaaattcacttgctgaagttaacttgctgcctccagtgagaggcaggattgatatttgagcccacgtctgtctgactccaatgctaatgatttttacatcccggctgaaggatgatattgccaagcccttaaagaagaaggcatatttggacacctcattagcaatttgggcgctaaatcataccctgttggccaggaagaattaaagttgctgcccagggctcccacctcaggtccagggagtagcctcaatactgagggaatctgaattaaggagcttggaagttccccccacctagctgtagtgggcagtttcagagtgggctgatccaggagtcctgaccaggtcagtagggtgatgtctagactccagtaccactgagaatgttgctatgttggctttctctgccacacagaaaagtcttttctttccttttcttttctttctttctttcttttttttttttttttttgagacggaccctccctctgttgaccaggctggagtgcagtggcacaatctcggctcaccacaacctccgcctcctgggttcaagtgattctcctgccttagcctcccgagtagctgggactatgggtgcgcactaccatgcctggctaatttttgtatttttagtagagacaaagtttcactacgttggcaaggctggtctcaaactcctgacctcgtgatctgcccacctcggcctcccaaagtgctgggattataggcgtgagccaccacgcctggcctaagactgtctttccaaatgacttcaaattccttcaaatgggtaacttcatttaaccaggtgggggcacctcccaaaacacaagttacccagctttcaagttgtggctctcatataaggaagtaactttctttgagagtatttacttgtgaaattataaaagtagtaaatttctggaaaatgtctaacatgtattgctagcgtaggccgcagggcattgagaaacgtataccgctgcactgctggcccagctaaccaagggtctccttcacttctttgtcattaatagcctgagtaactaactccactttagttccctcaactgtgaaatggcaagtgatgctagattatctctaatgatctttgctaaaattttatgatccagatatccttatctgattctttctcagaatcactttaacagtttaataaaaacggcctgacatcaagagtttttttttttttaaagaaaagatactcaagcattgattataaatttcaacttgacccttaagttt

SEQ ID NO: 2391 - DNA, 6000 bp, Homo sapiens
gtgttccaataaaattttatttatagacatcgaaatttgaatttcacatcattttcatgtctcatctttggtttttttcccaaccacttaaaaatgtaaaagctattcttggctcatagatgcagaactagcaacaggccttgagttggttctgaaaaggtgcatcctaacaccattttaaataaatggaaaactcactgctaaactcaaacacacgggggaatatgtcttccctgttcccttcctgggcaccaaacagaacctcatgataaacatacgttctttgaagttacatttatcttcttactcattgatgctgcaagcatttatgcacctctaaggtatacaacaggacaggggacacagatgaacaagataccaccctgttccccaagaacacacatcggagctggggaaacagacatcaacaaatcattatgagacaacgtggaaagcccttataatagggccgtgttccagtacaatgggggcatagtgaagggagggaggaattagttctgaaagggcgaggtgggcagggtgggggttgtagacaaggatacacaaaagggttagtgttgaggccaaacttgacagcagaagagtgaaggggggtcattctcagcaaaggggcctgcctgtgcaagtcaggaaggtgcaagtccgtcttggaatcagtaagttcccggcaaccccacactcccaagtatggctagagggtgggatgggggtcggcggtagagggagaaagaaagggtgggttcagatggtggtccatgccaaagtgtccagattttgcttgttaagccattgaagtgtcactagaggtttttaaacacggtagtaatgtgatcgactctgtattccaggaattaaacacgtagtgagcaacgtggaagatagatgacagcagtgagagagttaggcaaagaaactaaaaagaaatcattagaatagaccagaccaagagattcaggggcctgacctcaccaccaattgctgttataactcaaactggtggggccctgtgtgaggcactcaatctctctgagcgacagacagctctgccctctctatgagtggctggattaggtgatttccaaagtcatttcctgccctcacatgctcttcactctttgcccttcactcttagagagcagtcacgtgggttcattccaagttgtcaacagaagtatttcttctttctagcctcctcttgattttttgctgtatttatgccagtgcccagttgcagctggaaaatcattagaatggcatccggtgccatttccctcactcctgcctgcacaagcatctggaaggaagagtgcttggttgaagagcaggcaggcggcaaggatgacaggaggggatgcccaccggagtgctggcaagtgcaggaagtggaaccggaggcccagagttctagccaatttcaggagggtctctatgggaatcctagggctgctgcataaatcaattacatagcccagtttaaacatcatttttgcatctgatagtaataaatgaggaagggaattgtttctgtattcactgagacaatttgtgtttccctgaagagttttaagggcaacatactaaatgacactaataaagtaacaactatctgcattatttaagctgcattaagaccagagctcaatattttaactagtagcctgctgtccttgagtgtttaacaaaccggagagaaacagattactccctggtcaaaacactgcagaggcttcatgtcacactcaggaaaaaaatccaagctccctaccacctacctctctgagctcatcctctccatccagccctgtgtaccccacgctaagcacactagacagcttgctgcgcttagacacactaagctcgtgcctactgcgggcccttcccctgggtcacttctgtccggaatgctcatcccctagatctctgagtggctggatccctgaaactattcagatttctgcttaaatatcatctcctcagaggagcttccctgaccactttatctaaaataatacacctcctgtcccaccctggtctgttttcctccagcaattttccctgcttaatttttcttcatagcatttatcactgcaaatcatattatacattcatttaattattttcctcaactctcactagactgtaagctccatgaagatgggaactttgtctgggctactgctgtatcctcccctcctagaaaggtacctggcacatgctaggtgctctagtgataacagttcagtgagaaagctgccttatgaaagaatggcacacagagaaggggttcctccaacttcttctgaatgcctaccacacttatcaacagtagtctaatattaatactagttataattaatacaataattaaataataatctatagaatatagcaataatgtcataaaatattaacaaaatatcataaatctgatattaattaaaataataactaataacaacagtaataagaacaagcaaccatttaaggtcttacaatgtaacaagtactattaaattctatccacattatcttatttaatcctcattatgaggctagcaggtattattattttctctatttcatactgaaggacatcaaaattaagaagttcaactggccaggcacagtggcccacgcctgtaatcccagcactttgggagactgaagcaggtagatcacctgaggtcaggagttcgagaccagcctggccaatctggtgaaaccccgtctctactaaaaatacaaaaaattagccaggtatggtggcagacacatgtaatcccagctactcgggaggctgagggaattgcttgaaccagagatgcggggattgcagtgagccgatattgcaccactgcactccagcctgggcaacaagaatgaaactttgtctcaaaaaaaaaaaaaaaaaaaattaaaaatgttttgaggttccagcacaggtttacctgattccaacacccttgtgctttcctttaggcagctaactatatactgacccaagccttcttgaaatgaacttcgggtagattacatgtgtcttacttaccttacaggacagaaacaggaaagcaggagggccactagctagagaatgaaattacaaaaaaaccccagcacaaactttaggaaactgtttgaaaacattaaaataggatgggacagcactcacttactcaatgatattcatcaaacaaaacagaaaaaggattcagcttgaccacttaggaagccaaaggaatgttatctagatctcttggaggccgcaagactcatcttacagatgggaagggctttgaatcattgtcctcctttatccaggtagacaccaaaaacaatttcctgcaaactaacgactctccggtcagtctgcaggattcttaaggagatcgttacaatgcaatatgctgcgtgcttaatttgtgttcagaaaggccttgcacaatcactcaggcttatttttgctctaaggacaaatgaggagaagcaaggcctaatacaggctggaacaggtatgtcaacctcattaggatggcctggggggtcatgtccctggaatcagtgccacactgaactgcaaactaacctgccaaccctgtatctggaaaccacttttgtaggacagctgttctctcattccttttgcttagatcataaaagtagagttttcatccattgggaatttgtgtgttagacgcgaagggaatcagattctgatccaacttggtcaggaaaaaaaaaaataagggctgatttttccatccaagtcatgtagtctggttggagtgcatcccactcagggacagctattgtctggattcaccgagtctcagtcttgcccgggaaaaaggaatttttcgcctcactgctctgtccgtgagaagagttgcagaaggtgaccatttctgttttctgggtgattctctttctctatagaaatcctaaaatggaacctttatagaaattatgttctgtgcttcgctggagagagactggtctttttaaccaggctcatcaaacagtgggcattttcgttctcctggataataagtgttggtgggttaatgggtcatcctcaggacagaggtcagaaggaaaaacactgcagtgttcaaagctggagctagaaatgccagccgtcaaagaacacagaactcagtggacggtgatgatgtatagggcgtgcactggccaaccccatccgagaggtcacatctaacctttatcctcagcaaagccactgaaggtcgctcaatatgtgtgacccgcaactctgaggccctggtgagaagctgtccaggaaaacgctggtgcgtgtgctagagggttccttttcactaagggagaattgtcttccagctccttgcagactgacatcgcaaagtactttgaacgttgaaaagaacaaaaaaagcaaacagtcacacacacacaaaaagtaggcgggaggagggggaaagaaaaagggacagagagagagagaggtatcagcaggggtggttagtaaaaaggggcccggagacagaaaaccttttgttcccggagttcgtttcatgtagagattgtgaggtgaatggctttgaaacgaaatgggtttatgaaggagttgctaggtcacaggaagcgcgactgtcagactgcttttgtgaattcagtttctttaaaatttgggttaatcttaaaaagaatgtatctccttttcctgttctttctctttctgtcttcttttttggcgggggcgggaggacagagtaaggttcaggacggttccccactttctgttttattttccaccgtctgataaagcaaaaagaagcgatcacattacaagttctttgtcagtttttcagaattaggggtgggcagggcctgagcattaccttgtcccactagccaatggcggggcggcatgcaaatgaggtccgcgatcagcctgcctcagtcacaacagtgagctcagagacttgagggaggcgctgcgactgacaagcggctctgcccgggaccttctcgctttcatctagcgctgcactcaatggaggggcgggcaccgcagtgcttaatgctgtcttaactagtgtaggaaaacggctcaacccaccgctgccgaaatgaagtataaggtaagagagtgccttttacaggttaccttgcaagctgaaagctgtgcctgcgggtgtgtgcttgtgtatgcgtgttccttactgtcagtcccttgtgtgtcccggagagttctaagatgagtctcggtcactgaggttgacatgcaagcagacaagcaagcagagacccggtctttgagacccactccaggggttcacagtacacccgagtccatctgctctgaaagttgccggggaaatacctcggtgagaagttaagacttggagccgcttcacagcagccactggagatcagagggtgtctgacttgaatcgcggcaggcattggctcaagtctccttggcttccccaggcctggcttccactgccctggggaactgtaatgagaggaatgaggactgcatagtctgtctcagactggctcttagtgcaaagttttccagactttgctttaatcgtttggtctcggaaggagtatgccatatgcacttttggtgggagaaattaaaagcccagattacacagctgaggatggaaaattttgacatccttatgttatattggatgtaggaataaataagtatgagccatttcttgaaaacatttttattggagtttgaatggggtgagagtgcgaaggctcaggctggctcattgtgcctgaaagcttacagagtgtcatagtcatagtacttcagcagcattattttccaatgcattttacaccattgtttgtggatttttcttgccaaaaggatttttgacttgctccgtatattcccccctcccctttttcttttaagtcactcccatctaaggaggcaagcagcttccaggggacacaaagaaagcagac

SEQ ID NO: 2392 - DNA, 6000 bp, Homo sapiens
aagaggcaaagaagaagatggaaccaaggaactgagttaggactgccaggaaaatatggacataggtgtttgtttataagaaaagttgtggtgaaaatagaggaagggtaagttggatttccagtttaaatttctattgtcttagagaaaaaatcattgtataaaaactaaagggaacaaacagggagtgctgcagttttaactactagggatcagtaaaaaatatttctcaatttagaaagtagttaacccacagtatggcactgtgaaatggaggctgctatgagagtcaggataagggaaacgcccaaggaaggagagaggtaaacagtcagtcattgtagagaaaaaagtggatgtaaataatcccagcacttggcatccctccccgtgtctggggtcattgtcaggggcagcttatgtatatatcaggggagggttgtgatttgactttttagctaggtgattgtgaaggcaaaaaggaacaatcccaaaaatcactttatcaaatggcaaatagatctttagtatttgatccaggaatctctacccagaggtaaatcagctggatgtgaatccacatttctatgtatttagaaaacaaatggacaagattcagataaactgaggagcctcacctgttcaaccatctaaagcagcaatgcagttttgttttttacattctcgtgaataagatgttgtttccaagttgctgtttcatgtgaaaccagaacggcagtttatacagttccctcagaaaccgaggatagtacagtatgatggtttcagtatcaggttctgtttgtgtgcacatgcatgctcaagggcaagggtagtacacatgtgcacaactgcaaattggcagtggtgacatatatttatatgaatgcctgaaaatgtcttagtagaatgtacctcaaaccgatagcaaaggttctctgtgggcaaagcaagagagaaaattaaaactagggctgatgggcaaagacactttggagaacctcatctgcaatgttagttctttacaagataaatttattacttgtagattttaaaattttattttaaagttatagagaaattagcactaattaagttttaccaagtattttttgagaagtcaaagatggttattatgtagtggaagggtaggcaaacagggtgtaaaccatggagaaatacgtgtttgcaagatgcctaaatgcaatgaatgcttccaataagtcagaatctttacaatttggcatcacttctgtctttaaaagtgttcagtctttcttccttttgctcttccaggtgcccgtgttttctcaaacagctgttctatgactagaagaatggtttcatctttgccaatgttgtttgcctcctgctaatataaatttaaaatgatagctcttactatcattattaattgggtggtgatgcttgaagctgtaattcaaaggactgaagaatggacagagaatggggaacagtatggaagaaatggtgaaactgcagggatcttgaggcatcctgaaagagttcccatcatgagaccttaccccaggcataacaggaggcaacagctaggcttagagcttttagaacatgagaaaggtctagaagggataccacaggggacctgacagacagcaggagatgagaaggaaaattcttgagcagcagaagggcctcagttaagattattggggagaatttgcaaggaaacaagttgccttattaactttccccagtaagtctggatagctctggtgcatgacatgggtggaaaatggaagaacaagagcaaggaaatctacattatacacattgctgaaataggtcatggagttctggcaatgtaggagggctagagagcccaggacttggctgagggactgggagaatagacaggcaaaagacaaaggtgtcctgttaggggagagagaaaaggaggtttataagggcaagagagcagaagaggaaggtgaataaggctcattcttccatgccttccagactatcatctctcttaggggagaaactgattctcatttcttttttatttattttagcccatgttaaataatgcttttaagatcatgaattaactaatgaacagaaacagctatcttgctggcttatctcccactgagctacaggtttctggagggtgtcctgtggagcgaggtatcgagaatgcccaggaaagctcaggagacttcgcaggtatgcgatagttaatgaatgggaaaaaatgaacgggatctttttgagctctgatttcctcatctaaaaatgaaaaccacaagacaaactcccattcccaagaagggaggaggcatccattataattctagacaactttgttcttaaaatttgccagaccagcccttgagcattttcatttaaattcctcagtgggcagttgattccccatggctcatactgtcttccatcgtggaggggaatgagtcaagcaaatggaatcataaatagacacatgtgcatgcgtgcacacatgcacacacacatgtgcacacactttggccatagatttctcaacctttgagtcttctcaaattctccttacttttccttcccccatcctcatcctccactccatacaacagctgctccttggaccagacctccataacaaattcaaaacagttgcctggggtttggctactgcttcacaggtagttataaagcattttgtggtgcaagctaagattccagctaactgagatggcatgaaggagctaattaaagcagtcaagaagctggtttaaatgaagatgaaaatgtaagccctgtcctcaatggatagagtgattagaaattaaagttgtttgttttttgtcagaatcatctgtggtttgccaaaatgttgacatgcagcataacctgctactaatcaaaaagaaaataaaccaaagaagaagaagaaaatctaacactgtaagtaggaaaacagacatagaaaaccggcatctttgcaaatgggaaaaatatttaacttgtttttctaaaataagtctgatctgtttttggacaaagtctcagttcctgagtttgccttgaaggacatgctcgctcgctctctgttctgaaaaactcagcagtgggaggtccaggcagctggaagtgggaaatgaagccataggatgaagatgaaaaaacagagttcaggataataaggttgtcagtctcaagtattttatgtaaaaggagcccaagcttagcatttttaatatctctagagtgtaactgacttatgcagacaatttgatggcattaatattcaagtcatactacaaaattattaattatgttttctaaagtttgtacatttaaagttatactaattaaatgcctgatgaagaaaataattccttacctgatacggtataaggggaaaagcataaaaggacgttttgataaaacatgtactatccagacttctctacctccatcaatttattataaacactctgtattataaaataaaaacttcagagtagaataattctagctcaaatctggaatgatgtggatacatagcatgtactcaagaatggttttgtaaggagaaagaaagagaggaaagaagaataaaagcataccttgctgaatattgttaattgcacttaacaggtacaatatatgtatacaatatatacaatatatgatgattaatatcgatgttcttgtcattgatttcttcataagacccagtgtacatggcactgagctgagtgtttattgctttaagtgtggcacctttgtatgagcagaatattctttagcaagatttgaaccagctcaaacatttaaaaataaatgaatttcagagaagtcttacagaaaattaaaacaaaacaaaacaaaacaaacaacaacaacaacaacaaaagagatgccacaagagtgcaacatacatgagctgagtctgatgggtgggaccaagggcagccctttctttgtcttcatgatggagcaggaaggagttgaagcagaaacatcaagcaccacaggatcatttggggaacatccattatcaaaccacctctctctctttcctctcaaccctctatgtccccaagtcgtttgctaggcatgagcaaggagtggaaaatgaggaagggtaggaaaatagcaaagatctcagctgataataatacaaagttgccacgaatgatcacggcaaacacttatattgcgcttactctatttgtgccaggcattcttggagtgctttacatgtactaattcacttaattctcacaacaatcctgtgactgttcccattttacagatgaggaggccgtggcacagaaaggccagaagtgtttaaagagcagagccataattcaaacccaggaggcttgtctcagagccacttgtctgctacttgaaagcacagaatgaagaagacaaagggtttgggctttcgaattcccttctacatacacagatctaggcttccataccacattgtaagtaggaaactctctgagcacctagcctctagcatggtgtctattccagtgtacaagctcaataagtacttgtcataggaaagaatgtttcatgtcaattaatagtggaaccctttgcaacatactgagtccataaaaccataaaatcccaattcagttggcttggaaatagcctaacttttgcttcagtgcggcctaggagggagcttatgccacttagaagaatacattttgacaaatttccttgcaatacgaatttaaagatcacctacctttctaaaaatagcaaagaggccagatgagaacaagctttcttacctgtccctaaactacaaagtgtcctcagcgaatcagaaagtatgacagagaaaaaaaagaagaagcacagagaggaaatgaaccaagacaacatcacctcacagcaaccggaaggaaaaacacacacatacatatgccactcacatccgacgtgtgtggttgctcagtagggaaatgcttacagctgcctctagaagcaagtccgctcgctgcatggagagggaaacatgagcatgcagcaggactagctgtcacctcccgcccgcctgcccagagagggccagagcgtcggggaggcaagatgatccaccagcggttccatcctacacttgggtgagttctcagccacttgctgtggcctgtgggagaggagggactcattcaggctcctacttcctgagttggtgccagacatctggtggtgtttccccactgtgaacactcctcaactggggcagggaggacctccacatgccccagaagaggaatgagtgactcccggtctccaagttgacctggaggtgctggttttagtgcaacattcaaaccagcatgatttctacttatgaaattgttctgggtagatgcttcctggtgtgtaagtacatggcccctcccctcttcctactgtcgtcagagagcttacctgacagcaactaagcttttatttttcctgaattatttcagtacttcaaagtgtgggccgtcacttattctttatggtggattagaatcatttacgtccttttcagcctctttggacatgagtcctgactggcgagaaatggtgactgaggattggattctgtgcgtgtcctatccctgtagtcattaggatcatctccaaggggctgaggacaagtgacagcacactgtgttctccctgtccatagtgagccgcccaagagctccacccttacttttctctatgtttattctttcacttagcccattcattcatttcttccttcattcattcattcaattgcctttcttccaccaaggacttgaggcaaattttttatcttgctgaaattttttcaaaatgaagaccatctgtaatcataaaggggacaatcgttctgaaagggttatacataattctaagctatgcagagatcggccaccaatcttttccctttgcttgtgttgagaagtgagagtaggcgctctagtcatttaaactcctgca

SEQ ID NO: 2393 - DNA, 6000 bp, Homo sapiens
actgttgaatagcattgtttcttggaagttgtttctgtagattttatgcatgttggccaaattgtatttctagatgaaaatgaagactttcagagaagattgtaatgtcaaactctatctatagatagtatgtatatacatatatatgtacatgtatatatataaacatttggtgtatgtgtgtgagtatgagcgtgtgtatgcaaaggaatccagagctcatgtaaacaggaaggataaggagcaagagggatatcagaaacatacatcaaggcatttaggcgttgggggagggggcacgggtcagggggcaattctagctgtagcaacgggaagttatggaagtccaagggtatacacatgactctggctcttagtctccagtgctcaaaggaattttctggaagggcttgtgaaaagcagattcttggggcctgccttaaaggattctgattcatttggttgaagtagagctcaggaatctgcatttttataagctccttaggtgagtctgtgtctgccggtaagtcatatgttgaaaactcttcggtagggtctatagctcaggctagcagttagtatcgttgatgtccagcaaggaatgataccttggcaggaataaaaaacaagatgggggccaggtgcagtgtttcacacccgtaatcccagcactttgggaggccgaggtgggcaaatggctcgagtccagtagttcaagaccagcccaggcaacatggcaaaaccccatttctacaaaaaatacacacacacaaaaattagccggccttggtggtgtgtgcctgcagcccagctacttgggaggctgatgtgggaggatcactcagcccaggaggtggagattgcagtgagccctgatctcattgccactgtactccagccttggcgatagagcaagaacctgtctcaaaaaaaccaagatgagtaagagttgacaggtttgaagtttcaggtaggcaggataacaggctgtgttcgtttcttaggctgccataaaaattactacagactaggtggcttaaaacagtagaaatttattccactaccgttctggaggctggaagtccaaaatcaaggtgttggcagggctctgctccctccagaggctctaggagagattctgttccttgcctctcccagcttctggtgactgttggcattccttggcttgtagccactcactccagtcactgcctccaacttcacatggctttttcctcctctctgtgtgtgcctcctctgggtgtcccctctaaggatctttgtcattggatgtaggggccaccctagataatccaaaatggtcttatcctgagatccttaccttagttacatctacaaagaccctttccccacaaatatcacaatcacagattctagagattaggatatagatacatcttttggggtgccaccagtcagtcaaccacacaggcctattctgggaaaactagaagtcttggggcagtcagagcaagggaaagaggggtaattgttggcaaaaacatccggttctacttctagaaaaatttgtcttcaagggaaggtgaggagggctcagactgaggaaccagccagatgctggtcactaatagatcagcaggttggagtgggatagacagtagagctgactttatgttattattctgagtttctgagtcaggattctatgattgcaactaaccaggacatggctgcactcctagtatgggacaaagctaagctgccctagccagtggacatccaggggctctaggaagattagacgctgagagtcaggttggacaaagagctgcaaagcaggatcacacatgtaagtagattcataaatagctgccacttattgggcatttgctatatgcctggcactttacatgtattattgcctctttccatcaaaacctagcaatatgggtgtcgaaatatgggtctccatttgacatataagaaaacagacttttttatttttattttttgagacagagtcttgctctgttgcccaggctggagtgcagtggcatgatcatggctcactgcaactccgcctcccaggtccaagtgattctcctgcctcagcctcccgagtagctgggattacaggtgcatgccaccacgcctgactaatttttgtatttttagtagagaaggagtttcactatgttggccaggttggtcttgaactcctgacctcaggtgatccgcccgccttggcttcctaaagtgctgggattacaagcgtgagccaccatgtccagcctaatatttgtattttcagtagagatggggttacaccatgtttgccaggctggtctcaaactcctggcctcaggtgatctgccctccttggcctcccaaagtgctgggattacaggcgtgagccaccacccctagctatatagctagtaaatggcagagccagaatttaaacccagatcactctgactccaaagctcattctttctgctaaaacatgctacctcttccacaaattaatagcctaccttggatttcagcatcttatcttccactatcttctctctttgaactcttctctccacctactcatcctagagttcactagacataaagtgtcaaaacatctgtttctctaccaaataccctatattaaaaaaacttgggtaaggtagaatgataaatatctgaaagctttctaaagcagaattgcaggtgtgggtctagagtgtgaacacttgctttcttgtggctgtgtcgtatttatcttattgcaatcacttgtggggagctcaagccaggattctatgcacagccccagtcccaggctggtctctaatcataaggcgcaggtctataattactgtgtatgttgcaccactcctccctcacaacccccactactgccaccaaatgcaagctgccagtgatgctctgcagatggtaatatccaagtagtgacagtactagtttcttccacaggtatatccatagaggaaagcaacattgatggaacaagagcagggaagctgctggtatattacacttctagctcatgccctttgagtaccacttaatctgccctaaagatagtgtcacttctggccaggcgcggtggctcatgcctgtaatcccagcactttgggaggccaagggaggcggatctcctagggtcaggagttcaagaccagcctggccaacatgatgaaaccctgtctctactaaaaatacaaaaattagctgggcgtggtggcacgtacctgtagtcccagctactcaggaagctgaggcagaagaattgcttgaacccaggaggcagaggttgcagtgagctgagatcgtgccatggcactccagcctgggcaacaacagcaagactctgtctcaaaaaataaagatagtgtcacctctaccagtgtcgacaaatgtttagggctatggatcctcaactagcctgaatgcaagactaaaatattcctgagcctggtgcaaggtttaatggaacttttaactcatctgtttcagaaaaggtaacaaggctaaaatattaaggagtcctagcctgatctgacacatcttgtcaggtgtttcatagcactctgagtaagagttttgggaaattaataatagtaataaaaatcttgtgaaagggctcaaggtgttgcaatcctcatcacctatgagcaccaattctgcagctgttttgcacgtaactataaattatgatctagtctctacatacataacttcccccacattcctgcaggggtctcttttcctgctcaatctcaggagcaagctttaattttaagacccatgaatacttgaacaaattcaggagtcagtttgacacatcattttatatttttctgatgacaatttctagtttactttttaaaaaaagacactattttaaaaatactttgggataggtttgagtcgttgtgtttgcttccagtcagagaacttcctacaaaactgaagatataaagtgctgatgcctgggcgtgcctgcgttcgttgggggcacgacgtcatcgtgggaagcgtgtactttttcggattactgcttggcggattagaaacccgtagatcagttctaggttagccctgattaactgccctgggtgtttctgggccagagggaatgtctgctggattcaaaccaatatccgttgtaagacaaaagagttaatttgtactttacccctatccaggctaataatgaaggtaccgggaatgatctggaatgttaactggtgcccgcaatcgcgtctgctgaaccttctgcccccacgattctgtctgcccacatgcttctgtctatcagccccggcctcgggatcagctctcgccgcgtcattggttggatttcaggaagggagaagcccacgatttaaagggctccttttgcacctgccagacatcgtccgcatggtccaacttgcctttggcacgtatctggaaaaatctcctgcgctgttcgtttattgcactgactggtcaaaggaaagagtgttcccttagtcaccttgacaatttccaaaagcgaaacttgggctctagactagatctacactgagtctgcggggcgcggagtccctgcccaggtcagtagcgccggcccggcgggcgggcggggacaggggcggagcctaggccaggcgtggtcttccgtgggagagaaggaaattctttgccccaccccctaaaaactgctcttctgccagccaatcaaggaggcctatgcaaatagggtccctgtcgccccggtaaccatgatgcacggcagccaatggaaaccagcaagtcgcggccctgctccatgattgggactgaagtaaggaggtagcggcccaatgggctgtgggaacggtcctcggcgggttgaggggcggggatatgcaaatatggtttgaaaagccggcgggaaatccgagtttcgcgggaggaccttggcgcgtaaaccgtatcccttcattcattgtcagcagcagcttcctggagccatttttcagctgccggccgcagcacccgggctgccgccgccgcctcgcaatccgttgcatcggccgcccccgacgcctccatccccgcttggggcccgatatccgtgcggccgggaccctcctctctccagagccccgattatttttggcccccggggcctgtgcggtgcggaaaaataaaaagaaaagagagagagggggctcggaagcgccgggcggggaggagagaaggaggagagacttggaaactccgactgcaaataataaagaaattgaaaacaatacattaatataccataacactaaaaagagcaggagcgagagatgagaaagggaatccagcccgctctggagcagtacctggtgaccgccgggggtggggagggggcggctgtcgtcgccgccgccgctgcagcctccatggacaaaagggcactgctagccagccccggcttcgccgccgccgccgccgctgccgccgccccgggcgcgtacatccagatcctcaccacgaacacttccaccacctcctgttcctcctccctccaaagcggcgccgtagccgccggccccctcctccccagtgcccccggcgcggagcagaccgccggcagcctcctctacaccacgccgcacggaccctccagcagagccgggctgctgcagcagccaccagcgctgggacgcggcggcagcggcggcggcggcggccctccggtaataccctccctccccaccgtccccagccccggcgggaggtgggctcgcaccgcgcggggtcgtgggcgcgctgcgggccgctcggggagagcactgggccgagcatcgtgggcctcgggggctgcccctccaacgagggttcattgttagacctgagtgctcttcccggcgccaggagggtcggggggctcggccaggcgcgcggggcggcggggattgccttggcgcgaaccacatcaaacactccaaaacttttcgcggcccccccttcttttcctgc

SEQ ID NO: 2394 - DNA, 6000 bp, Homo sapiens
tgggcaaatggctcgagtccagtagttcaagaccagcccaggcaacatggcaaaaccccatttctacaaaaaatacacacacacaaaaattagccggccttggtggtgtgtgcctgcagcccagctacttgggaggctgatgtgggaggatcactcagcccaggaggtggagattgcagtgagccctgatctcattgccactgtactccagccttggcgatagagcaagaacctgtctcaaaaaaaccaagatgagtaagagttgacaggtttgaagtttcaggtaggcaggataacaggctgtgttcgtttcttaggctgccataaaaattactacagactaggtggcttaaaacagtagaaatttattccactaccgttctggaggctggaagtccaaaatcaaggtgttggcagggctctgctccctccagaggctctaggagagattctgttccttgcctctcccagcttctggtgactgttggcattccttggcttgtagccactcactccagtcactgcctccaacttcacatggctttttcctcctctctgtgtgtgcctcctctgggtgtcccctctaaggatctttgtcattggatgtaggggccaccctagataatccaaaatggtcttatcctgagatccttaccttagttacatctacaaagaccctttccccacaaatatcacaatcacagattctagagattaggatatagatacatcttttggggtgccaccagtcagtcaaccacacaggcctattctgggaaaactagaagtcttggggcagtcagagcaagggaaagaggggtaattgttggcaaaaacatccggttctacttctagaaaaatttgtcttcaagggaaggtgaggagggctcagactgaggaaccagccagatgctggtcactaatagatcagcaggttggagtgggatagacagtagagctgactttatgttattattctgagtttctgagtcaggattctatgattgcaactaaccaggacatggctgcactcctagtatgggacaaagctaagctgccctagccagtggacatccaggggctctaggaagattagacgctgagagtcaggttggacaaagagctgcaaagcaggatcacacatgtaagtagattcataaatagctgccacttattgggcatttgctatatgcctggcactttacatgtattattgcctctttccatcaaaacctagcaatatgggtgtcgaaatatgggtctccatttgacatataagaaaacagacttttttatttttattttttgagacagagtcttgctctgttgcccaggctggagtgcagtggcatgatcatggctcactgcaactccgcctcccaggtccaagtgattctcctgcctcagcctcccgagtagctgggattacaggtgcatgccaccacgcctgactaatttttgtatttttagtagagaaggagtttcactatgttggccaggttggtcttgaactcctgacctcaggtgatccgcccgccttggcttcctaaagtgctgggattacaagcgtgagccaccatgtccagcctaatatttgtattttcagtagagatggggttacaccatgtttgccaggctggtctcaaactcctggcctcaggtgatctgccctccttggcctcccaaagtgctgggattacaggcgtgagccaccacccctagctatatagctagtaaatggcagagccagaatttaaacccagatcactctgactccaaagctcattctttctgctaaaacatgctacctcttccacaaattaatagcctaccttggatttcagcatcttatcttccactatcttctctctttgaactcttctctccacctactcatcctagagttcactagacataaagtgtcaaaacatctgtttctctaccaaataccctatattaaaaaaacttgggtaaggtagaatgataaatatctgaaagctttctaaagcagaattgcaggtgtgggtctagagtgtgaacacttgctttcttgtggctgtgtcgtatttatcttattgcaatcacttgtggggagctcaagccaggattctatgcacagccccagtcccaggctggtctctaatcataaggcgcaggtctataattactgtgtatgttgcaccactcctccctcacaacccccactactgccaccaaatgcaagctgccagtgatgctctgcagatggtaatatccaagtagtgacagtactagtttcttccacaggtatatccatagaggaaagcaacattgatggaacaagagcagggaagctgctggtatattacacttctagctcatgccctttgagtaccacttaatctgccctaaagatagtgtcacttctggccaggcgcggtggctcatgcctgtaatcccagcactttgggaggccaagggaggcggatctcctagggtcaggagttcaagaccagcctggccaacatgatgaaaccctgtctctactaaaaatacaaaaattagctgggcgtggtggcacgtacctgtagtcccagctactcaggaagctgaggcagaagaattgcttgaacccaggaggcagaggttgcagtgagctgagatcgtgccatggcactccagcctgggcaacaacagcaagactctgtctcaaaaaataaagatagtgtcacctctaccagtgtcgacaaatgtttagggctatggatcctcaactagcctgaatgcaagactaaaatattcctgagcctggtgcaaggtttaatggaacttttaactcatctgtttcagaaaaggtaacaaggctaaaatattaaggagtcctagcctgatctgacacatcttgtcaggtgtttcatagcactctgagtaagagttttgggaaattaataatagtaataaaaatcttgtgaaagggctcaaggtgttgcaatcctcatcacctatgagcaccaattctgcagctgttttgcacgtaactataaattatgatctagtctctacatacataacttcccccacattcctgcaggggtctcttttcctgctcaatctcaggagcaagctttaattttaagacccatgaatacttgaacaaattcaggagtcagtttgacacatcattttatatttttctgatgacaatttctagtttactttttaaaaaaagacactattttaaaaatactttgggataggtttgagtcgttgtgtttgcttccagtcagagaacttcctacaaaactgaagatataaagtgctgatgcctgggcgtgcctgcgttcgttgggggcacgacgtcatcgtgggaagcgtgtactttttcggattactgcttggcggattagaaacccgtagatcagttctaggttagccctgattaactgccctgggtgtttctgggccagagggaatgtctgctggattcaaaccaatatccgttgtaagacaaaagagttaatttgtactttacccctatccaggctaataatgaaggtaccgggaatgatctggaatgttaactggtgcccgcaatcgcgtctgctgaaccttctgcccccacgattctgtctgcccacatgcttctgtctatcagccccggcctcgggatcagctctcgccgcgtcattggttggatttcaggaagggagaagcccacgatttaaagggctccttttgcacctgccagacatcgtccgcatggtccaacttgcctttggcacgtatctggaaaaatctcctgcgctgttcgtttattgcactgactggtcaaaggaaagagtgttcccttagtcaccttgacaatttccaaaagcgaaacttgggctctagactagatctacactgagtctgcggggcgcggagtccctgcccaggtcagtagcgccggcccggcgggcgggcggggacaggggcggagcctaggccaggcgtggtcttccgtgggagagaaggaaattctttgccccaccccctaaaaactgctcttctgccagccaatcaaggaggcctatgcaaatagggtccctgtcgccccggtaaccatgatgcacggcagccaatggaaaccagcaagtcgcggccctgctccatgattgggactgaagtaaggaggtagcggcccaatgggctgtgggaacggtcctcggcgggttgaggggcggggatatgcaaatatggtttgaaaagccggcgggaaatccgagtttcgcgggaggaccttggcgcgtaaaccgtatcccttcattcattgtcagcagcagcttcctggagccatttttcagctgccggccgcagcacccgggctgccgccgccgcctcgcaatccgttgcatcggccgcccccgacgcctccatccccgcttggggcccgatatccgtgcggccgggaccctcctctctccagagccccgattatttttggcccccggggcctgtgcggtgcggaaaaataaaaagaaaagagagagagggggctcggaagcgccgggcggggaggagagaaggaggagagacttggaaactccgactgcaaataataaagaaattgaaaacaatacattaatataccataacactaaaaagagcaggagcgagagatgagaaagggaatccagcccgctctggagcagtacctggtgaccgccgggggtggggagggggcggctgtcgtcgccgccgccgctgcagcctccatggacaaaagggcactgctagccagccccggcttcgccgccgccgccgccgctgccgccgccccgggcgcgtacatccagatcctcaccacgaacacttccaccacctcctgttcctcctccctccaaagcggcgccgtagccgccggccccctcctccccagtgcccccggcgcggagcagaccgccggcagcctcctctacaccacgccgcacggaccctccagcagagccgggctgctgcagcagccaccagcgctgggacgcggcggcagcggcggcggcggcggccctccggtaataccctccctccccaccgtccccagccccggcgggaggtgggctcgcaccgcgcggggtcgtgggcgcgctgcgggccgctcggggagagcactgggccgagcatcgtgggcctcgggggctgcccctccaacgagggttcattgttagacctgagtgctcttcccggcgccaggagggtcggggggctcggccaggcgcgcggggcggcggggattgccttggcgcgaaccacatcaaacactccaaaacttttcgcggcccccccttcttttcctgcacttttccctacccccactctcccttcccctccaactcgaagcttcctctttctcgggcgtaggaaggggtcacgccccggatggagaagggggtgggggagggagtagtgaactggggtgtggggggctctgaggggttgaaaccgggggactgttggggtgctagcccccagtcggccttggaggctcgttggcggccgggggtccctgcggcgtgctcggagcgcaggggatcggcggggctgcgcttgacacattttaggatctgtaactcccggcaacaaaggggctgggggaggtggaggggagtcgggcgtgggggaggtggggctggaagccgggtgcggactggggcgtgggctgtctggggtgaggggctcgcgggctggcgctctggcctgggcgcatcctggcagtggcagcggcggcgcccgcgtggcccaagcgcccaggccttcctcgccgggccccgggcctgcccttgacccgcctctccccttgccccttccttccccgccctgtccccctctccgccccccggcgacggagggcgggggcagctgggttcccgtcccgccgcctgggtctgtccctctctccgggacccgccggtgacgtttcgcacacgtgcgcgcaggacgcgcctgtgactggggaggaggcggcggcgggagggggcgctggag

SEQ ID NO: 2395 - DNA, 6000 bp, Homo sapiens
cgcccttggtactgattatagtggagctacctgtagtgcccaagtctgggcactgcattatattaaaacttccattttggggtatgtagtgactaaaaattgtctcccagcttaaacttggcatcaaccatatatctcagcagaagcaagattattgagtatagaaccacaggaacccggcacttttctttttataattgtacaggaaaagagaccctgctgaaatagcacctatggttctccattcttagatgaaaatttcaagcactgagggctctttcccaaagtagaatcagtaggttgctatgactgtgacaggacatagtctcttacattattaaatcccaaattttctagaataaaataatttcagcttctttttagaagcagcagcagaaaatgatgaagccttgtctgctccattgagtagcacttctgactatggtttctctggagttcttacatttccaacagttcaccaactaagatggaatttgtctaatgcatgtctctgacatggtgaagattgagagttcaggtctaacaaaagccgctaagcataaactgcacccaaaagttggcaggtctgtggaatcatggacggagtggaactcaggcaaaaaagtgaggatgatgtggccttgaattgtcacaattcaaggcatatgcttggcagttcaacaccactatctctatataggcgtgtcttactgaaatgtccctattttacccctaggatggccatgttttatatatttaaaagcccaaattaattgggcataaataattaattacagatcacttaaagacttttaacagttctcttcatatatgtaaacaaagggacaatgtgcacctggccttacactatttcactaagtcagaaaaaaattaacatttgtataataaatatgaattgtactgggtgtctactttttgccaggcactgtgctaaatagttcacatgcattatcatatttaactcttcaaaagaaccttaaaggtgacactgtttttgtccctatgttacagaggaagaaactgagttgagagattaagttatttgccaatgaacatacaatttgtaaataatagatgctttacagctggtaaggtagtactcatatttttacccccattgaaaaaaaggtgaagaagttgcttctggttaagtccttagatattcttgagacagaacttgggatcagaaccagataggtctgcaactctggccacctgaagacttttcaacctcttcttggacacagagtgtttaggtggtctttgttcagccaatcacttagctttccccatcctgtctttcctgcttagggaaagaatatcaacaaaattcaaaattcgaagacttacatggaagtctaatataatttcgataagaaaaacaataaatcaaactttatattcagtgcttaagactttgtatgcattgactagataaatttcctacaccctcccagaagaaacagctccttttttgagacggaatctcgctctgccgccaggctagagtgcagtggcgggatctcagctcactgcaacctccgcttcccagggtcaagcgattttcctgcctcagcctcctgagtagctgggattacaggcgcgcaccaccacacccagctaatttttgtatttttagtagagacggggtttcaccatgttggccaggatggtctggatctcttgaccgcgtgatccgcccccctcggcttcccaaagtaccgggattacaggcatgagccacagcgcccggccagtagaaatagctcttaaaagtgtagataaccggccaggcgtggtggctcacgcctgtaatctcagctactcaggaggctgaggcaggagaatgcttgaactcgggaggcggaggttgcagtgagccgagatcgtgccattgcactccagcctgggcgacagaatgagactccgtctcaaaaaaaaaaaaaaaaaaaatgcagataaccaatgattcagcatacattgcaatcatataaaaaatgcttctgaatatgtatatgagtaacatttatattcctgtaatgaaaaaccttttgtgtgcacataaactcaaaaggatattattattcctggaataataatttcatgtcaaggagaataaagttttgaaataacttggaagatggtgagggtaatttagtatactttaaatacttaaatacaatgaactagatataataaacctggcttgaaagatagtcttagggacctggcccaacaaacactgttaaaattttttaaaaatcaacttgaagctctcataatttcccattatcaaaactaccccctgcaaatctgtgaatctaatccaagaagtatgtcaatagctggttgtttaaggttaggtttatgaaatagtaacagaactgtgcaggggtcaaatatgcttaaaatatgtccaaacatgcttaggtcaagtcagtaagagtatctgaagctaataaaagcatggaatattcttgcgactgaaaacccagcacaccggatactgctatgtctaagcaggtactgtgctccgtttcccccctgctggcagaccctagtcactaaaaaacgatgagcttctttgactaagactacatcacacatgcccagcaagtatctctggggctggaaagcagttaagaccgaacccggggagaaactgggaacaggaaagaaataaaaaacgcctcattattcccaaacccatcccatttcccaaagtgctgcctatgtgctgactttcttaaagactcccgcaaaatcttgattctccaaaaattaaacccatttggagctgagacaaggtgaggtccacgcctggtataatcaggctaccatggatctaactgagtctggttcggttctagccccgtggaggccaagcctcaccacgagggtgaagacccggaggcatggaggaagggaatgaaggagagaaaaggagaaaggggagacctccgggccacacttctttctagtaccaacaaaaagagaagccgcatactgacctaaatcatctctcaaaggcgctttataaattacagggacaaagggagggggtggcgggtggcctgggaatcctacagacaccctaccctctgacccacccccctccccctccagcacaagggaaggaagacagaaaacagagctcaactcggccattggcgagaagccccctccggttttctatcgcccatccatccgccccctagaaaaaaaatccacgtaaacaccatacccaccccctggggcagacactcccgccccgaggttcctagaaccggaggccggggcatttacttagttagatttttcttgcttactcatttccctcgagcacccaaccccccgttcccactccaaaaccccgctcaaccgcctaccctcaccgcttcagcccccaacagaatccggtgcccccgcggcgtcggcggcccccgagccgtcccggtcactaacctgctgctgtaagggcatttccgaaaccagcctggctccggggggaggtggggggccggctggagagggggcccggagggccgaacagaccggcggcgcagggcgagggcgggcgccggtgggggggtggggagaggagagggagggtggcggtgccgggggcgggtgcgagggcgccgggaccgtcccaggccagggagccggcgagcaggaggaagtgggtgcccccctctccccctccagcgccccctcccgccgccgcctcctccccagtcacaggcgcgtcctgcgcgcacgtgtgcgaaacgtcaccggcgggtcccggagagagggacagacccaggcggcgggacgggaacccagctgcccccgccctccgtcgccggggggcggagagggggacagggcggggaaggaaggggcaaggggagaggcgggtcaagggcaggcccggggcccggcgaggaaggcctgggcgcttgggccacgcgggcgccgccgctgccactgccaggatgcgcccaggccagagcgccagcccgcgagcccctcaccccagacagcccacgccccagtccgcacccggcttccagccccacctcccccacgcccgactcccctccacctcccccagcccctttgttgccgggagttacagatcctaaaatgtgtcaagcgcagccccgccgatcccctgcgctccgagcacgccgcagggacccccggccgccaacgagcctccaaggccgactgggggctagcaccccaacagtcccccggtttcaacccctcagagccccccacaccccagttcactactccctcccccacccccttctccatccggggcgtgaccccttcctacgcccgagaaagaggaagcttcgagttggaggggaagggagagtgggggtagggaaaagtgcaggaaaagaagggggggccgcgaaaagttttggagtgtttgatgtggttcgcgccaaggcaatccccgccgccccgcgcgcctggccgagccccccgaccctcctggcgccgggaagagcactcaggtctaacaatgaaccctcgttggaggggcagcccccgaggcccacgatgctcggcccagtgctctccccgagcggcccgcagcgcgcccacgaccccgcgcggtgcgagcccacctcccgccggggctggggacggtggggagggagggtattaccggagggccgccgccgccgccgctgccgccgcgtcccagcgctggtggctgctgcagcagcccggctctgctggagggtccgtgcggcgtggtgtagaggaggctgccggcggtctgctccgcgccgggggcactggggaggagggggccggcggctacggcgccgctttggagggaggaggaacaggaggtggtggaagtgttcgtggtgaggatctggatgtacgcgcccggggcggcggcagcggcggcggcggcggcgaagccggggctggctagcagtgcccttttgtccatggaggctgcagcggcggcggcgacgacagccgccccctccccacccccggcggtcaccaggtactgctccagagcgggctggattccctttctcatctctcgctcctgctctttttagtgttatggtatattaatgtattgttttcaatttctttattatttgcagtcggagtttccaagtctctcctccttctctcctccccgcccggcgcttccgagccccctctctctcttttctttttatttttccgcaccgcacaggccccgggggccaaaaataatcggggctctggagagaggagggtcccggccgcacggatatcgggccccaagcggggatggaggcgtcgggggcggccgatgcaacggattgcgaggcggcggcggcagcccgggtgctgcggccggcagctgaaaaatggctccaggaagctgctgctgacaatgaatgaagggatacggtttacgcgccaaggtcctcccgcgaaactcggatttcccgccggcttttcaaaccatatttgcatatccccgcccctcaacccgccgaggaccgttcccacagcccattgggccgctacctccttacttcagtcccaatcatggagcagggccgcgacttgctggtttccattggctgccgtgcatcatggttaccggggcgacagggaccctatttgcataggcctccttgattggctggcagaagagcagtttttagggggtggggcaaagaatttccttctctcccacggaagaccacgcctggcctaggctccgcccctgtccccgcccgcccgccgggccggcgctactgacctgggcagggactccgcgccccgcagactcagtgtagatctagtctagagcccaagtttcgcttttggaaattgtcaaggtgactaagggaacactctttcctttgaccagtcagtgcaataaacgaacagcgcaggagatttttccagatacgtgccaaaggcaagttggaccatgcggacgatgtctgg

SEQ ID NO: 2396 - DNA, 6000 bp, Homo sapiens
gtattattgcctctttccatcaaaacctagcaatatgggtgtcgaaatatgggtctccatttgacatataagaaaacagacttttttatttttattttttgagacagagtcttgctctgttgcccaggctggagtgcagtggcatgatcatggctcactgcaactccgcctcccaggtccaagtgattctcctgcctcagcctcccgagtagctgggattacaggtgcatgccaccacgcctgactaatttttgtatttttagtagagaaggagtttcactatgttggccaggttggtcttgaactcctgacctcaggtgatccgcccgccttggcttcctaaagtgctgggattacaagcgtgagccaccatgtccagcctaatatttgtattttcagtagagatggggttacaccatgtttgccaggctggtctcaaactcctggcctcaggtgatctgccctccttggcctcccaaagtgctgggattacaggcgtgagccaccacccctagctatatagctagtaaatggcagagccagaatttaaacccagatcactctgactccaaagctcattctttctgctaaaacatgctacctcttccacaaattaatagcctaccttggatttcagcatcttatcttccactatcttctctctttgaactcttctctccacctactcatcctagagttcactagacataaagtgtcaaaacatctgtttctctaccaaataccctatattaaaaaaacttgggtaaggtagaatgataaatatctgaaagctttctaaagcagaattgcaggtgtgggtctagagtgtgaacacttgctttcttgtggctgtgtcgtatttatcttattgcaatcacttgtggggagctcaagccaggattctatgcacagccccagtcccaggctggtctctaatcataaggcgcaggtctataattactgtgtatgttgcaccactcctccctcacaacccccactactgccaccaaatgcaagctgccagtgatgctctgcagatggtaatatccaagtagtgacagtactagtttcttccacaggtatatccatagaggaaagcaacattgatggaacaagagcagggaagctgctggtatattacacttctagctcatgccctttgagtaccacttaatctgccctaaagatagtgtcacttctggccaggcgcggtggctcatgcctgtaatcccagcactttgggaggccaagggaggcggatctcctagggtcaggagttcaagaccagcctggccaacatgatgaaaccctgtctctactaaaaatacaaaaattagctgggcgtggtggcacgtacctgtagtcccagctactcaggaagctgaggcagaagaattgcttgaacccaggaggcagaggttgcagtgagctgagatcgtgccatggcactccagcctgggcaacaacagcaagactctgtctcaaaaaataaagatagtgtcacctctaccagtgtcgacaaatgtttagggctatggatcctcaactagcctgaatgcaagactaaaatattcctgagcctggtgcaaggtttaatggaacttttaactcatctgtttcagaaaaggtaacaaggctaaaatattaaggagtcctagcctgatctgacacatcttgtcaggtgtttcatagcactctgagtaagagttttgggaaattaataatagtaataaaaatcttgtgaaagggctcaaggtgttgcaatcctcatcacctatgagcaccaattctgcagctgttttgcacgtaactataaattatgatctagtctctacatacataacttcccccacattcctgcaggggtctcttttcctgctcaatctcaggagcaagctttaattttaagacccatgaatacttgaacaaattcaggagtcagtttgacacatcattttatatttttctgatgacaatttctagtttactttttaaaaaaagacactattttaaaaatactttgggataggtttgagtcgttgtgtttgcttccagtcagagaacttcctacaaaactgaagatataaagtgctgatgcctgggcgtgcctgcgttcgttgggggcacgacgtcatcgtgggaagcgtgtactttttcggattactgcttggcggattagaaacccgtagatcagttctaggttagccctgattaactgccctgggtgtttctgggccagagggaatgtctgctggattcaaaccaatatccgttgtaagacaaaagagttaatttgtactttacccctatccaggctaataatgaaggtaccgggaatgatctggaatgttaactggtgcccgcaatcgcgtctgctgaaccttctgcccccacgattctgtctgcccacatgcttctgtctatcagccccggcctcgggatcagctctcgccgcgtcattggttggatttcaggaagggagaagcccacgatttaaagggctccttttgcacctgccagacatcgtccgcatggtccaacttgcctttggcacgtatctggaaaaatctcctgcgctgttcgtttattgcactgactggtcaaaggaaagagtgttcccttagtcaccttgacaatttccaaaagcgaaacttgggctctagactagatctacactgagtctgcggggcgcggagtccctgcccaggtcagtagcgccggcccggcgggcgggcggggacaggggcggagcctaggccaggcgtggtcttccgtgggagagaaggaaattctttgccccaccccctaaaaactgctcttctgccagccaatcaaggaggcctatgcaaatagggtccctgtcgccccggtaaccatgatgcacggcagccaatggaaaccagcaagtcgcggccctgctccatgattgggactgaagtaaggaggtagcggcccaatgggctgtgggaacggtcctcggcgggttgaggggcggggatatgcaaatatggtttgaaaagccggcgggaaatccgagtttcgcgggaggaccttggcgcgtaaaccgtatcccttcattcattgtcagcagcagcttcctggagccatttttcagctgccggccgcagcacccgggctgccgccgccgcctcgcaatccgttgcatcggccgcccccgacgcctccatccccgcttggggcccgatatccgtgcggccgggaccctcctctctccagagccccgattatttttggcccccggggcctgtgcggtgcggaaaaataaaaagaaaagagagagagggggctcggaagcgccgggcggggaggagagaaggaggagagacttggaaactccgactgcaaataataaagaaattgaaaacaatacattaatataccataacactaaaaagagcaggagcgagagatgagaaagggaatccagcccgctctggagcagtacctggtgaccgccgggggtggggagggggcggctgtcgtcgccgccgccgctgcagcctccatggacaaaagggcactgctagccagccccggcttcgccgccgccgccgccgctgccgccgccccgggcgcgtacatccagatcctcaccacgaacacttccaccacctcctgttcctcctccctccaaagcggcgccgtagccgccggccccctcctccccagtgcccccggcgcggagcagaccgccggcagcctcctctacaccacgccgcacggaccctccagcagagccgggctgctgcagcagccaccagcgctgggacgcggcggcagcggcggcggcggcggccctccggtaataccctccctccccaccgtccccagccccggcgggaggtgggctcgcaccgcgcggggtcgtgggcgcgctgcgggccgctcggggagagcactgggccgagcatcgtgggcctcgggggctgcccctccaacgagggttcattgttagacctgagtgctcttcccggcgccaggagggtcggggggctcggccaggcgcgcggggcggcggggattgccttggcgcgaaccacatcaaacactccaaaacttttcgcggcccccccttcttttcctgcacttttccctacccccactctcccttcccctccaactcgaagcttcctctttctcgggcgtaggaaggggtcacgccccggatggagaagggggtgggggagggagtagtgaactggggtgtggggggctctgaggggttgaaaccgggggactgttggggtgctagcccccagtcggccttggaggctcgttggcggccgggggtccctgcggcgtgctcggagcgcaggggatcggcggggctgcgcttgacacattttaggatctgtaactcccggcaacaaaggggctgggggaggtggaggggagtcgggcgtgggggaggtggggctggaagccgggtgcggactggggcgtgggctgtctggggtgaggggctcgcgggctggcgctctggcctgggcgcatcctggcagtggcagcggcggcgcccgcgtggcccaagcgcccaggccttcctcgccgggccccgggcctgcccttgacccgcctctccccttgccccttccttccccgccctgtccccctctccgccccccggcgacggagggcgggggcagctgggttcccgtcccgccgcctgggtctgtccctctctccgggacccgccggtgacgtttcgcacacgtgcgcgcaggacgcgcctgtgactggggaggaggcggcggcgggagggggcgctggagggggagaggggggcacccacttcctcctgctcgccggctccctggcctgggacggtcccggcgccctcgcacccgcccccggcaccgccaccctccctctcctctccccacccccccaccggcgcccgccctcgccctgcgccgccggtctgttcggccctccgggccccctctccagccggccccccacctccccccggagccaggctggtttcggaaatgcccttacagcagcaggttagtgaccgggacggctcgggggccgccgacgccgcgggggcaccggattctgttgggggctgaagcggtgagggtaggcggttgagcggggttttggagtgggaacggggggttgggtgctcgagggaaatgagtaagcaagaaaaatctaactaagtaaatgccccggcctccggttctaggaacctcggggcgggagtgtctgccccagggggtgggtatggtgtttacgtggattttttttctagggggcggatggatgggcgatagaaaaccggagggggcttctcgccaatggccgagttgagctctgttttctgtcttccttcccttgtgctggagggggaggggggtgggtcagagggtagggtgtctgtaggattcccaggccacccgccaccccctccctttgtccctgtaatttataaagcgcctttgagagatgatttaggtcagtatgcggcttctctttttgttggtactagaaagaagtgtggcccggaggtctcccctttctccttttctctccttcattcccttcctccatgcctccgggtcttcaccctcgtggtgaggcttggcctccacggggctagaaccgaaccagactcagttagatccatggtagcctgattataccaggcgtggacctcaccttgtctcagctccaaatgggtttaatttttggagaatcaagattttgcgggagtctttaagaaagtcagcacataggcagcactttgggaaatgggatgggtttgggaataatgaggcgttttttatttctttcctgttcccagtttctccccgggttcggtcttaactgctttccagccccagagatacttgctgggcatgtgtgatgtagtcttagtcaaagaagctcatcgttttttagtgactagggtctgccagcaggggggaaacggagcacagtacctgcttagacatagcagtatccggtgtg

SEQ ID NO: 2397 - DNA, 6000 bp, Homo sapiens
taaacccctgccttagtttacaaagctaagtgggggcctgcatcacttagattcttcatcaaagcaaagtgcatctggctgtgtgatacaatctggcaaccagtggccttcatcacttctccttcaaagttacattgcattggataggagagtatttgagggcaaaaattatattttttaaaagttatattgtagacaaatatggtggccataagactgacccccagttaaggttggggaaagaacgtacattccttgaattccaaaaacacattgcttttagaggagagggtttgaaacaagtgtgaacagaatataaaccaatttccctcttattgaaatagaaactcggtatgttatccctctataataatccccactctgtaagtttcctgtccccaaaggcagttgttgctttttagtaccttctgtggtataacttttctttgtgaaagatacattttcctcgtcactttctgaagccaaagagagggtcagggtaggaagaaggagacactattagtggtttcctatatttactgctttcccagttatcttccattgttaagtcccatgaacaatgattagtagaaaaaatgctttttagcaatcgtgaatacagtctctgaaacattatttttaaactgctaacaagaatgaaaatatgcattaaaccacgtacttagtacctcaaagaattcagggaagattcccctttttaaaaaacaaaattgtgaaatctaccttctttaccttgctttcaccacgttttaccttgcttttaccacctttcaggtggcttcatgggaatttatcagggatctggtgagcataggcaattgattttgactcatcctagttacagctgttagtaggaagtagatgactaaaagggaattgaagttggctagcttgggaaagtagatgtaaactggtcctacaaatggaatatttgtaaaatcaggttaacttaggaaaaccagccagaaaattaactatgagtacttgaagctatttgccaaatgggtccaaatccctaggaaagaggttaaaggtatggatgatatatctttgcagatggcattaaagacagaagagttaaaggaaaactactgctttatatatttctgagaaaccacaataaaagctttcaccccgtctgtcaatctccaggtaatgttatttatgcacgtctaggcttagagtattattttctgttttcaagttagctttacacagtataacattaatctcagaatccattcttccaagtaatacacaaggtggcgatttatagaaaaacaaaaaatcctttcctgttcacaaggtggagttcttcagcccacagtgccatatttaagggtgctttgtttcagaggatgattagagtggcgcccttggtactgattatagtggagctacctgtagtgcccaagtctgggcactgcattatattaaaacttccattttggggtatgtagtgactaaaaattgtctcccagcttaaacttggcatcaaccatatatctcagcagaagcaagattattgagtatagaaccacaggaacccggcacttttctttttataattgtacaggaaaagagaccctgctgaaatagcacctatggttctccattcttagatgaaaatttcaagcactgagggctctttcccaaagtagaatcagtaggttgctatgactgtgacaggacatagtctcttacattattaaatcccaaattttctagaataaaataatttcagcttctttttagaagcagcagcagaaaatgatgaagccttgtctgctccattgagtagcacttctgactatggtttctctggagttcttacatttccaacagttcaccaactaagatggaatttgtctaatgcatgtctctgacatggtgaagattgagagttcaggtctaacaaaagccgctaagcataaactgcacccaaaagttggcaggtctgtggaatcatggacggagtggaactcaggcaaaaaagtgaggatgatgtggccttgaattgtcacaattcaaggcatatgcttggcagttcaacaccactatctctatataggcgtgtcttactgaaatgtccctattttacccctaggatggccatgttttatatatttaaaagcccaaattaattgggcataaataattaattacagatcacttaaagacttttaacagttctcttcatatatgtaaacaaagggacaatgtgcacctggccttacactatttcactaagtcagaaaaaaattaacatttgtataataaatatgaattgtactgggtgtctactttttgccaggcactgtgctaaatagttcacatgcattatcatatttaactcttcaaaagaaccttaaaggtgacactgtttttgtccctatgttacagaggaagaaactgagttgagagattaagttatttgccaatgaacatacaatttgtaaataatagatgctttacagctggtaaggtagtactcatatttttacccccattgaaaaaaaggtgaagaagttgcttctggttaagtccttagatattcttgagacagaacttgggatcagaaccagataggtctgcaactctggccacctgaagacttttcaacctcttcttggacacagagtgtttaggtggtctttgttcagccaatcacttagctttccccatcctgtctttcctgcttagggaaagaatatcaacaaaattcaaaattcgaagacttacatggaagtctaatataatttcgataagaaaaacaataaatcaaactttatattcagtgcttaagactttgtatgcattgactagataaatttcctacaccctcccagaagaaacagctccttttttgagacggaatctcgctctgccgccaggctagagtgcagtggcgggatctcagctcactgcaacctccgcttcccagggtcaagcgattttcctgcctcagcctcctgagtagctgggattacaggcgcgcaccaccacacccagctaatttttgtatttttagtagagacggggtttcaccatgttggccaggatggtctggatctcttgaccgcgtgatccgcccccctcggcttcccaaagtaccgggattacaggcatgagccacagcgcccggccagtagaaatagctcttaaaagtgtagataaccggccaggcgtggtggctcacgcctgtaatctcagctactcaggaggctgaggcaggagaatgcttgaactcgggaggcggaggttgcagtgagccgagatcgtgccattgcactccagcctgggcgacagaatgagactccgtctcaaaaaaaaaaaaaaaaaaaatgcagataaccaatgattcagcatacattgcaatcatataaaaaatgcttctgaatatgtatatgagtaacatttatattcctgtaatgaaaaaccttttgtgtgcacataaactcaaaaggatattattattcctggaataataatttcatgtcaaggagaataaagttttgaaataacttggaagatggtgagggtaatttagtatactttaaatacttaaatacaatgaactagatataataaacctggcttgaaagatagtcttagggacctggcccaacaaacactgttaaaattttttaaaaatcaacttgaagctctcataatttcccattatcaaaactaccccctgcaaatctgtgaatctaatccaagaagtatgtcaatagctggttgtttaaggttaggtttatgaaatagtaacagaactgtgcaggggtcaaatatgcttaaaatatgtccaaacatgcttaggtcaagtcagtaagagtatctgaagctaataaaagcatggaatattcttgcgactgaaaacccagcacaccggatactgctatgtctaagcaggtactgtgctccgtttcccccctgctggcagaccctagtcactaaaaaacgatgagcttctttgactaagactacatcacacatgcccagcaagtatctctggggctggaaagcagttaagaccgaacccggggagaaactgggaacaggaaagaaataaaaaacgcctcattattcccaaacccatcccatttcccaaagtgctgcctatgtgctgactttcttaaagactcccgcaaaatcttgattctccaaaaattaaacccatttggagctgagacaaggtgaggtccacgcctggtataatcaggctaccatggatctaactgagtctggttcggttctagccccgtggaggccaagcctcaccacgagggtgaagacccggaggcatggaggaagggaatgaaggagagaaaaggagaaaggggagacctccgggccacacttctttctagtaccaacaaaaagagaagccgcatactgacctaaatcatctctcaaaggcgctttataaattacagggacaaagggagggggtggcgggtggcctgggaatcctacagacaccctaccctctgacccacccccctccccctccagcacaagggaaggaagacagaaaacagagctcaactcggccattggcgagaagccccctccggttttctatcgcccatccatccgccccctagaaaaaaaatccacgtaaacaccatacccaccccctggggcagacactcccgccccgaggttcctagaaccggaggccggggcatttacttagttagatttttcttgcttactcatttccctcgagcacccaaccccccgttcccactccaaaaccccgctcaaccgcctaccctcaccgcttcagcccccaacagaatccggtgcccccgcggcgtcggcggcccccgagccgtcccggtcactaacctgctgctgtaagggcatttccgaaaccagcctggctccggggggaggtggggggccggctggagagggggcccggagggccgaacagaccggcggcgcagggcgagggcgggcgccggtgggggggtggggagaggagagggagggtggcggtgccgggggcgggtgcgagggcgccgggaccgtcccaggccagggagccggcgagcaggaggaagtgggtgcccccctctccccctccagcgccccctcccgccgccgcctcctccccagtcacaggcgcgtcctgcgcgcacgtgtgcgaaacgtcaccggcgggtcccggagagagggacagacccaggcggcgggacgggaacccagctgcccccgccctccgtcgccggggggcggagagggggacagggcggggaaggaaggggcaaggggagaggcgggtcaagggcaggcccggggcccggcgaggaaggcctgggcgcttgggccacgcgggcgccgccgctgccactgccaggatgcgcccaggccagagcgccagcccgcgagcccctcaccccagacagcccacgccccagtccgcacccggcttccagccccacctcccccacgcccgactcccctccacctcccccagcccctttgttgccgggagttacagatcctaaaatgtgtcaagcgcagccccgccgatcccctgcgctccgagcacgccgcagggacccccggccgccaacgagcctccaaggccgactgggggctagcaccccaacagtcccccggtttcaacccctcagagccccccacaccccagttcactactccctcccccacccccttctccatccggggcgtgaccccttcctacgcccgagaaagaggaagcttcgagttggaggggaagggagagtgggggtagggaaaagtgcaggaaaagaagggggggccgcgaaaagttttggagtgtttgatgtggttcgcgccaaggcaatccccgccgccccgcgcgcctggccgagccccccgaccctcctggcgccgggaagagcactcaggtctaacaatgaaccctcgttggaggggcagcccccgaggcccacgatgctcggcccagtgctctccccg

SEQ ID NO: 2398 - DNA, 6000 bp, Homo sapiens
tgtgagccactgtgcttggtgtcttatgtctttcttatgtaagaagtagaggccaggtgcagtggcacacgcctgtaatcccagcacttcgggaggccaaggtgggcagatcacgaggtcaggagatcgagaccatcctggctaacacggtgaaactccgtctctactaaaaatacaaaaaattagccaggcgtggtggcaggtgcctgtagtcccagctactcgggaggctgaggcaagagaatggtgtgaacccaggaggcagagtttgttgtgagtcgagatggcacgactgcactccagcctgggcaacagagtgagactccatctcaaaaaaagaaaaaaaaaaaaaaaagaagcagaatagtatgtatgctcttccactctgctttgtgtgtgtgtgtgtgtgtgtgtgtgtgtgtgtgtgtgagatggagtctcgctctgtcgcccagactggagtgcagtggtagctgggactaaaggcgcccgccaccatgcctggctaattggctaattttgttttttgtatttttgtacagacggtttcaccgtgttagccagggtggtctcgatctcccgacctggtgatctgctggccttggcctcgcaaagtgctgggcactctgcttttttcatttaaggatgtatcccagaaatttgttcatctcagagatcttaaatttttttcatgactttatactactaccttgtgccgatataccataatttattcaactcattgcctatagatgtgcgattaggttagttccaatatttaggtattataaataatgctacagtgagaaagtctagagtaaattcctcgaagtggatttgctacatccaaagtcaatgtgcatgtcattgtagaaatgccttgtcagggccaggcgtggtggctcatgcctgtaatcccagcactttgggaggccgaggcaggcgaatcacttgaggtcaggagttcgagaccagcctggccaacatggtgaaaacccatctctactaaaaatacaaaaagttagctgggtgtggtggcaggcacctgtaattccagctactcgggaggctgaggcaggagaatctcttgaacctgggaggcagaggttgcagtgagccgagatcatgccattgcactccagcctgggcaacaagagtgaaactctgtctcaaaaaaaaaaaaaacaaaaaaaaacaacaaaaaaaacgccttgtcagatacagacaaattcccttctacagggcttttaacatttgacactcccagtagccatgtatatgagtgcttgttttctcccagcctcatcagtagagtattttattagttttctgttgctctgtagaaatttccacaatcttagtggcttaaaacaaaacatgtattatctcatactttctgcgccacaggaatctaaacaaagttcagttggaccctgagctcagggtcttacagagctgtaaacaaagtgctggccagtgcattgtcatctagaggcttcattggagaaggatctgcttctaaactcattccaattgttgggagaattcatttctttggagacataatactcatggccgcttgcttcttcaaggccagtaagagatacatcaaaaaaagtctaagccctctgttgaaggacatcctaatgattacgtcaaggccaacaggataatctcactttcgataatttaaagtataccgatttggggccttaattacaattataaaatcccaccacctttgccttattgaataacctaatcataggcataatcagaggtcagagataatgggtggcattttagaattctatctactgtaagtatgttgtcaagcttttctatagctgctagtctgatagttgaaatagtttttcagagttttaatttgcatgtctcttattctcagtaaagttgagcatggttttgtatgtttaaggaccattcctctatcgttttctctgaaccgtccattcctgtcttttgccgatttatctattgggctgttggcttctccctctcaatgttttatagctctttaaaaattagggaatgtagtcttttatgtgtaaaagaaattccctatattttctcttactttatcatttgtctttgcttatggaaatcatccgatttttaaaatacagacaatttccattttaagacaatgtgtaggccacaattgtgtatgtgaaacaaaacatatttaatgcccaggggccaccttctagaccatcttcaatcctttaaataattctgcactaaaataatcccctgaagatcctgagtatattattctttttttttttctttttgtttgagacgtagtctcactctgtcgcccaggctggagtgcagtggcgcgatctccgctcactgcaagctctgcctcctgggttcacgccgttctcctgcctcagcttcctgagtagctgggactacaggcacctgccaccatgcccggctaacttttttttgtgtttttagtagagatggggtttcaccatgttagccaggatggtctcgatctcctgacctcgtgatccacccgcctcggcctcccaaagtgctgggattacagggtgagccactgcacccggccaatcctgagtatattattcttaacatcatctgagtctcaagtcccaaaaccttcattagtaatgtgtttcatcatttcacttctcttagctgtgcttatactcatcaaagaaatggtttgtcaaaaaataaattggtgcaatgtaattattatttatccatctgaataaaaataaaaataaaaaaattggtgtaaatatttgtggttgctaaagttttgttttgttttgttttgttttgtttttgagatagagtctcactctgtcacctgggctagattgtggtagtgtgatcttggcttactgcaacctccaccacctgggttcaagctattctcctgcctctgcctcctgagtagctgggattacagacgcatgccaccatgcctggataatttttgtatttttagtagagacagggtttcaccatgttggccaggttggtcttgaactcctgacctcagggtgatccgccagcctcagcctcccaaagtgctgggattacaggcatgagccatggtgcctagtggttgctgaaatttttatggctaaacattttccagtatttctacctccttatcccatcatttaatcctttttaaattaatattttaaaaattttattattggccaggtgcagtggttcacgcctgtaatcccagcactttgggaggccaaggtgggcagatcacacgatcaggagttcaagaccagcctggccaacatagtgaaaccctgtctctactaaaactacaaaaaattagctgggtgtggtggcgggcacctgtaatcccagctacttgggaggctgaggcaggagaatcgcttgaacccggggggggcagaggttgcagtaagccgaggttgcaccattgcactccagccctggtgacagtgcaagactccgtctcaaaaaaaaaaattattattgaaaatcccaaacagatataaaagtagagggagtgaataaaaaatcttcatgtactcatccatactagcctcagcagttatcaacacaaggccaatactgttttattcgcaccagtggttctcaactggggatgattttgccctgcggaaggttatctgacaaggtctgcagacatttttggtcttcacaattgggatgtactcctggtagctagagggtagaggccagggatactgctaaacagcatacaatgcccaggacagcccccaccacgaacaatttgcccagtctaaaatgtcaatagagcccatactgagaaagcttgatttataccttttcccttgcttctctcaataattatttcaaataaaatatatggtataaaatttcatctgtaattaccatttataggtagaagctattacaataaaacccacaatattgtcattacaactaatctctttttttaacccattgctcatcaggtaaccttaaacaactcatatcttaccatcccaaaatattcagtcagtgttcaaatttcccttgggtatttttttaaatacagtgtttagttcagacgagatccatacattgcatttggtaatatgtcccttatttgtactcgataacgccttccttctgctttttatttttaaaatattttaaaattaatttttttttgagacagggtctccctttgtctgtagtcccagctactcgggaggctgaggcaggagaatcgcttgaacccgggaggcggagcttgcagtgagccgagatcgcgccactgcactccagcctgggtgacagagcgagactccgtttcaattaaaaaaaaaaaaaagaaggaaaaggctagacgtaattattaccaaggtgtttctgctccttcaaattgcaacagcagttgtaatttcagtgcctagaacagtagtaattggcacgtataaggcgctcaatgaatagctgcaggattaactgataatcggttgtctcctgaacaattcctaccgcaccacaccatagtcaaaacacaaaaagccaaaatataaaagcccctaatacaactacgagtccgtggagccagggctttacacaaatatatgtcgtgtactacatattaatatatatgcacatacaatattttgttcttctggtgctaacgactaatggaggcaaatctttctccctttcgtaaagggctaaaactttgcattttaaggaagttccaagagcagggtcggaggggagggtcaaagggcacaggcctcccagcccgcagaaaacccccacggtcctcaagtactcgctaccgttgaccgcgcaggcgcaggaaggggcggggccgagggaagaggcgattcgcgggatccagaggccccgcccctcgtctgcgtcagttggtcacgtggttgttcggagcgggcgagcggagttagcagggctttactgcagagcgcgccgggcactccagcgaccgtggggatcagcgtaggtgagctgtggccttttgcgaggtgctgcagccatagctacgtgcgttcgctacgaggattgagcgtctccacccagtaagtgggcaagaggcggcaggaagtgggtacgcaggggcgcaaggcgcacagcctctagacgactcgctttccctccggccaacctctgaagccgcgtcctactttgacagctgcagggccgcggcctgggtaagggcgaaggggttgttgaacggtcgcgggagccggggcggggttgggaggtgagtcgagggactgccccattggctgggtcggttttggcgcgctctcacttccgcgcttcctattggctggctggcgcagttcccgaggcgcgcgccgcggttggtaggctcggacgcgcggggccacactgcccgccccctagcctggcgctgggcctccgggacaagttggctgggtccgggcttggggactgcaacgcgggtaagggactcagcctgggcttgccagctgtggggatgaggcgaagcatccatcctcttggcagttaagtggctggtcctgatctgagggatctgcaaatttggctcatggaaagaggtggctgaattctgcgtctcccattaaacggatactggcgttgttgatacgggtttcgcatggaccctgtcctgtgccagggtttttaatctagctattaaaggaactggagaataacaagtaagggttgcaaggtcgctgacaggcgtgggaaacttgtgaaggattagaatgctaagtggctttcagcttttttcacactaaggtacgttttacgtcgcaacctaggacacagctatctaaccaaatgagacgtgatggaagcaatgtttctcgtctcttcaattccattctgttcagttgcatttttctaagcagtgttgctcatgactcactaatttcgagatcacggcccgcgacccgcagtttgaagaacattgcgtagggt

SEQ ID NO: 2399 - DNA, 6000 bp, Homo sapiens
attaaaaaaaaaatctatctggctcttccatggaaggaatatttgactgtggtacccagattaggtcatgatcataaactgcattttaagtctttacagaacaaacaagaaaagccaaacaactaaatagaaccaggccccttaagggtagaacagcagaggggctttttttttaaagatgcagttttgttcttgttgctcaggctggagtgcaatggcgtgagctaagctcactgcaacctccgtctcccgggttcaaatgattctcctgcctcagcctcccgagtagctgggattacaggtgcccactaccatgcccagctaatttttgtattttcagtagagacgggatttcaccatgttggccaggctggtctctaactcctgaccttaggtgatccacccacctcagcctttcaaagtgctgggattacaggtgtgagtcaccacgcccacccagccaccagaggggctttgaccttgcagtagaggaagttgtgatcacagagaggatgatgtcatagtgggaggactcctggcaggaaagggccttatagatattgccagttttctgctgtcatccataatgtgtcctgaaaagtttgtatcaaaggtaaatgtgtagaaactaagtgagacacagcatggtgaagagaggttagtaccagaaagccaaacatccctgattacatttgccttacagaaacactctgatgctgtagtcctaactttttataatcagtttttctcccttcctcaaactacagtcattccgtttaagaccaaagaacatctaactggggctgaagattgcctcctgttggccccctcactggtttctatctttgtctgaattgttttcggtttgagtcctgtgcttctaaatgctggattagccttttattttccccctttccactaatttgaataaaatggcaagagtaaaatataagctacgcagacatctccctagtgcatctatattaacaaagatgataatgctgcctaagaggactttccagctggattctgctgcaggaagatacgatgtggggtcagcatgtagcatccaaagaggcccagatttgagtatgtcattgttttggttgtgcattgcagagggaaggtagagggtgcatcctgaggttctcatgcctgcctgtcaggggatttttcccttgtagggattggtagagaaaggggttgctcctccagcaagatgaggattcgactgtcctttcccaactcaggtccctgagctgcggaagaaatctcgccgagagtacctggctaagcgggagcgagagaagcttgaggacctggaggcggagctggctgatgaggagttcctttttggggacgtggagctgagccggcacgagcggcaggagctcaaatataagcggcgagtgcgggatctcgcccgggagtaccgggcagctggggagcaggagaagctggaggccaccaatcgctaccacatgcccaaggaaacccgaggacaggtgaggtgaagcggcgtctgcttcagccttggtccccaagacaagttgtggggaaggcttcaggggattgggcaacacgtgggtcatcccctttcttgccttgccgttcccaatgggcagtgggcgggggtagtaatgggaagaggggagagggcagagaggacatcctgtttttgagtcttcacatatcccctctctctgtagccagcccgagctgtggatctagtggaggaggaatcaggagcccctggggaggagcagcggcgctgggaggaggcgcggcttggggcagcgtccctgaagtttggggcccgagatgctgcctctcaggagcccaagtatcaactggtgctggaggaggaggagaccattgagtttgtccgggccactcagctccagggtgatgaggtaagaggggagctgggagactttctgaggaagacccgtagcgagctatttagctcacacctccttctctttccttaggagccgtcagctccacccacttcaactcaggcccagcagaaagagtccatccaggccgtccgccgcagcctcccggtgttcccatttcgagaggagctcctggctgctattgcaaatcaccaagtcctcatcattgaaggcgagacaggctcagggaagaccacccagatcccgcagtatctctttgaggaggtacagtcatctcacccttcagcttgccagggcacctggcatcaatgtcctcattcctgtcagagctccttttacattatatttttagtagtcacttacctatcttttccactaaattgtgaaattcttgagagtaaagaccatacccttttcacatttctgttctcacttcctgcattcatttcatttggaaggacgggtagatggataggtggagtggggcgtgtataaatgtggacctccctatgctccaacgtggccaaaaaacaaggagttaaaggactattttcctgcctttttgttagttttttttttttttttttggagacggagtcttgctctgtcacccaggctggagtgcagtggtgcgatcttggcttactgcaacctctgactcctgggttcaaggaattctcctgcgtcagccttcagagtagctggaattacaggcatgcgccaccacacctggctaattttttagtagagatggggtttcaccatgttggccaggctgctctcgaactcctgacctcaagtgatccagccacctcagcctcccaaagtgctgggattacaggtgtgagccactgtgcctagcccctgccttattttggagacaggctcttgctctgatgcccaagctggagtgatgtggcaccatcatgactcactgcaacctgggactcctgggctcaagagatcatcccacctcagcctcctgagtatctgggaggtgcacaccaccatgcccatattaaacattttttgtttttttttgaggtggagtcttgctctgtcaccaggctggagtgcagtggcgcgatcttgactcactgcaacctccacctcctgggttcaagtgattctcctgcctcagcctcctaagtagctgggactacaggtgcgtaccaccacacccagctaatttttgtatttttagtagagatggggtttcaccatgttggccaggatggtctcaatctcctgacctcgtgatctgcccacctcagcctcccaaagtgctggagttacaggtgttagccactgtgcctggcctgaaatttttttttttttttttttgagacagagtcttgctctgttgcccaggctggagtgcggtggcatgatcttggcttactgcaacctctgtctcccaggttcaagcgactctcctgcctcagcctcccaagtagctggaaatacaggcatgcaccaccatgctcggctaattttttgtatttttagtagacggggtttcaccattttggccaggctggtctcgaactcccaacctcaggagatccgtctgcctcggcctcccaaagtgctggaattgcaggtgtgagccactgtgcctggtcaaaattttgaatttttaatttttttgtcacactatgttgcccaggctggtctcgaactcctgagctcaagccatcctcccacctcagcctcccaaagtactaggattacaggcatgagccactgtgcccagccttcctgcttttttaccttagctggctctgtctcagctaatctgttcttttccagctcaagtctagcagagtcatgaacttaattacccagagctgggtgaggaccccctttgagggccctaggtctgtcatcctatctatttgcccttcttttctggttttcagcatctgtcttttcctccttttctcctgcctggtttttacaacttctttctctgaaatgtacctggtcccagggtgcatatttagtaaagggcaaacttcttcttttttctttgtcattcagggttatacaaacaagggtatgaagattgcctgcacccaaccccggagagtggctgccatgagtgtggccgcccgagtggcccgggagatgggtgtgaagcttgggaatgaggtgagatttctagggaaccggggggtagagtctggggtctgtgactcagtctacagttccctcaggtccctacagcagaagtcttggtgctgccccacttcacctttccccaagttcctttcagggcacaccagcccacacttggttgctaatggttcccttgaccaggttggctacagcatccgctttgaggactgcacatcagagcgaactgtcctccgctacatgacagatgggatgcttctccgggagttcctctctgagcctgacctggcgagttacaggtatctctaatctctggcctttctctcccttcttcccacccagccaattcagccattgtcttctgattaatccacccgttcttgaatctttgtggttcaaatggtccttgaactgacctccaggtaccacggagatggggctggaggacagaagagattgtagagaaagcctcttctttccccattcatctccagggtttagaaaacaaccaggatagcagagcattgctgccgagacttgaaataccgtgtgaagaccatttgaaaacacttggaatgctcagctcagagggagaaacaggaagcatcctggttccctctaaatatgtgaaggctgttacatggaaagaaggatcagattgttttatgtgaccctacacgacatagctaggagccatggggaggttacagggagacagattccaactcaataccaatggctgagtaaccctcagagtggtggagattgcagggcctgtcagagtggttggactctgggtcttggccctccacacaagtcttgggtagcttggtctgtgaataatgagctcttagtgctggaaatggccaagcaggggttggttgaacatgtgttgagggggaaaagggattcatgaatgtaatgggggtggggtcaggccagctgaacaatatgtgcctttttgactcttcagaggctgtgaatttctggtcttggaagatcacagtggagcaattggacagataggattttatccttcatatcccttgcaaaagatctctaagaacccatggagagccagccagcgcaagagtgtctgatgcagatgtttttgcccatcgagccagcctgctttgtggaatggctggggacttcaccatcacagttagggttaggcacaaagagttgaggtcagggaggtgggtaggggaagatggggatgagttcctgggacttggctgccacccagaaaagccaaagaacaaagagaaagaaggtgtcatgcacataactgagttaggaggaaaccaaggagcatgcagagtcctgtgagagttgaggtagaaaggcttaacttgctcctgtctccaaaagaagaaacagtcaagaatgatgccagcagcagttgtcccacaggacaccaggagcttctaggctatttgaatcacagcagctcaggtctattacccccagtcagccttgctggcccacccttattgaaagggaccctgccttccactttttttttcctttaaaacgtatcagccgggagcggtggctcacgcctgtaatcccagcactttgggaggcagaggcaggcggatcacgaggtaaggagatcaagaccatcctggctaacacggtgaaaccccgtctctactaaaaaatataaaaaattagctgggcgtggtggcgggcacctgtagtcccagctactcaggaggctgaggcaggagaatggcgtgaacgcaacccaggaggcggagcttgcggtgagccgagatcgtgccactgtactccagcctgggcgacagagtgagactctgtttcaaaactccgtctctactaaaaatacaaaaaattagccaggcacagtggcaggcacctgtagtcccagctacttgggaggctgaggcaggagaatggtgtgaacccaggaggc

SEQ ID NO: 2400 - DNA, 6000 bp, Homo sapiens
gtgacagagtgaaattctgtctcaaaaaaacagaaaccaaaaactacctcctagacttgtagaaaatattaagtaattttatttatttatttatttatttattttgagacagcgtctccctctgtcgcctggactggaatgcagtggcacaaccttggctcactgcaacctctgcctcccaaattcaagcgattcttgtgcctcagcctctctagtagctgggattacagatgtgtaccatcacacctggctagtttttatatttttagtagagacagggtttccccatgttggtcaggctggtcttgaactcctgacctcaagtgatcctcctgcctcagcctcccaaattgcttggattacaggtgctccaggccaagattaagtaattttttgtgaagcaccaagagccacagctggatatcatattacttaatctctcctggagttatggtgagattaaacagttataaggatgcctggcacagagtccgagctaaatgagtgatggatgtggttactggtggtaacatgctttagatatggaagatattataggacttcctgcatgccaactgcccttcaatttgtgtgggggggaagggtgggcagaaggcagaggctctcactcattctctaacattattgccccctctcccacagatgagtcctgccggcggtgaccatcttccaacatagggatatacctccctccttcttataactgaagatcctggagcccggaagattcagggcagacagaccctgataatgagcctggcagggaagggcaaccaacatcttgtaacttgctttccccaccctgtttctgggggcagagccaattgcccaatttctaccctaatccaaagtccctggtgtgggtggggttaaacgtgctggtgcatcctaggtcatccaagagtgagcgccaagtcctgagaaggggcacagaactccctggagggtggagatggagcacctgccccccatggcagggtacactctccccacagccttcctccccaccatcccgtggggactctcgggatttaagcactcgtctctctgggaggcccagaccccactccatttataggcacatctccttcatttcctaggtcactgcccctttgtttacagctcctgcctcctcccttgaccacagcctggtttacaaattccatcagctcccagccccacctgccaaagtcccaggtttacaagccacgcttacttgctgtgtctgcgtggaattctctcctctgtcccctccagtctcctcattggagtgacctgaaggtgtggcttcctccactttttctcagtattactttgccttagttttccccaagagggaaggctggaactcttaactctgtaccccttgatagttatttaattctgtttctcctagtggttcacaattgaactgaattgagatggtgtcgggtggctaaggagacacctcacctctccttccccattgtgccgcctttatcaattgcctgttttgttttgtttgttttttaactttccataataaaatggagttctcttcaactcgtctgcttctccttctttgggaaaaaaaaagggtatgtgaggggaggctctggtggctgggggagaggaaaatgatgggggatgaaccaggaactcggcactgacatgtcaaaaggggtctgggaagctgcacgtgggtttcacgcaggacaagcaggtgacatgagaaagggcagttgaagtgtccactagactggaagtgccatgagggctgactacatcagctggattcactgcaatatcctgtacctgtcaactagtagacacggaattatttctagaatgaatgacaacaaatgaatgaatagaagaaaagggttaaaatattacagaggacactttgagttgaagggttctagtattcagaagcctgctgccatgaaggcagctaggtagtgtatgacacaacccatgtggctaatccagggatacttacttaaagagctggggctacgaatactaaatctgaaattgctgcaaaatgaagtaagtatgtacaagagtcagtttcctggaaaaggttcccctctgatagacaatggattttatatcgttaaaggcctaaaggccgggcacggtggctcacgcctgtgatcccagcactttgggaggccgaggcaggcggatcataaggtcaggagattgagaccatcctggctaacacggtgaaaccccgtctctactaaaaatacaaaaaattagcggggcatagtggtgggcacctgtagtcccagctactcgggaggctgaggcaggagaatggcatgaacccgggaggtggagcttgcagtgagctgagattgcgccattacactccagcctgggcagcagagtgagactccatctcaaaaaaaaaaaaaaaggtttaaaaaccatcttgatagtgcatggctttggtgcccatgtagttgatatttggaattttcccatttcaaagaatatcttatacaaatgtggaacatcaatattttactcatcaggaaaatttgtttgtttgttgttagctctccaggctaacaaagatatggttgaatagttatagtccttctaccactacaagttgctcctctcagactggtcagaggaggccccacacctttactataaaacaaaatatatgagacaaattgaacttaagcatacgccaaaggttttcaatttactagcaagagaacaagccaggtgtcaaaagactcagccagttcagagaaggtctgggtagggaaggaaacagaatgattatattagtagcctgttaggtaaaggtcttaaaaagtttccagttgtgacccaggaaaacagagttaggaagctccgaggtgccaggggtgctcacagtccatctcagaaacagaaaacaatgcattcaagaggtcaggccaggtgtggtggctcatgcctgtaatcctaacactttgggatgccaaggcgggtggactgcctcatctgaggagtttgagaccagcctgggcaacatgatgaaaccccgtctctactaaaatacaaaaaattagctggacgtggtggcacgcacctgtagtcccgcctactcaggaggctgaggcaggagaattgcttgaacccaggaggtggaggctgcagtgagccaagatcacgccactgcattccagcctgggcgacagagtgagactccgagactccctttccaaaaaaaaaaaaaaaaaagtcagtgatgtagatccacttgtggctattaataagaacaatgtttcatttcctaacagtagtgcctggtaactgcaattaatcacaaaagtatgatgcaggatcaaacaaatcagacagcagagcatcgagtaacaaattcagctttttgttttgtttgttttttttttttgagcatagtcttggtctgttgcctaggttggagtgcctgacctcggctcactgcaacctctggctcctgggctcaagagattctcctgtctcaggcccagtgcggtggctcacgcctgtaatcccagcactttgggaggccgagacgggcggatcatgaggtcaggagtttgagaccagcctgaccaacatggtaaaaccccatctgtattaaaaatacaaaaactagctgggcgtgatggcatgtgcttgtcacacttgtaattccagctactcaggaggctgaggcaggagaatcacttgaacctgggaggcggaagttgcagtgagccgagatcgtgccattgcactccagtctgggcaacagagcgagactctgtctccaaaaaaaaaaaaaaaaattctcctgtctcagtctccagagtagctgggactacaggtgcacacctccacacctggctaattttttgtagagatggtggggtctcaccctgttgcccaggctggtctcaaacccctggtctcaagatatcctcctgcctcagcctcccaaagtgctgggattacagcaagagccactgcacctggccttgcttacttttaaataagcagccaccagtgattttctcaagctgttaagcaaaaatgcagaacacagtttgcctgttccttagtttggagattttgtctttaacaactttccccagttccccagtttcttcctgcctagaggtcttcccttatacctgacctgtcttcactcctgctgcaggcaaaccagtcctagcaacggtcacttttttgtttgtttgagacagagacttcctctgttgctcaggctggagtgccgtggtgggatctcggctcactgcaaactctgcttcccatgttcaaatgattctcctgcctcagcctcccgagtggctgggactacaggcgcacaccaccacgccaggctaatttttatatttttagtagagacagggtttcgccatcttggccaggctggtctcgaactcctgacctcagataatccgcccgccttggcctcccaaagtgctgggattacaggcatgagccaccgcgcccggccaacaatgctaatatgttttatgagcatggacccgatcttccaatctgaaatagaatttcattcctcccttactttgtatagtttttggctctataaaatttccatactttctttattatgtatcctgtccctcccccaccgcaaaatgtaaatttggtaaggaacttttgatttgtcctctgctatatcccagggacggaaagcaatgagcacacattaggcatccattaaattaatttcacttgttgaatgaatgcgtgagcgaagcactcacagactgaccatcagggggcgtcagagaaactggacagaggcgaaatgaagaaaaaagaattaccccgagttttcaggtatggttccgcgaggtttgaactcgctcggccaccgtagtgcttagaggccgaaaaagtacagccccttccgggctccgcggtacgggaagacagctttgggatgtcggaagatcctagaggtcccaaggtagctgacttgcgaagctgaggctccagccgagggctccaggcctctgaccggcccagcagtgagcgcggctgcccgacgcttcagggccgggagcagggagcgtgagtcgccatggcgacgccggcgggtctggagcgctgggttcaggacgagctgcactcggtgttggggctgagcgagcggcacgtcgcccagtttctgatcggtaccgcacagcgctgcacctctgccgaggagttcgtgcagcgcctacgagacactgataccttggatctcagtgggccggcccgggacttcgccctgagactctggaacaaggtgtcggcaggggtggggaggggccctgtgatttgtcccggtgaggctggcctaacggtccatcgagaagttaagaaagctcagttcacaagcacttattctttgtccgttgtcgcgtaggtactgtgctagctgctggacgcccagctcagtggagaagattgaggagggcttaggtgtgtcgggttaagcgcaatagaacggtgtttctcgaactcttaacatgcatccaaggttcttgttaaaatgcagattgcgattcagtagggatcttagtttctgcatttctttctttcttttttttttttttgagagacacagtctcgctcgccccgtcgcccaggctggagtgcggtcgtaagatcacggctcactacagcgtcgacctccctggttgaagcgaccctcccacctcatcttccccggtagctgggactacgggcgcgcgccaccacccccggctaatatcttttatttttatttttatttttagagatgaggccttggtgtgttgcgcaggctggtctctaactcctcagctcaagcaatcctctctcagccccctcagagtgctgagattacaggcgtgagccaccatgcccggcccccctcatcttctgaacttcctttcagtcgtttaattaacagagggggccgggtgcagtggctcacacctgtaatcc

SEQ ID NO: 2401 - DNA, 6000 bp, Homo sapiens
ggtacttccgaggacggccacgtcgatttctgaaggaagtgacacagacacaagggtcaccggaaacctgtaggagaaggcctagaccttgccaccctatggctggtcatagggtgaggccacagaggcacagtggtctgagaactaaggtgagcctggactctgtccttaaaaacacatagggtgggcctaaaaacctctagtatgagcctgaaagttccccatccttaggcactagaagaatggggttaaagccatatgaatgtaaaaagcaggacatgctcactccggttgttttataagcactgccccaccccacctctcatgttctcctgcacatatttttcttttcctatcagagctaacccaggtcttgccattccatctattccacctcccgtgcccatccccccaggcagggggacctcctcacagcctagggatacaaggaatcgaaaagcagtaaaacactgagagggccaagtgaggactccacttacccagtgggagtcagtggggctttgtctacacggagtttcttcctgggctccataaggaccggtggcgggttctcaggaggctcactctcatcatccagttccgccaacactcggtgaacagatttcctccgattgcgttgtggtggagcagaaggcgtggtccccatttccccaggtggggcgggaacaggcaggctctttggtccaccccaactaggggagaaggtgaggggctggggccggagcttgctgaggctgcctatggagtttaggatcagtgtggccttgggggcaggggagaaggtgctgagaggccgctgtggagccccctgggagggcagcataggccggaaaccagccccaacccgggcttctcccctagaccgtgggatggtaatggcagcaaagtcctgaggcttgactcgtacttgttggaacatgaagtagaactccgaggggctggttcctgggggcccttcagggccaaaggtcaggaggtctccatcactcaattccagcctgtgacctcttgggagtcggacattattgaccaaagtacctgttgatggtggggcaccaggcaaatatggaggacaaaaacagaaatgaccagagtcaggagtggagaaatctgtatgatttctggggaagaatatgaaactgtagtcagattctccctcacatcctaagcccctcagcaggtgacaggtaccaggcagtacactccttgtcagctaggaacaagtctgtgtttcttgtgctttcctacaaaggatccctgccctcactgtcctaaggtccaattttctttctttcttctttttttttctttctttctttttttttttttttgagatggagttttgctctattgcccaagctggagtgcagtagtgcaatctcagctcactgcactccgcctcccaggttcaagcaattctcctgcctcagcctcctgagtagctgggattacaggcatgtgccaccacgtctggctaatttttttatttttagcagagacagggttttaccatgttggccaggctggtctcatactcctgacctcctgatctgcccgcctcagcctcccaaagtgctgggattacaggcgtgagccaccgtgccccgccctaaggtccagttttcaaacatgctcactctcccccagctccagctcgttcagatcctagctctaccacttaccagttatgtgaccctgggcaagctttttgtttgtttgtttgtttgagatggagtctcgctctgtcgcccaagctggagtgcagtggtgcgatctcagctcactgcaacctccgcctcccgggttcaagtgattctgctgcttcagcctcctgagtagctggggttacaggtgcacgccaccacacctggctaatttttgtatttttttttcagcacagatggggtttcaacatgttggtcaggatggtctcgaactcctgacctcgtgatctgcccatctcggcctcccaaagtgctgggattacaggcgtgagccaccgtgcccaggcttttttaaaaaaattaattaattttttggtagagacaggttttcaccatgttgcccaggctggtctcgaactcctgagctcaagtgatccaccctgccttagcctcccaaagtgctggattataggtgtaaaccaccatgcccagccctggacaagttccttaacctctttgtgcctcattttcctttactgtaaatgaggataatattagtaccacctacattcaatacacttaaaatagggcctggctcataacagtaagcactagatgaatgttggctactatagtctaataaccataacactcctacagctgactttaccaagaggcagtggcaaaactcaaatgtgaatctaggctttctgaggctaactgcctcaagtcacggagaaagacatgcccagattattaaaaacattattcaacatagaactgccctaacccaggaacagagtgcctcagcaaagctggaaactgaatcaagtctaaacttggcctctagtggcctcagaacatccccactgtgatatctttctgatgatatcccaggtcctgtatgagctaaacgggaccaaaaagggtcagtctggcagagagcttctgactgtgcacacttctggtgggaagatgaaggtctggaccacgaccatccatccaatctgatgggagtatgggaggcaggcagcagggtcttgtggagaccttactcattccagcctggcgcttcaaccacccaggggcaaagctgccctgcttaatgctcaccttggctgctgtggtcttccaggctgaccctccagtcatcaccccggggctcggcatgcagttcggcgtggatcccagagatgaggccaggctcctgctggggccgcagggccacatcacacaggtcggccctgtggcccaagcgataggtgcagccagccccggcgggggggtggaaggtgtagagatcaccgcccctgccgccccctatgcgcagcagttggaagcagggcagcatgggcggtgccccctctgcaccacctcttccacttcaggcatccatttcctttcccactcctgggccacgcaccgctggcttaagttcgcttcccagtctgatgcaaacttgagttgtgctgtatgcggtttcaactttgagcacactacctgaatagcccaaattcagagtgcaagcagcctaggactcaatgcaaaattggttaagccgacttgcaaatgaaaaattccaggaaggtctccgtgcaatgcaaactcaggaacacgtcctatggcacctcacttgagctggatcctcagatcgcaaaatatttggggagcctccaatctgcaaggcaaggatactttaggcagctcctgtgtgtgtcggggtggcggggcgcggggaaggaggtcctgttatacacacgtctacgtgcaatacgaacacatcacctctgtgtaattcggagaagagtagcttcttcctgtcaaacttgcttatcctaatagagcactcctgcttgcctgcgccccgatcttctggccaatccctcactcataactggttgaacctccgagggcaatgaatccactgtcatcccccaaaagaaagtgcaaacgagtccttaagtactccaacaaattggacctaaacccctacttcccggcttctctaggtgggataaaaacaggaaggagctccccgcgatcatgcaaggcatacccggccttttcccactccgccccagccccgtttcggatctacccgcgcggcgcagtctccgagtagcctcctcttcaagcagtgccagcctgtgcggcggatcccgggaccccttgggctcctcggcaggagccgacgttgctgcatctgtttgacagccaagaagccggggccaggaggggcgcggcctctgcgcgcgggcagcgcctacccctccttcggaattcccgggcccgaacttcgcgccgagcgagcccgcccccgtgccgttcccgattggccagctcatgtgttctcttccgcgccattggacagcgccccaagatctcccgccttccactttttctgattagttcacaagttttcccgggttgccgcagtgaggaggagccgcctgggcgcggagatgctccgacgcatttagtgggcccaaatttagacgccactgcgcctgcgtacacctttccccctcctcccaacagagtgaaataggactttagggcgcccgccttgcgcaggcgcggtcaggggcagaggcggggccgggagcgaggcgtagggggtgtggccaaagcgcagtagggggctctcgcggttggtaagggacgttcgggaagagtcggttgggggcgggaaggggctgagcgggggtcctgggagggttcaaggggtccaaaggggaagggggtacaggggccaggtgaagggacagatgaagagatcagaacagccttagagctcacgggctaactgggtgaagcctcgggtatctaggggagcagtggtgggagagtagagccggctagcgtacagggggcgagggcaggctattgagagatgggggtgagggtcaggaccagaataattccttcagaaaaaggtagattaggttgtaaaaagggacgggagtagggatcccagattcgggtaaaaaatagattaatgagggtgggagggtgggaggaagatcttaaagtgcccactatgtgttaggactcgagaaagaggaggcgggcagcaggcatggaagctaaggggatagtagagagaagctgagagaacagccgcaggaaagatttgaataagatgtcaggacgctggcttttctgcctggggatctaggcggcctggattcccaaggtcttggggagggtctagccctgcatgtggccacattcagctggggccaggccttgggccagcactttaacagggaaggacccaagagtcatggcctgctggtgtctggatgggcttccctcaggccttgctgagccatggagagaactctggagatggcgctcaagacccctgcactgtgtacctcctttctcacctctggccaggagcagcagggaccatagaaacttaaggaggagggtagaggcactgcccagaatcctgaaagtatgagtaaagcctcagagcccctctcagtctgtctctttcagtaaattctctccacttgatagttgcttgggttccatgaggaaccaggttgagacaagcaagtgaatttggggtatctcctactttggggaagtaggaaaagagctaagcatcgggtggacctggctataattcaaggattatgactttgttattgtaggggctttctctttggaaggtggcctgaaaattgaattggagtgtctttgtttctcctcttgtccaggggaacatagatggctggagacagaatctagagccttcaaataatgtggagatgtttccaccttcaggtcagtgggaccagacaaggggagtggtggttgtctctgcctgggaaactgaccatctttgtttttgtaattcttcaggttccactgggctgattcccccctcccactttcaagctcggcccctttcaactctgccaagaatggctcccacctggctctcagacattcccctggtccaacccccaggccatcaagatgtctcagagaggcggctagacacccagagacctcaagtgaccatgtgggaacgggatgtttccagtgacaggcaggagccagggcggagaggcaggtagggatccatccacgccgttttctcaggcttgcttgctagtgacccttcctcactggaataaactccttaccctatttcggccctagtttccagaacgtactcatttttatgtaagcaattagttcctacagtgcataaataataaagcagtgtgctaagtgctagggatgaggataacaatagtgaataagacaaatcctgacttaaatttgtaattaataa

SEQ ID NO: 2402 - DNA, 6000 bp, Homo sapiens
ttgttggcagcaggactagccacagagtagggaagttttggggccaggccctaggttttcccagaatgccttgggtgatgccaccaagaaccttaagaactccctcttacattttccatcggttgcaggcatggcttttgcaactgataggtgctctgactacagatattctggtgtccatggcaacatggccttatggcttgtaatagtgggaacttccagctcactggcaatttcctggaggtggcaatatctttggcaggaaaccatctcttctgtcttggccaccagggtctgctccaggccctgaatgagtccacatcaatccatccttcttccctgtagtcattccctcctggggagggaagggaaggggggtatttatcagacctatttgctcgctgctgtgtctactcatgggcaggtgtgtccgatggtgccttggcagtggaccttaggtctgaatgccagcccggcaccctgggcatcggaagtcggcctccctggcagcctggatgctgcagccaacacaggccacatggaaccagacgtcacagccatcacactgaacccaggccactgtctcttcctggggcaggcagcaacaaggagctgcacagggctccccgcccccaactgcagggggagccatgggagcgctcactgggtacttccgaggacggccacgtcgatttctgaaggaagtgacacagacacaagggtcaccggaaacctgtaggagaaggcctagaccttgccaccctatggctggtcatagggtgaggccacagaggcacagtggtctgagaactaaggtgagcctggactctgtccttaaaaacacatagggtgggcctaaaaacctctagtatgagcctgaaagttccccatccttaggcactagaagaatggggttaaagccatatgaatgtaaaaagcaggacatgctcactccggttgttttataagcactgccccaccccacctctcatgttctcctgcacatatttttcttttcctatcagagctaacccaggtcttgccattccatctattccacctcccgtgcccatccccccaggcagggggacctcctcacagcctagggatacaaggaatcgaaaagcagtaaaacactgagagggccaagtgaggactccacttacccagtgggagtcagtggggctttgtctacacggagtttcttcctgggctccataaggaccggtggcgggttctcaggaggctcactctcatcatccagttccgccaacactcggtgaacagatttcctccgattgcgttgtggtggagcagaaggcgtggtccccatttccccaggtggggcgggaacaggcaggctctttggtccaccccaactaggggagaaggtgaggggctggggccggagcttgctgaggctgcctatggagtttaggatcagtgtggccttgggggcaggggagaaggtgctgagaggccgctgtggagccccctgggagggcagcataggccggaaaccagccccaacccgggcttctcccctagaccgtgggatggtaatggcagcaaagtcctgaggcttgactcgtacttgttggaacatgaagtagaactccgaggggctggttcctgggggcccttcagggccaaaggtcaggaggtctccatcactcaattccagcctgtgacctcttgggagtcggacattattgaccaaagtacctgttgatggtggggcaccaggcaaatatggaggacaaaaacagaaatgaccagagtcaggagtggagaaatctgtatgatttctggggaagaatatgaaactgtagtcagattctccctcacatcctaagcccctcagcaggtgacaggtaccaggcagtacactccttgtcagctaggaacaagtctgtgtttcttgtgctttcctacaaaggatccctgccctcactgtcctaaggtccaattttctttctttcttctttttttttctttctttctttttttttttttttgagatggagttttgctctattgcccaagctggagtgcagtagtgcaatctcagctcactgcactccgcctcccaggttcaagcaattctcctgcctcagcctcctgagtagctgggattacaggcatgtgccaccacgtctggctaatttttttatttttagcagagacagggttttaccatgttggccaggctggtctcatactcctgacctcctgatctgcccgcctcagcctcccaaagtgctgggattacaggcgtgagccaccgtgccccgccctaaggtccagttttcaaacatgctcactctcccccagctccagctcgttcagatcctagctctaccacttaccagttatgtgaccctgggcaagctttttgtttgtttgtttgtttgagatggagtctcgctctgtcgcccaagctggagtgcagtggtgcgatctcagctcactgcaacctccgcctcccgggttcaagtgattctgctgcttcagcctcctgagtagctggggttacaggtgcacgccaccacacctggctaatttttgtatttttttttcagcacagatggggtttcaacatgttggtcaggatggtctcgaactcctgacctcgtgatctgcccatctcggcctcccaaagtgctgggattacaggcgtgagccaccgtgcccaggcttttttaaaaaaattaattaattttttggtagagacaggttttcaccatgttgcccaggctggtctcgaactcctgagctcaagtgatccaccctgccttagcctcccaaagtgctggattataggtgtaaaccaccatgcccagccctggacaagttccttaacctctttgtgcctcattttcctttactgtaaatgaggataatattagtaccacctacattcaatacacttaaaatagggcctggctcataacagtaagcactagatgaatgttggctactatagtctaataaccataacactcctacagctgactttaccaagaggcagtggcaaaactcaaatgtgaatctaggctttctgaggctaactgcctcaagtcacggagaaagacatgcccagattattaaaaacattattcaacatagaactgccctaacccaggaacagagtgcctcagcaaagctggaaactgaatcaagtctaaacttggcctctagtggcctcagaacatccccactgtgatatctttctgatgatatcccaggtcctgtatgagctaaacgggaccaaaaagggtcagtctggcagagagcttctgactgtgcacacttctggtgggaagatgaaggtctggaccacgaccatccatccaatctgatgggagtatgggaggcaggcagcagggtcttgtggagaccttactcattccagcctggcgcttcaaccacccaggggcaaagctgccctgcttaatgctcaccttggctgctgtggtcttccaggctgaccctccagtcatcaccccggggctcggcatgcagttcggcgtggatcccagagatgaggccaggctcctgctggggccgcagggccacatcacacaggtcggccctgtggcccaagcgataggtgcagccagccccggcgggggggtggaaggtgtagagatcaccgcccctgccgccccctatgcgcagcagttggaagcagggcagcatgggcggtgccccctctgcaccacctcttccacttcaggcatccatttcctttcccactcctgggccacgcaccgctggcttaagttcgcttcccagtctgatgcaaacttgagttgtgctgtatgcggtttcaactttgagcacactacctgaatagcccaaattcagagtgcaagcagcctaggactcaatgcaaaattggttaagccgacttgcaaatgaaaaattccaggaaggtctccgtgcaatgcaaactcaggaacacgtcctatggcacctcacttgagctggatcctcagatcgcaaaatatttggggagcctccaatctgcaaggcaaggatactttaggcagctcctgtgtgtgtcggggtggcggggcgcggggaaggaggtcctgttatacacacgtctacgtgcaatacgaacacatcacctctgtgtaattcggagaagagtagcttcttcctgtcaaacttgcttatcctaatagagcactcctgcttgcctgcgccccgatcttctggccaatccctcactcataactggttgaacctccgagggcaatgaatccactgtcatcccccaaaagaaagtgcaaacgagtccttaagtactccaacaaattggacctaaacccctacttcccggcttctctaggtgggataaaaacaggaaggagctccccgcgatcatgcaaggcatacccggccttttcccactccgccccagccccgtttcggatctacccgcgcggcgcagtctccgagtagcctcctcttcaagcagtgccagcctgtgcggcggatcccgggaccccttgggctcctcggcaggagccgacgttgctgcatctgtttgacagccaagaagccggggccaggaggggcgcggcctctgcgcgcgggcagcgcctacccctccttcggaattcccgggcccgaacttcgcgccgagcgagcccgcccccgtgccgttcccgattggccagctcatgtgttctcttccgcgccattggacagcgccccaagatctcccgccttccactttttctgattagttcacaagttttcccgggttgccgcagtgaggaggagccgcctgggcgcggagatgctccgacgcatttagtgggcccaaatttagacgccactgcgcctgcgtacacctttccccctcctcccaacagagtgaaataggactttagggcgcccgccttgcgcaggcgcggtcaggggcagaggcggggccgggagcgaggcgtagggggtgtggccaaagcgcagtagggggctctcgcggttggtaagggacgttcgggaagagtcggttgggggcgggaaggggctgagcgggggtcctgggagggttcaaggggtccaaaggggaagggggtacaggggccaggtgaagggacagatgaagagatcagaacagccttagagctcacgggctaactgggtgaagcctcgggtatctaggggagcagtggtgggagagtagagccggctagcgtacagggggcgagggcaggctattgagagatgggggtgagggtcaggaccagaataattccttcagaaaaaggtagattaggttgtaaaaagggacgggagtagggatcccagattcgggtaaaaaatagattaatgagggtgggagggtgggaggaagatcttaaagtgcccactatgtgttaggactcgagaaagaggaggcgggcagcaggcatggaagctaaggggatagtagagagaagctgagagaacagccgcaggaaagatttgaataagatgtcaggacgctggcttttctgcctggggatctaggcggcctggattcccaaggtcttggggagggtctagccctgcatgtggccacattcagctggggccaggccttgggccagcactttaacagggaaggacccaagagtcatggcctgctggtgtctggatgggcttccctcaggccttgctgagccatggagagaactctggagatggcgctcaagacccctgcactgtgtacctcctttctcacctctggccaggagcagcagggaccatagaaacttaaggaggagggtagaggcactgcccagaatcctgaaagtatgagtaaagcctcagagcccctctcagtctgtctctttcagtaaattctctccacttgatagttgcttgggttccatgaggaaccaggttgagacaagcaagtgaatttggggtatctcctactttggggaagtaggaaaagagctaagcatcgggtggacctggctataattcaaggattat

SEQ ID NO: 2403 - DNA, 6000 bp, Homo sapiens
cagtctcggctcactgcaacctccactgcccaggttcaagtgattctcctgcctcggcctcccaagtagctgggattacaggtgcgcaccaccacgcctggtgaatttttgtatttttagtagagacagggtttcgccatgttggccaggctggtcttgaactcctgaccttgtgatctgcctgcttcggcctcccaaaatgctgggattacaggcgtgagccactgcgcccagggctatggtttctttccttgacatgtcaactggttacagtggccttccctgaaccccagactaagttagtgctttctagtccttctccttcaaggcattcctcctgattgcaattaattatgattaaattaaatgtggatgtgtatatcccccacgaggctgtcagttccatccacgaaggcaggactcaggctaatttggtcactgagtcttagagatggcaaagagtaagtactgagtttgaggactgaataatctctctctcccagtccaccatagcccccttatacccaccttcctcactgccctccacaatacccctgatgaattggtacctggagtaaagtagggaggcaaactatttcctactagaaagggaagcagggcttcaagtggtgggaggccacctgagtcttgggggaaaagtgcaacctgaattaagataaaagtacccaaattctccatctttctaggccatgtgtgtttattttcaccaaaggtctcatcactctactactcactactcatggagggtcttttctgcaatacctgttctttgcttggaagctactgcccagctctccgttatgaatttgaatcctttctacccctgcattcacctgctcttggtgcagcctctgaacctcttccagctcccgctggctcccctcttccaagttcttccggacaacctcagccccagccaaagcagcacgcaggccctcagcctcagctcggccggccttctccgcccgtgccagagcctctagctccatggcctgggcctctagcctcatcttctgctgcagcgaggtctcccgcaggagccggacctcctcctccagccgccgcagctcttgcagctgccgaacgatcacctcagcctgctggctcagggcctgtgacccctccagcccccaggaccttcaaagacaggttagtgcaggtgagacttgtctccagtgctggaaggatagttgagggcataaacatagccaggagaaggaaaagaggacccctctgcttccgtgtggggaggtgaagggggtgctgaagctggggtatggggatgtctgcattgacatcatcatcattcatcaaagccctattgagcatgttgagtccagtgcctggactcacaggacctaaagtctggctgagatcgtggaacatgatctccctagagagagctacatacaggaggattcaacatcaaatgtgtatatcattaggccacacattctttttgttttttggtggtttttttgtcttatttatttttttatttttaggccacacattttaagtggaaaggttggaagaacacacagggacttctcaattctaatttaagggcaagaagtttgagggaggaatgggcatagagaggtcgtaagcttccagtatcaatatggtgaggccaggtgctagttaaaaggcatttattggctgggcgcggtggctcatgcctgtaatcccagcactttgggaggccgaggcgggcggatcacgaggtcaggagatcgagatcatcctggttaacacggtgaaaccccatctctactaaaaatataaaaaactagctgggcatggtggcaggtgcctgtagtcccagctgcttgggaggctgaggcaggagaatggcgtcaacctgggaggcagagcttgcagtgagccaagatctccccagtgcactccagcctgggcgacagagtgagactccatctcaaaaaaaaggcatttattgagtgttaggtatactttatgaggagtctgagagaacagtacataaataacacagtgccagcctttagagaaatcgtctaccaatgtcacgtgaagtttaatccagcttggaacatggctcctgaggcagctctctgagacccaggactataagagattgttgttgttgtcgtttttagagacagggtatcactgtgtcacccaggcctcaatgcagtggctggatcataggtcactgcagtcttcaacttctgagctcaaggggtcctaccaccttagcctcctgagtagctaggactacaaatgcatgccaccacagccagctaattattttctgtggagacggagtctcgctttgttgcccacgctggtcatgaactcctgggctcaagtgatcctcctgcctcagctcccaaagtgctaggattataggtgtgagccgccatatctggctcgctctttctttctttctttagtagcagcgatctgtaggctagggaaattaagtgacttgccaaatgtcctctagctggtagccaaactagaaatagagtctctgtctcctgacacccagtctagtattccttcttcatcatgctgcttcttctaatgtaatcctattctggagcaaaatggcagaatgatatcccagtacatctgggaaaagacacatgaaacaagaataagaatgtttacagataatacgacagcatggccagctcccacagcatgtcctctgtaaaggctttcttccatcagaatgaacccacactgccacagtgctgggtctctacctctagtttgcacttcttcatcttgcctcataccatgctttaccatcagctggtggtcaatctatctcccctcttaggattttagattccttattaattacaaatttaagtcaggatttgtcttattcactattgttatcctcatccctagcacttagcacactgctttattatttatgcactgtaggaactaattgcttacataaaaatgagtacgttctggaaactagggccgaaatagggtaaggagtttattccagtgaggaagggtcactagcaagcaagcctgagaaaacggcgtggatggatccctacctgcctctccgccctggctcctgcctgtcactggaaacatcccgttcccacatggtcacttgaggtctctgggtgtctagccgcctctctgagacatcttgatggcctgggggttggaccaggggaatgtctgagagccaggtgggagccattcttggcagagttgaaaggggccgagcttgaaagtgggaggggggaatcagcccagtggaacctgaagaattacaaaaacaaagatggtcagtttcccaggcagagacaaccaccactccccttgtctggtcccactgacctgaaggtggaaacatctccacattatttgaaggctctagattctgtctccagccatctatgttcccctggacaagaggagaaacaaagacactccaattcaattttcaggccaccttccaaagagaaagcccctacaataacaaagtcataatccttgaattatagccaggtccacccgatgcttagctcttttcctacttccccaaagtaggagataccccaaattcacttgcttgtctcaacctggttcctcatggaacccaagcaactatcaagtggagagaatttactgaaagagacagactgagaggggctctgaggctttactcatactttcaggattctgggcagtgcctctaccctcctccttaagtttctatggtccctgctgctcctggccagaggtgagaaaggaggtacacagtgcaggggtcttgagcgccatctccagagttctctccatggctcagcaaggcctgagggaagcccatccagacaccagcaggccatgactcttgggtccttccctgttaaagtgctggcccaaggcctggccccagctgaatgtggccacatgcagggctagaccctccccaagaccttgggaatccaggccgcctagatccccaggcagaaaagccagcgtcctgacatcttattcaaatctttcctgcggctgttctctcagcttctctctactatccccttagcttccatgcctgctgcccgcctcctctttctcgagtcctaacacatagtgggcactttaagatcttcctcccaccctcccaccctcattaatctattttttacccgaatctgggatccctactcccgtccctttttacaacctaatctacctttttctgaaggaattattctggtcctgaccctcacccccatctctcaatagcctgccctcgccccctgtacgctagccggctctactctcccaccactgctcccctagatacccgaggcttcacccagttagcccgtgagctctaaggctgttctgatctcttcatctgtcccttcacctggcccctgtacccccttcccctttggaccccttgaaccctcccaggacccccgctcagccccttcccgcccccaaccgactcttcccgaacgtcccttaccaaccgcgagagccccctactgcgctttggccacaccccctacgcctcgctcccggccccgcctctgcccctgaccgcgcctgcgcaaggcgggcgccctaaagtcctatttcactctgttgggaggagggggaaaggtgtacgcaggcgcagtggcgtctaaatttgggcccactaaatgcgtcggagcatctccgcgcccaggcggctcctcctcactgcggcaacccgggaaaacttgtgaactaatcagaaaaagtggaaggcgggagatcttggggcgctgtccaatggcgcggaagagaacacatgagctggccaatcgggaacggcacgggggcgggctcgctcggcgcgaagttcgggcccgggaattccgaaggaggggtaggcgctgcccgcgcgcagaggccgcgcccctcctggccccggcttcttggctgtcaaacagatgcagcaacgtcggctcctgccgaggagcccaaggggtcccgggatccgccgcacaggctggcactgcttgaagaggaggctactcggagactgcgccgcgcgggtagatccgaaacggggctggggcggagtgggaaaaggccgggtatgccttgcatgatcgcggggagctccttcctgtttttatcccacctagagaagccgggaagtaggggtttaggtccaatttgttggagtacttaaggactcgtttgcactttcttttgggggatgacagtggattcattgccctcggaggttcaaccagttatgagtgagggattggccagaagatcggggcgcaggcaagcaggagtgctctattaggataagcaagtttgacaggaagaagctactcttctccgaattacacagaggtgatgtgttcgtattgcacgtagacgtgtgtataacaggacctccttccccgcgccccgccaccccgacacacacaggagctgcctaaagtatccttgccttgcagattggaggctccccaaatattttgcgatctgaggatccagctcaagtgaggtgccataggacgtgttcctgagtttgcattgcacggagaccttcctggaatttttcatttgcaagtcggcttaaccaattttgcattgagtcctaggctgcttgcactctgaatttgggctattcaggtagtgtgctcaaagttgaaaccgcatacagcacaactcaagtttgcatcagactgggaagcgaacttaagccagcggtgcgtggcccaggagtgggaaaggaaatggatgcctgaagtggaagaggtggtgcagagggggcaccgcccatgctgccctgcttccaactgctgcgcatagggggcggcaggggcggtgatctctacaccttccacccccccgccggggctggctgcacctatcgcttgggccacagggccgacctgtgtgatgtggccctgcggccccagcaggagcctggcctcatctctgggatccacg

SEQ ID NO: 2404 - DNA, 6000 bp, Homo sapiens
tgaatcctttctacccctgcattcacctgctcttggtgcagcctctgaacctcttccagctcccgctggctcccctcttccaagttcttccggacaacctcagccccagccaaagcagcacgcaggccctcagcctcagctcggccggccttctccgcccgtgccagagcctctagctccatggcctgggcctctagcctcatcttctgctgcagcgaggtctcccgcaggagccggacctcctcctccagccgccgcagctcttgcagctgccgaacgatcacctcagcctgctggctcagggcctgtgacccctccagcccccaggaccttcaaagacaggttagtgcaggtgagacttgtctccagtgctggaaggatagttgagggcataaacatagccaggagaaggaaaagaggacccctctgcttccgtgtggggaggtgaagggggtgctgaagctggggtatggggatgtctgcattgacatcatcatcattcatcaaagccctattgagcatgttgagtccagtgcctggactcacaggacctaaagtctggctgagatcgtggaacatgatctccctagagagagctacatacaggaggattcaacatcaaatgtgtatatcattaggccacacattctttttgttttttggtggtttttttgtcttatttatttttttatttttaggccacacattttaagtggaaaggttggaagaacacacagggacttctcaattctaatttaagggcaagaagtttgagggaggaatgggcatagagaggtcgtaagcttccagtatcaatatggtgaggccaggtgctagttaaaaggcatttattggctgggcgcggtggctcatgcctgtaatcccagcactttgggaggccgaggcgggcggatcacgaggtcaggagatcgagatcatcctggttaacacggtgaaaccccatctctactaaaaatataaaaaactagctgggcatggtggcaggtgcctgtagtcccagctgcttgggaggctgaggcaggagaatggcgtcaacctgggaggcagagcttgcagtgagccaagatctccccagtgcactccagcctgggcgacagagtgagactccatctcaaaaaaaaggcatttattgagtgttaggtatactttatgaggagtctgagagaacagtacataaataacacagtgccagcctttagagaaatcgtctaccaatgtcacgtgaagtttaatccagcttggaacatggctcctgaggcagctctctgagacccaggactataagagattgttgttgttgtcgtttttagagacagggtatcactgtgtcacccaggcctcaatgcagtggctggatcataggtcactgcagtcttcaacttctgagctcaaggggtcctaccaccttagcctcctgagtagctaggactacaaatgcatgccaccacagccagctaattattttctgtggagacggagtctcgctttgttgcccacgctggtcatgaactcctgggctcaagtgatcctcctgcctcagctcccaaagtgctaggattataggtgtgagccgccatatctggctcgctctttctttctttctttagtagcagcgatctgtaggctagggaaattaagtgacttgccaaatgtcctctagctggtagccaaactagaaatagagtctctgtctcctgacacccagtctagtattccttcttcatcatgctgcttcttctaatgtaatcctattctggagcaaaatggcagaatgatatcccagtacatctgggaaaagacacatgaaacaagaataagaatgtttacagataatacgacagcatggccagctcccacagcatgtcctctgtaaaggctttcttccatcagaatgaacccacactgccacagtgctgggtctctacctctagtttgcacttcttcatcttgcctcataccatgctttaccatcagctggtggtcaatctatctcccctcttaggattttagattccttattaattacaaatttaagtcaggatttgtcttattcactattgttatcctcatccctagcacttagcacactgctttattatttatgcactgtaggaactaattgcttacataaaaatgagtacgttctggaaactagggccgaaatagggtaaggagtttattccagtgaggaagggtcactagcaagcaagcctgagaaaacggcgtggatggatccctacctgcctctccgccctggctcctgcctgtcactggaaacatcccgttcccacatggtcacttgaggtctctgggtgtctagccgcctctctgagacatcttgatggcctgggggttggaccaggggaatgtctgagagccaggtgggagccattcttggcagagttgaaaggggccgagcttgaaagtgggaggggggaatcagcccagtggaacctgaagaattacaaaaacaaagatggtcagtttcccaggcagagacaaccaccactccccttgtctggtcccactgacctgaaggtggaaacatctccacattatttgaaggctctagattctgtctccagccatctatgttcccctggacaagaggagaaacaaagacactccaattcaattttcaggccaccttccaaagagaaagcccctacaataacaaagtcataatccttgaattatagccaggtccacccgatgcttagctcttttcctacttccccaaagtaggagataccccaaattcacttgcttgtctcaacctggttcctcatggaacccaagcaactatcaagtggagagaatttactgaaagagacagactgagaggggctctgaggctttactcatactttcaggattctgggcagtgcctctaccctcctccttaagtttctatggtccctgctgctcctggccagaggtgagaaaggaggtacacagtgcaggggtcttgagcgccatctccagagttctctccatggctcagcaaggcctgagggaagcccatccagacaccagcaggccatgactcttgggtccttccctgttaaagtgctggcccaaggcctggccccagctgaatgtggccacatgcagggctagaccctccccaagaccttgggaatccaggccgcctagatccccaggcagaaaagccagcgtcctgacatcttattcaaatctttcctgcggctgttctctcagcttctctctactatccccttagcttccatgcctgctgcccgcctcctctttctcgagtcctaacacatagtgggcactttaagatcttcctcccaccctcccaccctcattaatctattttttacccgaatctgggatccctactcccgtccctttttacaacctaatctacctttttctgaaggaattattctggtcctgaccctcacccccatctctcaatagcctgccctcgccccctgtacgctagccggctctactctcccaccactgctcccctagatacccgaggcttcacccagttagcccgtgagctctaaggctgttctgatctcttcatctgtcccttcacctggcccctgtacccccttcccctttggaccccttgaaccctcccaggacccccgctcagccccttcccgcccccaaccgactcttcccgaacgtcccttaccaaccgcgagagccccctactgcgctttggccacaccccctacgcctcgctcccggccccgcctctgcccctgaccgcgcctgcgcaaggcgggcgccctaaagtcctatttcactctgttgggaggagggggaaaggtgtacgcaggcgcagtggcgtctaaatttgggcccactaaatgcgtcggagcatctccgcgcccaggcggctcctcctcactgcggcaacccgggaaaacttgtgaactaatcagaaaaagtggaaggcgggagatcttggggcgctgtccaatggcgcggaagagaacacatgagctggccaatcgggaacggcacgggggcgggctcgctcggcgcgaagttcgggcccgggaattccgaaggaggggtaggcgctgcccgcgcgcagaggccgcgcccctcctggccccggcttcttggctgtcaaacagatgcagcaacgtcggctcctgccgaggagcccaaggggtcccgggatccgccgcacaggctggcactgcttgaagaggaggctactcggagactgcgccgcgcgggtagatccgaaacggggctggggcggagtgggaaaaggccgggtatgccttgcatgatcgcggggagctccttcctgtttttatcccacctagagaagccgggaagtaggggtttaggtccaatttgttggagtacttaaggactcgtttgcactttcttttgggggatgacagtggattcattgccctcggaggttcaaccagttatgagtgagggattggccagaagatcggggcgcaggcaagcaggagtgctctattaggataagcaagtttgacaggaagaagctactcttctccgaattacacagaggtgatgtgttcgtattgcacgtagacgtgtgtataacaggacctccttccccgcgccccgccaccccgacacacacaggagctgcctaaagtatccttgccttgcagattggaggctccccaaatattttgcgatctgaggatccagctcaagtgaggtgccataggacgtgttcctgagtttgcattgcacggagaccttcctggaatttttcatttgcaagtcggcttaaccaattttgcattgagtcctaggctgcttgcactctgaatttgggctattcaggtagtgtgctcaaagttgaaaccgcatacagcacaactcaagtttgcatcagactgggaagcgaacttaagccagcggtgcgtggcccaggagtgggaaaggaaatggatgcctgaagtggaagaggtggtgcagagggggcaccgcccatgctgccctgcttccaactgctgcgcatagggggcggcaggggcggtgatctctacaccttccacccccccgccggggctggctgcacctatcgcttgggccacagggccgacctgtgtgatgtggccctgcggccccagcaggagcctggcctcatctctgggatccacgccgaactgcatgccgagccccggggtgatgactggagggtcagcctggaagaccacagcagccaaggtgagcattaagcagggcagctttgcccctgggtggttgaagcgccaggctggaatgagtaaggtctccacaagaccctgctgcctgcctcccatactcccatcagattggatggatggtcgtggtccagaccttcatcttcccaccagaagtgtgcacagtcagaagctctctgccagactgaccctttttggtcccgtttagctcatacaggacctgggatatcatcagaaagatatcacagtggggatgttctgaggccactagaggccaagtttagacttgattcagtttccagctttgctgaggcactctgttcctgggttagggcagttctatgttgaataatgtttttaataatctgggcatgtctttctccgtgacttgaggcagttagcctcagaaagcctagattcacatttgagttttgccactgcctcttggtaaagtcagctgtaggagtgttatggttattagactatagtagccaacattcatctagtgcttactgttatgagccaggccctattttaagtgtattgaatgtaggtggtactaatattatcctcatttacagtaaaggaaaatgaggcacaaagaggttaaggaacttgtccagggctgggcatggtggtttacacctataatccagcactttgggaggctaaggcagggtggatcacttgagctcaggagttcgagaccagcctgggcaacatggtgaaaacctgtctctaccaaaaaattaattaatttttttaa

SEQ ID NO: 2405 - DNA, 6000 bp, Homo sapiens
taactggtaattatgggtagagtgtcagaactgaattaaactgcaggactcccagttaatatctaccaagaactgaagaattgattggtgtgggagaagtctccacatgattggtgtaagaagtggtgttcttggccaggcgcagtggctcacgcctgtaatcccagcactttgggaggccgaggcgggccgatcatgaggtcaggagattgagaccatcctggctaacatggtgaaaccctgtctctactaaaaatacaaaaaattagccaggcatggtggcgggtgcctgtagtcccagctactcgggaggctgaggcaggagaatcacttgaacctgggaggtggaggttgcagtgagcagagactgcaccactgcactccagcctggccaacagagcaagactccatctcaaaacaaaataaaacaaacaaacaaaaaaaactgagattctttgcaaagagcctggaataacttccttttagtcctggactataatgatgatgataaatatacctcgatgtaaccctgagatcccaagattcactagcccttgaataaaaaaaaggaaaaagaaaaaaacagtatattttttcgttttgcaaatcacagttcccttattaagatggaattgctgccaattacagagaagctatttgcctaagccaaaaatccatgaggttcacatggacttatagttacacaaattagaaacaaatgttatatttaaaaccatagagaaatgcccaggtgatgaaagctggggtgaaggagtctgcacattcatttcaaactgttaaaggatttgtgggccatgcaatggtcccttgcattagagaagtcaaagagctttgtgcaatcctctcctgtctgtgatctggaagacacgtgctcatcacagagctccagctgctccgagactttactcctttcttcagctgcacgcactgctctctcgcttttgttaggaattgactaattcctcctcttcctcttcctcctcctccttgccatctctaggcccagtcagcatctcttgttcatcctctgatcccatgtccagctatggttctggattcaacactagcagcaacagtggcgctgactccactttaggatcaataaatatttttctggctaggcgcagtggctcacatctataatctcagtactttgggaggccaaggtgggtggatcacaaggtcaagagatcgagaccatcttggccaacatggtgaaacctcgtctccactaaaattacaaaaattagttgaacatggtggtgcgcacctgtagtcccagctacttgggaggctgaggcaggagagtcgcttgaacccaggatgtggaggttgaagtgagccaagatcgcgccactgcactccagtctagcgacagatggagactctgtctcaaaaaaaaaaaaataagtatttttctttctagccgtatatccaccttacatggtccctcaactccccaagcccactctgcctgccccatctcctccttccacatcctctcctcaacctagcacttggttggcaatgccttcctcgatcctctgccaaagaccctctagccagtgcttaccctgtctgttctctctctttacccaaagaaatacataaagtttgaccagaatggaaacagagatatcagtgaaaaaaggtgatttggggaagtgtgcaggcctaggaagacagaggcttgttcctttgcttgcttaaaatctttgatcaaacggccaggcgtggtggctcacacctgtaatcccagcactttgggagggcgaggtgggcgaatcatgagatcaggagttcaagaccagcctggccaacatagtaaaaccccgtctcactaaaaatacaaaaaattagccagctgggcgtggtggcaggtgcctgtaatcccagctactctggaggctgaggcaggagaatcacttgaacccgggaggtggaggttgcagtgagtggagattgcaccactgcactctagcctgagtgacagagtgagactccatctcaaaaaaaagaaaagaaatctttgctcaaatatcactttttcagagaacgcttctctaaccactctatttattttattattttattgtattttttgagacagggtctcactctgttgcccagactggagtgtaatggcacggtcatggctcactgcagccttgatctcctgggctcaagcgatcctctcacttcagcctcccaagtggctaggaccacaggcgtaagccaccgtgtctggccagaccaccatatttaaaactggggacaagtcaggctcacacctgtaatcccagcactttgggaggccaaggtgggaggatcacaaggttaggagttcaagaccagcctggccaacttggtgaaaccccatctctactaaaaatacaaaaattagccgggtatagtggtgatcgcctgtaatcccagctattcgttaggctgaggcaggagaatcgcttgaacccgggaggcagaggttgcagtgagctgagattgtgccactgcactccagcctgggcaacagagcgagattctgtctcaacaaaaaaagctgggtgcagtggctcacgcctgtaatcctagcactttgggagtccgaggtgggtagatcacctaaggtcaggagttcaagaccagcctggtcaacatggtgaaaccccgcctctacaaaaatacaaaaattagctaggtatgatggcaggtggctgtaatcccagctactcggaaggctgaggcaggagaatcgcttgaacccaggaggcggaggttacagtgagctgagatcaagccattgcactctagcctgggcgacagagtgagactccgtttaaaaaaaaaacaaaaaacaaaaaacaaaaaactggggaccattggcaataatactcctatgtcccctcttccctactttgttttcctccataggcacctggcgccttttttttttttttttttttttttttgagacggagtctcactctgttgcccaggctggagtgcaatggcgcgatctcagctcactgcaacctctgcctcccgggtttaagcgattcgcctgcgtcagcctcctgagcagctgggattacaggcacgcaccaccaggccctgctaatttttgtatttttagtagagatggggtttcaccatgttggtcaggctggtctccaactcctgaccttgtgatccgcctgccccagcctcccaaagtgctgtgattacaggcgtgagccactgcgcctggccacctagcacctttaatatacttatttatttgtattgtctgccttccccaattagatcaaccatgaagacaagagttttcatttgttgggttctctgggcctagaggcatgtctggcatatagtaagcattcagtaaatatctgttgagtgaacgtatgaataaagaagtgagttcctcccagcaggcactgagaacattgggagtacagggttgcagctctctctgcagcaggagaatgtagctgcaataaagggaagtcaagaagccagagtccagccaggtgcagtggctcatgcctgtaatcccagcactttgggaggctgaggtgggtggatcacaaggtcaagagatagagaccatcctggccaacatggcgaaaccccatctgtactaaaaatacaaaaattagctgggcgtggtggtgggcgcctgtagtcccagctactcaggaggctgaggtaggagaattgcttgaacccaggaggcagtggttgcagtgagccgagattgcaccattgcactcccgcctgggcgacagagcaagactccgactcaaaaaaaaaaaaaaaagcagcagcagcagccagaggccactccagcatctcccctacctggcttgggtcagggagagggcagtgagaagtgaaaactcccagctacagaaaaggaaatatgttggggggaagggagaaggaaaggtgtcttcatcaatgccggggcagggtagatggagccctgggcagggagtttggaccaggaaatctcaatgagggaaatgtgctgtcctcacctctccaagaagcgactggccaaacagagtgacagaggggataaaggttatgcctagggaggcatgtgtcagaggctatcatccactctgttgaacccacagtgaccagcaccaccatcacacaaacatgcctgcatgtgtgcacgcacgtgcagtgtgcaaacctgatgtcagcctcactccctggctcttctgtccacaaacgctgtttctttaagtaccactttcagttcctccaaagaatctacttaaactcttaaattcctgatctctatagattttactaaagatttcaaaggagataagatgagagggttacgttgcacattctaaagcaaacaaattaaaatgttttgttagacatttccatatttttaagggcctccttggagctgccaggctgggagtgaggtttctctccctttctaaaccctgtgcccatcttgtcaccctcctggagctgccagcagacttcagattcttctccgatctacagagcagaaaaattcagccagcccttccttgtcttcctatccacagctgcctgcccagactcatgaaacctgacaaaatgcaaggtcttatcattacctgaaccttggacctgttcaaaaatactagttcctgagaataaatatccctggtgtcttcctgcccttcctgcacacctccagtggcttatcaaaatatttgtttcatgcgcacactgggctctcatttaagaggaatttgggagaatgttattttctaatctgcatttcacaccaggctccccctccttcctggggtgctagtgtcagcagaacctgatggggaagtgaggtctgggaggcagaggaggaaggaatgaggggaaaggggaagtttgggaggaaggcttctgagaagactggtgggagagaaggagagcctgcagacagaggcctccagcttggtctgtctccccacctctaccagcatctgctgagctatgagccaaaccagggatttacagggtagggagggtgggataggcagcggcattagatcggaggaatgagatggacagacctgggctgtgggctaggagggcagtcagctggcctagggtagcccgggctggtgtcagggtaaggagaggaagggagggatgagggctgattaatttttttcaccccacaggaggaaaagctttcggactgctgaaggcccagcaggaagagaggctggatgagatcaacaaggtagaaggaagaactaagggggcagagccagggggatggggcgtggatggggagggcctaccctggctcttattttcccctccatagcaattcctagacgatcccaaatatagcagtgatgaggatctgccctccaaactggaaggcttcaaaggtgagggggaaactgtaggcggtggagacagggctgggggtaggagggttaggatttccacaagaacaaggcaggaacagcagagataaaaagtttacttttgtggtagcaaaaggggaacctgcctttattgccctcctgccacactgcggtccctttcccgggcctgcctctctcagcatcccctctagctccttacaccctagcggggcccctcaactccccaaccccacttcctctgcctgcccctcctcctccttccacgttgtctcctccacctagcagttggttggcaaccccttcctcagtcccctgctgaaaaccctccagtcagcgcttatcccttctgctctctcccctcacccagagaaatacatggagtttgaccttaatggaaatggcgatattggtgagaaacgggtgatttgcgggggcagggtggtgtgcaggcctaagaagacagaggtctctcctacatgctccattcctcatgatttgggagggggcccacctaccacagtgggaggaaggagaatggggatgcggaagtgggagaggagag

SEQ ID NO: 2406 - DNA, 6000 bp, Homo sapiens
ggctaacatggtgaaaccctgtctctactaaaaatacaaaaaattagccaggcatggtggcgggtgcctgtagtcccagctactcgggaggctgaggcaggagaatcacttgaacctgggaggtggaggttgcagtgagcagagactgcaccactgcactccagcctggccaacagagcaagactccatctcaaaacaaaataaaacaaacaaacaaaaaaaactgagattctttgcaaagagcctggaataacttccttttagtcctggactataatgatgatgataaatatacctcgatgtaaccctgagatcccaagattcactagcccttgaataaaaaaaaggaaaaagaaaaaaacagtatattttttcgttttgcaaatcacagttcccttattaagatggaattgctgccaattacagagaagctatttgcctaagccaaaaatccatgaggttcacatggacttatagttacacaaattagaaacaaatgttatatttaaaaccatagagaaatgcccaggtgatgaaagctggggtgaaggagtctgcacattcatttcaaactgttaaaggatttgtgggccatgcaatggtcccttgcattagagaagtcaaagagctttgtgcaatcctctcctgtctgtgatctggaagacacgtgctcatcacagagctccagctgctccgagactttactcctttcttcagctgcacgcactgctctctcgcttttgttaggaattgactaattcctcctcttcctcttcctcctcctccttgccatctctaggcccagtcagcatctcttgttcatcctctgatcccatgtccagctatggttctggattcaacactagcagcaacagtggcgctgactccactttaggatcaataaatatttttctggctaggcgcagtggctcacatctataatctcagtactttgggaggccaaggtgggtggatcacaaggtcaagagatcgagaccatcttggccaacatggtgaaacctcgtctccactaaaattacaaaaattagttgaacatggtggtgcgcacctgtagtcccagctacttgggaggctgaggcaggagagtcgcttgaacccaggatgtggaggttgaagtgagccaagatcgcgccactgcactccagtctagcgacagatggagactctgtctcaaaaaaaaaaaaataagtatttttctttctagccgtatatccaccttacatggtccctcaactccccaagcccactctgcctgccccatctcctccttccacatcctctcctcaacctagcacttggttggcaatgccttcctcgatcctctgccaaagaccctctagccagtgcttaccctgtctgttctctctctttacccaaagaaatacataaagtttgaccagaatggaaacagagatatcagtgaaaaaaggtgatttggggaagtgtgcaggcctaggaagacagaggcttgttcctttgcttgcttaaaatctttgatcaaacggccaggcgtggtggctcacacctgtaatcccagcactttgggagggcgaggtgggcgaatcatgagatcaggagttcaagaccagcctggccaacatagtaaaaccccgtctcactaaaaatacaaaaaattagccagctgggcgtggtggcaggtgcctgtaatcccagctactctggaggctgaggcaggagaatcacttgaacccgggaggtggaggttgcagtgagtggagattgcaccactgcactctagcctgagtgacagagtgagactccatctcaaaaaaaagaaaagaaatctttgctcaaatatcactttttcagagaacgcttctctaaccactctatttattttattattttattgtattttttgagacagggtctcactctgttgcccagactggagtgtaatggcacggtcatggctcactgcagccttgatctcctgggctcaagcgatcctctcacttcagcctcccaagtggctaggaccacaggcgtaagccaccgtgtctggccagaccaccatatttaaaactggggacaagtcaggctcacacctgtaatcccagcactttgggaggccaaggtgggaggatcacaaggttaggagttcaagaccagcctggccaacttggtgaaaccccatctctactaaaaatacaaaaattagccgggtatagtggtgatcgcctgtaatcccagctattcgttaggctgaggcaggagaatcgcttgaacccgggaggcagaggttgcagtgagctgagattgtgccactgcactccagcctgggcaacagagcgagattctgtctcaacaaaaaaagctgggtgcagtggctcacgcctgtaatcctagcactttgggagtccgaggtgggtagatcacctaaggtcaggagttcaagaccagcctggtcaacatggtgaaaccccgcctctacaaaaatacaaaaattagctaggtatgatggcaggtggctgtaatcccagctactcggaaggctgaggcaggagaatcgcttgaacccaggaggcggaggttacagtgagctgagatcaagccattgcactctagcctgggcgacagagtgagactccgtttaaaaaaaaaacaaaaaacaaaaaacaaaaaactggggaccattggcaataatactcctatgtcccctcttccctactttgttttcctccataggcacctggcgccttttttttttttttttttttttttttgagacggagtctcactctgttgcccaggctggagtgcaatggcgcgatctcagctcactgcaacctctgcctcccgggtttaagcgattcgcctgcgtcagcctcctgagcagctgggattacaggcacgcaccaccaggccctgctaatttttgtatttttagtagagatggggtttcaccatgttggtcaggctggtctccaactcctgaccttgtgatccgcctgccccagcctcccaaagtgctgtgattacaggcgtgagccactgcgcctggccacctagcacctttaatatacttatttatttgtattgtctgccttccccaattagatcaaccatgaagacaagagttttcatttgttgggttctctgggcctagaggcatgtctggcatatagtaagcattcagtaaatatctgttgagtgaacgtatgaataaagaagtgagttcctcccagcaggcactgagaacattgggagtacagggttgcagctctctctgcagcaggagaatgtagctgcaataaagggaagtcaagaagccagagtccagccaggtgcagtggctcatgcctgtaatcccagcactttgggaggctgaggtgggtggatcacaaggtcaagagatagagaccatcctggccaacatggcgaaaccccatctgtactaaaaatacaaaaattagctgggcgtggtggtgggcgcctgtagtcccagctactcaggaggctgaggtaggagaattgcttgaacccaggaggcagtggttgcagtgagccgagattgcaccattgcactcccgcctgggcgacagagcaagactccgactcaaaaaaaaaaaaaaaagcagcagcagcagccagaggccactccagcatctcccctacctggcttgggtcagggagagggcagtgagaagtgaaaactcccagctacagaaaaggaaatatgttggggggaagggagaaggaaaggtgtcttcatcaatgccggggcagggtagatggagccctgggcagggagtttggaccaggaaatctcaatgagggaaatgtgctgtcctcacctctccaagaagcgactggccaaacagagtgacagaggggataaaggttatgcctagggaggcatgtgtcagaggctatcatccactctgttgaacccacagtgaccagcaccaccatcacacaaacatgcctgcatgtgtgcacgcacgtgcagtgtgcaaacctgatgtcagcctcactccctggctcttctgtccacaaacgctgtttctttaagtaccactttcagttcctccaaagaatctacttaaactcttaaattcctgatctctatagattttactaaagatttcaaaggagataagatgagagggttacgttgcacattctaaagcaaacaaattaaaatgttttgttagacatttccatatttttaagggcctccttggagctgccaggctgggagtgaggtttctctccctttctaaaccctgtgcccatcttgtcaccctcctggagctgccagcagacttcagattcttctccgatctacagagcagaaaaattcagccagcccttccttgtcttcctatccacagctgcctgcccagactcatgaaacctgacaaaatgcaaggtcttatcattacctgaaccttggacctgttcaaaaatactagttcctgagaataaatatccctggtgtcttcctgcccttcctgcacacctccagtggcttatcaaaatatttgtttcatgcgcacactgggctctcatttaagaggaatttgggagaatgttattttctaatctgcatttcacaccaggctccccctccttcctggggtgctagtgtcagcagaacctgatggggaagtgaggtctgggaggcagaggaggaaggaatgaggggaaaggggaagtttgggaggaaggcttctgagaagactggtgggagagaaggagagcctgcagacagaggcctccagcttggtctgtctccccacctctaccagcatctgctgagctatgagccaaaccagggatttacagggtagggagggtgggataggcagcggcattagatcggaggaatgagatggacagacctgggctgtgggctaggagggcagtcagctggcctagggtagcccgggctggtgtcagggtaaggagaggaagggagggatgagggctgattaatttttttcaccccacaggaggaaaagctttcggactgctgaaggcccagcaggaagagaggctggatgagatcaacaaggtagaaggaagaactaagggggcagagccagggggatggggcgtggatggggagggcctaccctggctcttattttcccctccatagcaattcctagacgatcccaaatatagcagtgatgaggatctgccctccaaactggaaggcttcaaaggtgagggggaaactgtaggcggtggagacagggctgggggtaggagggttaggatttccacaagaacaaggcaggaacagcagagataaaaagtttacttttgtggtagcaaaaggggaacctgcctttattgccctcctgccacactgcggtccctttcccgggcctgcctctctcagcatcccctctagctccttacaccctagcggggcccctcaactccccaaccccacttcctctgcctgcccctcctcctccttccacgttgtctcctccacctagcagttggttggcaaccccttcctcagtcccctgctgaaaaccctccagtcagcgcttatcccttctgctctctcccctcacccagagaaatacatggagtttgaccttaatggaaatggcgatattggtgagaaacgggtgatttgcgggggcagggtggtgtgcaggcctaagaagacagaggtctctcctacatgctccattcctcatgatttgggagggggcccacctaccacagtgggaggaaggagaatggggatgcggaagtgggagaggagagagagggtctccccaccttctccccatccccatcctctgcccccagatatcatgtccctgaaacgaatgctggagaaacttggagtccccaagactcacctagagctaaagaaattaattggagaggtgtccagtggctccggggagacgttcagctaccctgactttctcaggatgatgctgggcaagagatctgccatcctaaaaatgtgagtgtcaattt

SEQ ID NO: 2407 - DNA, 6000 bp, Homo sapiens
ttaaaggatttgtgggccatgcaatggtcccttgcattagagaagtcaaagagctttgtgcaatcctctcctgtctgtgatctggaagacacgtgctcatcacagagctccagctgctccgagactttactcctttcttcagctgcacgcactgctctctcgcttttgttaggaattgactaattcctcctcttcctcttcctcctcctccttgccatctctaggcccagtcagcatctcttgttcatcctctgatcccatgtccagctatggttctggattcaacactagcagcaacagtggcgctgactccactttaggatcaataaatatttttctggctaggcgcagtggctcacatctataatctcagtactttgggaggccaaggtgggtggatcacaaggtcaagagatcgagaccatcttggccaacatggtgaaacctcgtctccactaaaattacaaaaattagttgaacatggtggtgcgcacctgtagtcccagctacttgggaggctgaggcaggagagtcgcttgaacccaggatgtggaggttgaagtgagccaagatcgcgccactgcactccagtctagcgacagatggagactctgtctcaaaaaaaaaaaaataagtatttttctttctagccgtatatccaccttacatggtccctcaactccccaagcccactctgcctgccccatctcctccttccacatcctctcctcaacctagcacttggttggcaatgccttcctcgatcctctgccaaagaccctctagccagtgcttaccctgtctgttctctctctttacccaaagaaatacataaagtttgaccagaatggaaacagagatatcagtgaaaaaaggtgatttggggaagtgtgcaggcctaggaagacagaggcttgttcctttgcttgcttaaaatctttgatcaaacggccaggcgtggtggctcacacctgtaatcccagcactttgggagggcgaggtgggcgaatcatgagatcaggagttcaagaccagcctggccaacatagtaaaaccccgtctcactaaaaatacaaaaaattagccagctgggcgtggtggcaggtgcctgtaatcccagctactctggaggctgaggcaggagaatcacttgaacccgggaggtggaggttgcagtgagtggagattgcaccactgcactctagcctgagtgacagagtgagactccatctcaaaaaaaagaaaagaaatctttgctcaaatatcactttttcagagaacgcttctctaaccactctatttattttattattttattgtattttttgagacagggtctcactctgttgcccagactggagtgtaatggcacggtcatggctcactgcagccttgatctcctgggctcaagcgatcctctcacttcagcctcccaagtggctaggaccacaggcgtaagccaccgtgtctggccagaccaccatatttaaaactggggacaagtcaggctcacacctgtaatcccagcactttgggaggccaaggtgggaggatcacaaggttaggagttcaagaccagcctggccaacttggtgaaaccccatctctactaaaaatacaaaaattagccgggtatagtggtgatcgcctgtaatcccagctattcgttaggctgaggcaggagaatcgcttgaacccgggaggcagaggttgcagtgagctgagattgtgccactgcactccagcctgggcaacagagcgagattctgtctcaacaaaaaaagctgggtgcagtggctcacgcctgtaatcctagcactttgggagtccgaggtgggtagatcacctaaggtcaggagttcaagaccagcctggtcaacatggtgaaaccccgcctctacaaaaatacaaaaattagctaggtatgatggcaggtggctgtaatcccagctactcggaaggctgaggcaggagaatcgcttgaacccaggaggcggaggttacagtgagctgagatcaagccattgcactctagcctgggcgacagagtgagactccgtttaaaaaaaaaacaaaaaacaaaaaacaaaaaactggggaccattggcaataatactcctatgtcccctcttccctactttgttttcctccataggcacctggcgccttttttttttttttttttttttttttgagacggagtctcactctgttgcccaggctggagtgcaatggcgcgatctcagctcactgcaacctctgcctcccgggtttaagcgattcgcctgcgtcagcctcctgagcagctgggattacaggcacgcaccaccaggccctgctaatttttgtatttttagtagagatggggtttcaccatgttggtcaggctggtctccaactcctgaccttgtgatccgcctgccccagcctcccaaagtgctgtgattacaggcgtgagccactgcgcctggccacctagcacctttaatatacttatttatttgtattgtctgccttccccaattagatcaaccatgaagacaagagttttcatttgttgggttctctgggcctagaggcatgtctggcatatagtaagcattcagtaaatatctgttgagtgaacgtatgaataaagaagtgagttcctcccagcaggcactgagaacattgggagtacagggttgcagctctctctgcagcaggagaatgtagctgcaataaagggaagtcaagaagccagagtccagccaggtgcagtggctcatgcctgtaatcccagcactttgggaggctgaggtgggtggatcacaaggtcaagagatagagaccatcctggccaacatggcgaaaccccatctgtactaaaaatacaaaaattagctgggcgtggtggtgggcgcctgtagtcccagctactcaggaggctgaggtaggagaattgcttgaacccaggaggcagtggttgcagtgagccgagattgcaccattgcactcccgcctgggcgacagagcaagactccgactcaaaaaaaaaaaaaaaagcagcagcagcagccagaggccactccagcatctcccctacctggcttgggtcagggagagggcagtgagaagtgaaaactcccagctacagaaaaggaaatatgttggggggaagggagaaggaaaggtgtcttcatcaatgccggggcagggtagatggagccctgggcagggagtttggaccaggaaatctcaatgagggaaatgtgctgtcctcacctctccaagaagcgactggccaaacagagtgacagaggggataaaggttatgcctagggaggcatgtgtcagaggctatcatccactctgttgaacccacagtgaccagcaccaccatcacacaaacatgcctgcatgtgtgcacgcacgtgcagtgtgcaaacctgatgtcagcctcactccctggctcttctgtccacaaacgctgtttctttaagtaccactttcagttcctccaaagaatctacttaaactcttaaattcctgatctctatagattttactaaagatttcaaaggagataagatgagagggttacgttgcacattctaaagcaaacaaattaaaatgttttgttagacatttccatatttttaagggcctccttggagctgccaggctgggagtgaggtttctctccctttctaaaccctgtgcccatcttgtcaccctcctggagctgccagcagacttcagattcttctccgatctacagagcagaaaaattcagccagcccttccttgtcttcctatccacagctgcctgcccagactcatgaaacctgacaaaatgcaaggtcttatcattacctgaaccttggacctgttcaaaaatactagttcctgagaataaatatccctggtgtcttcctgcccttcctgcacacctccagtggcttatcaaaatatttgtttcatgcgcacactgggctctcatttaagaggaatttgggagaatgttattttctaatctgcatttcacaccaggctccccctccttcctggggtgctagtgtcagcagaacctgatggggaagtgaggtctgggaggcagaggaggaaggaatgaggggaaaggggaagtttgggaggaaggcttctgagaagactggtgggagagaaggagagcctgcagacagaggcctccagcttggtctgtctccccacctctaccagcatctgctgagctatgagccaaaccagggatttacagggtagggagggtgggataggcagcggcattagatcggaggaatgagatggacagacctgggctgtgggctaggagggcagtcagctggcctagggtagcccgggctggtgtcagggtaaggagaggaagggagggatgagggctgattaatttttttcaccccacaggaggaaaagctttcggactgctgaaggcccagcaggaagagaggctggatgagatcaacaaggtagaaggaagaactaagggggcagagccagggggatggggcgtggatggggagggcctaccctggctcttattttcccctccatagcaattcctagacgatcccaaatatagcagtgatgaggatctgccctccaaactggaaggcttcaaaggtgagggggaaactgtaggcggtggagacagggctgggggtaggagggttaggatttccacaagaacaaggcaggaacagcagagataaaaagtttacttttgtggtagcaaaaggggaacctgcctttattgccctcctgccacactgcggtccctttcccgggcctgcctctctcagcatcccctctagctccttacaccctagcggggcccctcaactccccaaccccacttcctctgcctgcccctcctcctccttccacgttgtctcctccacctagcagttggttggcaaccccttcctcagtcccctgctgaaaaccctccagtcagcgcttatcccttctgctctctcccctcacccagagaaatacatggagtttgaccttaatggaaatggcgatattggtgagaaacgggtgatttgcgggggcagggtggtgtgcaggcctaagaagacagaggtctctcctacatgctccattcctcatgatttgggagggggcccacctaccacagtgggaggaaggagaatggggatgcggaagtgggagaggagagagagggtctccccaccttctccccatccccatcctctgcccccagatatcatgtccctgaaacgaatgctggagaaacttggagtccccaagactcacctagagctaaagaaattaattggagaggtgtccagtggctccggggagacgttcagctaccctgactttctcaggatgatgctgggcaagagatctgccatcctaaaaatgtgagtgtcaatttccaacctcccctgtacttacctgttttctcctcccccatccctacccttgtccacaggctcaacatttctacacgttgcccatcatcccttcttccatccttagagggacccttccaaggtcccgaccccatccctatccatagtcctggtccccagaaactccaacccctgcccttcctcttcccccttccaccctcacatccccatccccttctagcctttcctagcaccctatgatttattcccttgagaggagtgttccctgatccctgtgcctcttcccatctcaaccaggatcctgatgtatgaggaaaaagcgagagaaaaggaaaagccaacaggccccccagccaagaaagctatctctgagttgccctgatttgaagggaaaagggatgatgggattgaaggggcttctaatgacccagatatggaaacagaagacaaaattgtaagccagagtcaacaaattaaataaattaccccctcctccagatcaagtcagcttagtttttatttgggtgatttttttcctgggtttgggaaggagagacaggtcttgagggaaaggtgg

SEQ ID NO: 2408 - DNA, 6000 bp, Homo sapiens
agatgtccgctgggctcactcccagacccactcaagggttgctcaaatgttgcctccgtagagagaccttccctgatcaaatagtactcactagtcctttagatccttactctgccttattttcttcatagcacttaataccacctgccactacatttagttgaaccatagagaagtattaaataccagcattttaaattacttgtttattgagacaaggtctcgctctgttgcccaggctgaagtgcagctcagtgcagcctcgacctcccaggctcaagtaatcctcccaccccagcctcctgagtagctgggaccacaggcgtgtgccaccatgcttggctaatttttattattattgttagtagaaacagggtttcaccatgttgtccaggctggtctcaaactcctgggttcaagtgatcctcccaccccagcctcccaaagtgctgggatacagccatgagctaccacgcccagccaacaaataaatgttgaatgaatgggtcaatgaatccttgggctgagtatctggcaaaaaacttaatagaggagttggacgtgagttggagccgactctcactgaggggacaccttctggggcagggactggacagccaaagggcaggggctggggttgggcagctggagtacccgggcagagctgacacagtccattggggaaggagcctctggcgagacctactgtgtgccaggcactgaattggacacttttctagtcatctcgtttagtcttcacaacagccctgtaacatgggtcttatcacccactctcgttttacaaatgagaaaacaggcttagaggagccaactaacttgtctaagatcacacagcttaccacgccacagagcagcccacatctgcagtctttcttctgcatctccctgcctccttgtaattttgcttgtttcatggagtcttgaaagccccagaagagcatgggactctctagagctggggccagagctctagggctccctggcctgtcccaccctcacaggaccccagatgtgtcatgctttctcatttctgtggaggtctcatggtgaggatgttcctgctggcccatcctcattatggtgaggaggttcatgctggtcctgccatatgggacagacagggtggctgctgtgctcgtggggcaagatagggtctgggtggccaggataggggacatgacagtctcatagttatgtggggcttttgtctcgatctctaagaaaccagtcaccaattcccacaccatgtctctgcctccagaggctcacaggctagctaggaagacaatgcaacaacagcagccacttctcaggcacttgctgggcaccaggaattctagttgacagttaaatgtgcagacttaggagccagatgccaggtatgaagatcatgttcaccactttcttagttatgtgcgaccttgggcaaattacataacctctccgggcctcagtctctccatctgtaccaggggaataattatattggaatagactagaccaaagcagccctgacatctgggagctgcctggtcctatcagccaggacttggttgctcagagctgtccagcctggtgcaattcggtcttgctgtgctgaacatagacgatttcacagacatcagcatagaacaaggccatccgcgaccagggcagactaagacaaaaatgaaactactccttaatcatatctgaacacagacaaaacatgaatattgtcaaatcacagaaatgacccaaatccccctgtagagctaagctgagtggaggctgctggtttaccagctgtagcttcagccttgctctagtctgctttccttctaggcaagatgtattaagactcccaatcatagtgttagctccacttcctgacagcatcaacccagaacaaagcctcacttccttaacctctccccaatcacctaacacaactccaaacattagactaagtcctttctaacgcccccttcctgggacgccccatgatccccatggtgcatgctctcccttgttgcaacgagtcatcagctcagcttgttcacccacacgtgtgtttctggtgatctctggttggaggcattgaaagttcctacctcattgggttgtcgtgaggaatatgtacttgaaatgatacaatcctaaggctctttcaatatgcttgtcatactttattattatccccatttcacaaggaggacactgaagctcagagagagggccagactttgcccaaggtcacacagctggtaatgacagagaaaggatgtaaattcaggcctcattccaaagctagtttcctgaatccctgcctccatgctccatgctcatagggcagaaaccaacaagacaacttgggttggtgtttggagaggagaagagcaaagggcccttggaactcaaaagagagcctcaggctggagaagcagggtatccaggatgacctgagtgaccctctcctcctcccctccctttcatgactccccaactggatcctccaagggctccctcccagactgcctggctgctgagtaatgcagagccagtcaggcccagagtaggggtcagtgtcagcagagtcggaggcctgagtcacttcctgacccttgctcaagagcatccggagctacagccagagtggccactcgtgctctcagaagatcgcacccacttgggcgatgagcatgtccttggtatccccaccttcctgggctcacctctgccccactcaggtgtttaagacgtgcagcagagaggcgccatcctgacctggtgccacatcctagcccctttccttactggatcctcaaaccagaagaaaacctgaatctctgaggtcagttactctcttttgcctgcgtctagcctaaaatctggcttccaggaccccaccccaacttcagaatcaaggtaccttgcactggtgccactgatcccaaaggtccaaaactcctgcagcactcacaggcaagcgaccccgttccttaggctctcatggggtctcagggccagagtagggggtgggggagggaaaaggctggggaaaatatcagataccccagggcaggatggactgagggagacatggttggatcagtagacatgtccttatgatgtgggcaaggccatttcctttgaggagcaattctgtcaactctaggccaccgcatagcctcgcagccaagagcagggactctagaatcaggctgtacttgctttcacccagctctgcccttaccagctgtgttaccttgggcaaattacttagcctctctgtacctcgggttcctcatctctaaaatgaggataatcatattactgactcacaggcctcttaccaggattaagtgagttatataaaacacttaatgacgggcacatggcaaacacaagtgtgtattaaatgactcttttacatctaatgggctgactcctccattcattctccacacatttgctgttatattgccatgtgccagaaatgaaaaagacagattgcctgactgaaataatggcaggtgttgttgtgtgatgatggcaccccaccctcatctcagaatgatcttccaggctgtgcctgaggctgcaggactgcccgggagggcttggggcacagagtttgggggctgcagactccctagtgtgggcccccggcttgctgtaagcccctagcaaatttctttccttgttcaatagaccttctttttgacaaagtgaagcaggtggtccccgccccttccacagccccatgcctgggcaagagaggggttggacaagtcaggctgggcatccagagcccttgcagccatctcctccccccacctgcccaccttgctcctcagaggcctttgtggtttgagcaaagaatctccatcaggctgcacaggccaccagacaggtggcaagggccccaattagtcattgtcctcatagagccttaggaagtccacagaaactgtgttcaaaactgcacatttgggccaggtgcggtggctcacttctgtaatccaaacactttgggaggctgaggtgggcggaccacctgaggtcaggagttgaagaccagcctggccaacatggtgaaaccccgtctctactaaaaatacaaaaattagctaggagtggtggtgtgcacctgtagtcccagctactcaggaggctgaggcaagagaattgcttgaacctgggaggcggaggttgcagtgagctgagatggcgccactgcactccagcctaggcaatagagtgagactccatgtcaaaaacaaacaaaaatcctgcacatttgaacctgcgtggatatttggtattatagaattagtgctattaattttaggtttaagaatgtattgtgggccaggcgcggtggctcacgcctgtaatcccaacactttcggaggccgaggcgggtggttcacgaggtcaggagttcaagaccagcctggccaagatggtgaaaccccatctctattaaaaatacaaaaattagccgggtttggtggcaggcacctacaatcctagctaatcgggaggcggaggcagagaattgcttgaacccgggaggcggaggttgcagtgagccgagatggcaactgcactccgacagagtctcaaaaaatatatatatatagtattgtggatacgtacttttaaaaatccttacgttttagagatacaaaaatatttatgaataaaatgatatgacgcctgggttttgcttcaaaacgatggtgggagaggaatgtggatgaaataaaattgattatgagttgtggttgctggggaattggggtcacgggggttcattagaacctcctatcagatgtggttcagaagcctcagacctgggagctggctagaaatgcagaatctcggctccaccccaaacctactgagtcaggatctgtattttaatcaaataaaatgcccaggggattcctgagcacactgaagtgtgagaagcgctggcttactctgttcaattctttcctgcatgtttgacattttccataatgaagaggttgtggggttttgttctgctttcctgtgtgttcacagtcacagggagctcttcctacggagaccggggctggagggaactgggaagcactgcctccccgctcctgcttggacccaccagccccgccgctggcccgcgctcggctgggaggcaccggggtcccgctgggcagccccgaccccgtgcctgggccgcacctgccgcagtggctccgtcgggccgggcggaagcgcgggagcgcagggctggacaggcccgggcgtggcggccccggcgcacctgggcgagccggcaggtgggagcgtagcagcccggggcccccgccctcgcgcgggggaggagcgggcggcgcggggcgggcgcagcgggggtcggggcgctgggagcccgttgggccgcgaacgcagccgccacgctggggccgccgagatcgggtgcccgggatgagcctcatccggaaaaagggcttctacaagcaggacgtcaacaagacagcctgggagctgcccaagacctacgtgtccccgacgcacgtcggcagcggggcctatggctccgtgtggtgagacccctgggccgctggggggcggggggcgggcgccaggctctcccctttccgcccagcccgccctgggctggcccctcgccagcgccaccttgaccgcggacctcaaggcccagcgccctccccggggccacccagcggccatctcccttttctcaccgagtggctgagtgaggtctctgggggttgagttgggactgggcctggttctccaggactgtacacttgcaagaccccagagttcatcgggcagatcctcactgttacagacgagtacaccgaggccccaagagggggaggtggctcgccaagttgcagacagagtgagactcccgccctgccgtggatcccgtcgcaatgagacgttgctgcccctggcgctgtgcccctctctcag

SEQ ID NO: 2409 - DNA, 6000 bp, Homo sapiens
gtatctggcaaaaaacttaatagaggagttggacgtgagttggagccgactctcactgaggggacaccttctggggcagggactggacagccaaagggcaggggctggggttgggcagctggagtacccgggcagagctgacacagtccattggggaaggagcctctggcgagacctactgtgtgccaggcactgaattggacacttttctagtcatctcgtttagtcttcacaacagccctgtaacatgggtcttatcacccactctcgttttacaaatgagaaaacaggcttagaggagccaactaacttgtctaagatcacacagcttaccacgccacagagcagcccacatctgcagtctttcttctgcatctccctgcctccttgtaattttgcttgtttcatggagtcttgaaagccccagaagagcatgggactctctagagctggggccagagctctagggctccctggcctgtcccaccctcacaggaccccagatgtgtcatgctttctcatttctgtggaggtctcatggtgaggatgttcctgctggcccatcctcattatggtgaggaggttcatgctggtcctgccatatgggacagacagggtggctgctgtgctcgtggggcaagatagggtctgggtggccaggataggggacatgacagtctcatagttatgtggggcttttgtctcgatctctaagaaaccagtcaccaattcccacaccatgtctctgcctccagaggctcacaggctagctaggaagacaatgcaacaacagcagccacttctcaggcacttgctgggcaccaggaattctagttgacagttaaatgtgcagacttaggagccagatgccaggtatgaagatcatgttcaccactttcttagttatgtgcgaccttgggcaaattacataacctctccgggcctcagtctctccatctgtaccaggggaataattatattggaatagactagaccaaagcagccctgacatctgggagctgcctggtcctatcagccaggacttggttgctcagagctgtccagcctggtgcaattcggtcttgctgtgctgaacatagacgatttcacagacatcagcatagaacaaggccatccgcgaccagggcagactaagacaaaaatgaaactactccttaatcatatctgaacacagacaaaacatgaatattgtcaaatcacagaaatgacccaaatccccctgtagagctaagctgagtggaggctgctggtttaccagctgtagcttcagccttgctctagtctgctttccttctaggcaagatgtattaagactcccaatcatagtgttagctccacttcctgacagcatcaacccagaacaaagcctcacttccttaacctctccccaatcacctaacacaactccaaacattagactaagtcctttctaacgcccccttcctgggacgccccatgatccccatggtgcatgctctcccttgttgcaacgagtcatcagctcagcttgttcacccacacgtgtgtttctggtgatctctggttggaggcattgaaagttcctacctcattgggttgtcgtgaggaatatgtacttgaaatgatacaatcctaaggctctttcaatatgcttgtcatactttattattatccccatttcacaaggaggacactgaagctcagagagagggccagactttgcccaaggtcacacagctggtaatgacagagaaaggatgtaaattcaggcctcattccaaagctagtttcctgaatccctgcctccatgctccatgctcatagggcagaaaccaacaagacaacttgggttggtgtttggagaggagaagagcaaagggcccttggaactcaaaagagagcctcaggctggagaagcagggtatccaggatgacctgagtgaccctctcctcctcccctccctttcatgactccccaactggatcctccaagggctccctcccagactgcctggctgctgagtaatgcagagccagtcaggcccagagtaggggtcagtgtcagcagagtcggaggcctgagtcacttcctgacccttgctcaagagcatccggagctacagccagagtggccactcgtgctctcagaagatcgcacccacttgggcgatgagcatgtccttggtatccccaccttcctgggctcacctctgccccactcaggtgtttaagacgtgcagcagagaggcgccatcctgacctggtgccacatcctagcccctttccttactggatcctcaaaccagaagaaaacctgaatctctgaggtcagttactctcttttgcctgcgtctagcctaaaatctggcttccaggaccccaccccaacttcagaatcaaggtaccttgcactggtgccactgatcccaaaggtccaaaactcctgcagcactcacaggcaagcgaccccgttccttaggctctcatggggtctcagggccagagtagggggtgggggagggaaaaggctggggaaaatatcagataccccagggcaggatggactgagggagacatggttggatcagtagacatgtccttatgatgtgggcaaggccatttcctttgaggagcaattctgtcaactctaggccaccgcatagcctcgcagccaagagcagggactctagaatcaggctgtacttgctttcacccagctctgcccttaccagctgtgttaccttgggcaaattacttagcctctctgtacctcgggttcctcatctctaaaatgaggataatcatattactgactcacaggcctcttaccaggattaagtgagttatataaaacacttaatgacgggcacatggcaaacacaagtgtgtattaaatgactcttttacatctaatgggctgactcctccattcattctccacacatttgctgttatattgccatgtgccagaaatgaaaaagacagattgcctgactgaaataatggcaggtgttgttgtgtgatgatggcaccccaccctcatctcagaatgatcttccaggctgtgcctgaggctgcaggactgcccgggagggcttggggcacagagtttgggggctgcagactccctagtgtgggcccccggcttgctgtaagcccctagcaaatttctttccttgttcaatagaccttctttttgacaaagtgaagcaggtggtccccgccccttccacagccccatgcctgggcaagagaggggttggacaagtcaggctgggcatccagagcccttgcagccatctcctccccccacctgcccaccttgctcctcagaggcctttgtggtttgagcaaagaatctccatcaggctgcacaggccaccagacaggtggcaagggccccaattagtcattgtcctcatagagccttaggaagtccacagaaactgtgttcaaaactgcacatttgggccaggtgcggtggctcacttctgtaatccaaacactttgggaggctgaggtgggcggaccacctgaggtcaggagttgaagaccagcctggccaacatggtgaaaccccgtctctactaaaaatacaaaaattagctaggagtggtggtgtgcacctgtagtcccagctactcaggaggctgaggcaagagaattgcttgaacctgggaggcggaggttgcagtgagctgagatggcgccactgcactccagcctaggcaatagagtgagactccatgtcaaaaacaaacaaaaatcctgcacatttgaacctgcgtggatatttggtattatagaattagtgctattaattttaggtttaagaatgtattgtgggccaggcgcggtggctcacgcctgtaatcccaacactttcggaggccgaggcgggtggttcacgaggtcaggagttcaagaccagcctggccaagatggtgaaaccccatctctattaaaaatacaaaaattagccgggtttggtggcaggcacctacaatcctagctaatcgggaggcggaggcagagaattgcttgaacccgggaggcggaggttgcagtgagccgagatggcaactgcactccgacagagtctcaaaaaatatatatatatagtattgtggatacgtacttttaaaaatccttacgttttagagatacaaaaatatttatgaataaaatgatatgacgcctgggttttgcttcaaaacgatggtgggagaggaatgtggatgaaataaaattgattatgagttgtggttgctggggaattggggtcacgggggttcattagaacctcctatcagatgtggttcagaagcctcagacctgggagctggctagaaatgcagaatctcggctccaccccaaacctactgagtcaggatctgtattttaatcaaataaaatgcccaggggattcctgagcacactgaagtgtgagaagcgctggcttactctgttcaattctttcctgcatgtttgacattttccataatgaagaggttgtggggttttgttctgctttcctgtgtgttcacagtcacagggagctcttcctacggagaccggggctggagggaactgggaagcactgcctccccgctcctgcttggacccaccagccccgccgctggcccgcgctcggctgggaggcaccggggtcccgctgggcagccccgaccccgtgcctgggccgcacctgccgcagtggctccgtcgggccgggcggaagcgcgggagcgcagggctggacaggcccgggcgtggcggccccggcgcacctgggcgagccggcaggtgggagcgtagcagcccggggcccccgccctcgcgcgggggaggagcgggcggcgcggggcgggcgcagcgggggtcggggcgctgggagcccgttgggccgcgaacgcagccgccacgctggggccgccgagatcgggtgcccgggatgagcctcatccggaaaaagggcttctacaagcaggacgtcaacaagacagcctgggagctgcccaagacctacgtgtccccgacgcacgtcggcagcggggcctatggctccgtgtggtgagacccctgggccgctggggggcggggggcgggcgccaggctctcccctttccgcccagcccgccctgggctggcccctcgccagcgccaccttgaccgcggacctcaaggcccagcgccctccccggggccacccagcggccatctcccttttctcaccgagtggctgagtgaggtctctgggggttgagttgggactgggcctggttctccaggactgtacacttgcaagaccccagagttcatcgggcagatcctcactgttacagacgagtacaccgaggccccaagagggggaggtggctcgccaagttgcagacagagtgagactcccgccctgccgtggatcccgtcgcaatgagacgttgctgcccctggcgctgtgcccctctctcagctcctgcctggcttcctactccctgccctgcgtcccgcggctcccccatattctaggtggtgggcctagtcccctctcagcccagctgcccagtgggaggggtcagggcggtctgggagatacggcccaggaggagagcctcgcctgctgaccggcctgtgcccgacagctcggccatcgacaagcggtcaggggagaaggtggccatcaagaagctgagccgaccctttcagtccgagatcttcgccaagcgcgcctaccgggagctgctgctgctgaagcacatgcagcatgagaacgtaggtggtggctgccccggggagggggtgggggctgccctggggagtcaggggcaggcgcaggcggggcctcccggtatggagagctcgggacagtctcctccctgctcccctgacggtgcctctcgcctcactattgaaaggagggggtgccgagaccttccctgcccactttccaggaagaggtcaaagggtatttttggcagaatgcactttgtgaggtacaga

SEQ ID NO: 2410 - DNA, 6000 bp, Homo sapiens
taaaagagagggctcgaggcagcagcactgaagcctaacctcacagtacaggccaaaaatgacccttcaataaacattcactgagttcccagctgaagctggtaggcctctccaaggtacaaagatgaataaaatatgggctcagcccctctaagtgcccagctcagaggattcagtagacacataaaccaagcaggagggcaaagtacagtggagagtcttgctcagtgggagctctgggagtagagggagccccgagtaggcctcaccccaagtcacatgtgttgggttatgaagaatcaataggaattcaaaggtgaagaatggagtggaggtggggcaagttggtcagggacactcattttaccaagagaggaagatttgtgcaaaggcacaaagaggccttcacccctcaggtggcctgtgttcacagcatttcctcactgccttctagtccctaaatgatctgatcaacttactccctctgtactgtaccacccagaagcttctgcaagagccaggcacttgtcctccacaatggctgccatgagtgttggttgccgatggttacagccaagtcgttccttggccttagaggaggaagctctcttgcccgagggcatgcactcccctactgcaggggcagccacgtttagatgactgtttggaaacccagggtgtaagggcctagctctcatgcttcaattcagcgaactctgcaggaccatcccagctccagggctcctggtgggatcagccaagtcctctgtgggcctccagcctccatcagttcccggttcttctctctgcccaattccgtttcttttatatccagacaagtgttgattgtgaatgcactccccaataaactcccttcaagcaaaactctatgtcagaatgtgatttctgggaaacctacctaagatacccactaaaatatagataattactaaattccaagggatgcctttcctggggatgtttgtacagcaattatcatcataactaatattcatggagtgatttctatgtgccaagctaagcactttgcttttaagatcatatttaatgaagaacagagcctcacagtaagaatacatgtcttttcttttaattatttatttatttattttgagacagagttttgctcttgttgcccaggctggagtgcaatggcgcaatctcagcttactgcaacctccgcctcccgagttcaagtgattctcctgcctcagcctcccaagtagctgggattacaggcatgcaccaccatgtccagctaattttgtatttttagttgtagatttctttgctccttctccactcccactgcttcatttaactagccttaaaaaaattattaaaaataaaaataaataggcctggccaggcgtggtggttcgtgcctgtaatcccagcacttgggaggctgaggcaggcggatcacctgagttctggactttgagaccagcctggccaacatggtgaaacccgtctgtactaaaaactattaaaaaattagccaggcatagtggcaggagcctgtaatcccagctacttgggaggctggggcaggagaattgcttgaacctgggaggtggaggttgcagtgaactgatatcgcaccattgcattccggcctgggcgacagagtgaaactccatctcgaaaataaataaataaataaataaataaataaataggcctggcatggtggctcacacctgtaatctcagcactttgggaggctgaggcagccagataatttaaggtcaggagttcaagaccagcttggctaacatgatgaaacatgacgaaacccccgtctctgctaaaaattcaaaaattagccagtcatggttgtacatgcctgtaatcccagctactcgggaggctgaggcaggaaaatcgcttgaacctagaaagtggaggttgcagtgagctgagatcacgccactgcactccagcttgggcaacagagcaagattccatctcaaaaaatatataaaaaataaaaataggctgggcgcagtggctcacgcctgtaatctcagcactttgggagaccgaggcagacagatcaactgaggtcgaggtttgagaccagcctgaccaacatagagaaaccctctctctactaaaatacaaacattgggtggggcgagtcatcgtctgacgtctggccgtgagatgtttcgggagccggggtctctccgctgcagacatgacgaagggccttgttttaggaatctattccaaagaaaaagaagatgatgtgccacagttcacaagtgcaggagagaatcttgataaattgatagctggaaagctgagagagactttgaacatatctggaccacctctgaaggcaggcaagactcgaaacttttatggtctgcatcaggacttccccagcgtggtgctagttggcctcggcaaaaaggcagccagaatcgacgaacaggaaaactggcaggaaggcaaagaaaacatcagagctgctgttgcagcaggatgcaggcagattcaagacctggagctctcttccgtggaggtggatccctgtagagatgctcaggctgctgaggagggcgcggtgcttggtctctatgaatacgatgacctaaagcaaaaaaagaagatggctatgtcggtgaagctctatggaactggggatcaggaggcctggcagaaaggagtcctgtttgcttctgggcagaacttggcatgatggagacgccagccagcgagatgatgccaaccagatttgccgaaattattgagaagaatctcaaaagcgctagtagtaaaccgagtttcatatcagacccaggtcttggattgaggaacaggcaatgggatcattcctcagtgtggccaaaggatctgacgagccctcagtcttcttggaaattcactacataggcagccccaatgcagacaaaccaccccttgtttgttgggaaaggaattacctttgacagtggtggtatctccatcaaggcttctgcaaatatggacctcatgagggccgacatgggaggagctacaactatatgctcagccattgtgtctgctgcaaatctcagtttgcccattaatattataggtctggcccctctgtgaaaacatgcccagcggcaaggccaacaagctgggggatgttgttagagccaggaacaggaagaccatccaggttggtaacactgatgctgaggggaggctcatactggctgatgcgctctgttacgtgcacacatttaacccgaaggtcatcctcaatgccaccaccttaacaggtgtcatagatgtagctttggggtcaggtgccactggggtctttaccaattcatcctggctctggaacaagctcttcgaggccagcattgaaacaggggaccgtgtctggaggatgcctctcttcaaacattgtacaagacaggttgtagattgccagctggctgatgttaacaacattggaaaatatagatctgcgggagcatgtacatctgcggcattcctgaaagaattcgtgactcatcctaagtgggcacatttagacatagcaggtgtgatgaccaacaaagatgaggttccctatctatggaaaggcatgaccgggaggcccacaaggactctcatagagttcttacttcgtttcagtcaagacaatgcttagttcagatactcaaaaatgtcttcactctatcttaaattggacagttgaagttaaaaggtttttgaatgaatggatgaaaatattttaaaggaggcaatttatatttaaaaatgtagaacacaatgaaatttttatgccttgatttttttttcattttacacaaagatttatatattttttttttgagacggagtctcactctgtcacccaggctggagtgcaggtggcatgatctcagctcactgcaacctccgcctcctaggttcaagcgattctcccacctcagccacctgaatacctgggactacaggtgcccaccaccatgcccggctgatttttgtatttttaatggagacggggtttcaccatattggccaggctggtctcaaaactcctgaccctgtgatctgcccgcctcggcctcccaaagtgctgggattacaggcgtaagccaccacgcccggccagtatatatttttaattgagaagcaaaattgtacttcagatttgtgatgctaggaacatgagcaaactgaaaattactaaccacttgtcagaaacaataaatccaactttttgtgcaaaaaaaaaaatacaaatattagctgggcatggtggtgcatgcctgtaatcccagctactcgggaggctgaggcagaattgcttgaacctgggaggcggagactgcagtgagctgagattgtgccactgctgactttgtctcaaaaaacaaaacaaaacaaaaaaacaaaatgaaaacaaaaagccagggctgcctctgctcaataatgttctatctttgttccgcctcttctctggggtctcacttcttgggagcctgtgtgaaggtgaattcctctgaaagctgactgcccctatttgggactccccagtctctttctgagaaatggtgacattgttcccagcacttcctctcccttcctaggcagcttctgcagccaccactgagccttcctcacatcctccttcttcaggcttgggctttccacctttcaccattcccctaccccatgctgctccaccgcactctggggagggggctggactgggcactcttgtcccccaggctgagcctccctccatccctatgctgcctgcttcccaggaacatgcttgggcagcaggctgtggctctgattggctttctggccgtcaggaacatgtcccaacatgttgagctctggcatagaagaggctggtggctattttgtccttgggctgcctgttttcaggtgaggaaggggatggtaggagacaggagacctctaaagaccccaggtaaaccttagcctgttactctgaacagggtatgtgatctgccagcagatccttgcgacagggctgggatctgatgcatgtgtgcttgtgtgagtgtgtgctgggagtcagattctgtgtgtgacttttaacagcctgctcccttgcctttttcagggcagaagtcctcccttagagtgtgtctgggtacacattcaagtgcatggttgcaaacttttttttttaaagcactgaatagtactagacacttagtaggtacttaagaaatattgaatgtcgtggtggtggtgagctagaagttataaaaaaaattctttcccaaaaacaacaacaaaaagaattatttcattgtgaagctcagtaccacaaaaatttaaataattcattacaagcctttattaaaaaaaattttctccccaaagtaaacagacagacaatgtctagtctatttgaaatgcctgaaagcagaggggcttcaaggcagtgggagaaggtgcctgtcctctgctggacatttgacaaccagccctttggatggtttggatgtataggagcgaaggtgcagacagcagtggggcttagagtggggtcctgaggctgtgccgtggcctttctggggtttagccacaatcctggcctgactccagggcgaggcaggccaagggggtctgctactgtgtcctcccacccctacctgggctcccatccccacagcagaggagaaagaagcctgtcctccccgaggtcagctgcgttagaggaagaagactgggcatgtctgggcagagatttccagactctgagcagcctgagatgtcagtaattgtagctgctccaagcctgggttctgttttttagtgggatttctgttcagatgaacaatccatcctctgcaattttttaaaagcaaaactgcaaatgtttcaggcacagaaaggaggcaaaggtgaagtccaggggaggtcaggggtgtgaggtagatgggagcggatagacacatcactcatttctgtgtctgtcag

SEQ ID NO: 2411 - DNA, 6000 bp, Homo sapiens
tctactaaaatacaaacattgggtggggcgagtcatcgtctgacgtctggccgtgagatgtttcgggagccggggtctctccgctgcagacatgacgaagggccttgttttaggaatctattccaaagaaaaagaagatgatgtgccacagttcacaagtgcaggagagaatcttgataaattgatagctggaaagctgagagagactttgaacatatctggaccacctctgaaggcaggcaagactcgaaacttttatggtctgcatcaggacttccccagcgtggtgctagttggcctcggcaaaaaggcagccagaatcgacgaacaggaaaactggcaggaaggcaaagaaaacatcagagctgctgttgcagcaggatgcaggcagattcaagacctggagctctcttccgtggaggtggatccctgtagagatgctcaggctgctgaggagggcgcggtgcttggtctctatgaatacgatgacctaaagcaaaaaaagaagatggctatgtcggtgaagctctatggaactggggatcaggaggcctggcagaaaggagtcctgtttgcttctgggcagaacttggcatgatggagacgccagccagcgagatgatgccaaccagatttgccgaaattattgagaagaatctcaaaagcgctagtagtaaaccgagtttcatatcagacccaggtcttggattgaggaacaggcaatgggatcattcctcagtgtggccaaaggatctgacgagccctcagtcttcttggaaattcactacataggcagccccaatgcagacaaaccaccccttgtttgttgggaaaggaattacctttgacagtggtggtatctccatcaaggcttctgcaaatatggacctcatgagggccgacatgggaggagctacaactatatgctcagccattgtgtctgctgcaaatctcagtttgcccattaatattataggtctggcccctctgtgaaaacatgcccagcggcaaggccaacaagctgggggatgttgttagagccaggaacaggaagaccatccaggttggtaacactgatgctgaggggaggctcatactggctgatgcgctctgttacgtgcacacatttaacccgaaggtcatcctcaatgccaccaccttaacaggtgtcatagatgtagctttggggtcaggtgccactggggtctttaccaattcatcctggctctggaacaagctcttcgaggccagcattgaaacaggggaccgtgtctggaggatgcctctcttcaaacattgtacaagacaggttgtagattgccagctggctgatgttaacaacattggaaaatatagatctgcgggagcatgtacatctgcggcattcctgaaagaattcgtgactcatcctaagtgggcacatttagacatagcaggtgtgatgaccaacaaagatgaggttccctatctatggaaaggcatgaccgggaggcccacaaggactctcatagagttcttacttcgtttcagtcaagacaatgcttagttcagatactcaaaaatgtcttcactctatcttaaattggacagttgaagttaaaaggtttttgaatgaatggatgaaaatattttaaaggaggcaatttatatttaaaaatgtagaacacaatgaaatttttatgccttgatttttttttcattttacacaaagatttatatattttttttttgagacggagtctcactctgtcacccaggctggagtgcaggtggcatgatctcagctcactgcaacctccgcctcctaggttcaagcgattctcccacctcagccacctgaatacctgggactacaggtgcccaccaccatgcccggctgatttttgtatttttaatggagacggggtttcaccatattggccaggctggtctcaaaactcctgaccctgtgatctgcccgcctcggcctcccaaagtgctgggattacaggcgtaagccaccacgcccggccagtatatatttttaattgagaagcaaaattgtacttcagatttgtgatgctaggaacatgagcaaactgaaaattactaaccacttgtcagaaacaataaatccaactttttgtgcaaaaaaaaaaatacaaatattagctgggcatggtggtgcatgcctgtaatcccagctactcgggaggctgaggcagaattgcttgaacctgggaggcggagactgcagtgagctgagattgtgccactgctgactttgtctcaaaaaacaaaacaaaacaaaaaaacaaaatgaaaacaaaaagccagggctgcctctgctcaataatgttctatctttgttccgcctcttctctggggtctcacttcttgggagcctgtgtgaaggtgaattcctctgaaagctgactgcccctatttgggactccccagtctctttctgagaaatggtgacattgttcccagcacttcctctcccttcctaggcagcttctgcagccaccactgagccttcctcacatcctccttcttcaggcttgggctttccacctttcaccattcccctaccccatgctgctccaccgcactctggggagggggctggactgggcactcttgtcccccaggctgagcctccctccatccctatgctgcctgcttcccaggaacatgcttgggcagcaggctgtggctctgattggctttctggccgtcaggaacatgtcccaacatgttgagctctggcatagaagaggctggtggctattttgtccttgggctgcctgttttcaggtgaggaaggggatggtaggagacaggagacctctaaagaccccaggtaaaccttagcctgttactctgaacagggtatgtgatctgccagcagatccttgcgacagggctgggatctgatgcatgtgtgcttgtgtgagtgtgtgctgggagtcagattctgtgtgtgacttttaacagcctgctcccttgcctttttcagggcagaagtcctcccttagagtgtgtctgggtacacattcaagtgcatggttgcaaacttttttttttaaagcactgaatagtactagacacttagtaggtacttaagaaatattgaatgtcgtggtggtggtgagctagaagttataaaaaaaattctttcccaaaaacaacaacaaaaagaattatttcattgtgaagctcagtaccacaaaaatttaaataattcattacaagcctttattaaaaaaaattttctccccaaagtaaacagacagacaatgtctagtctatttgaaatgcctgaaagcagaggggcttcaaggcagtgggagaaggtgcctgtcctctgctggacatttgacaaccagccctttggatggtttggatgtataggagcgaaggtgcagacagcagtggggcttagagtggggtcctgaggctgtgccgtggcctttctggggtttagccacaatcctggcctgactccagggcgaggcaggccaagggggtctgctactgtgtcctcccacccctacctgggctcccatccccacagcagaggagaaagaagcctgtcctccccgaggtcagctgcgttagaggaagaagactgggcatgtctgggcagagatttccagactctgagcagcctgagatgtcagtaattgtagctgctccaagcctgggttctgttttttagtgggatttctgttcagatgaacaatccatcctctgcaattttttaaaagcaaaactgcaaatgtttcaggcacagaaaggaggcaaaggtgaagtccaggggaggtcaggggtgtgaggtagatgggagcggatagacacatcactcatttctgtgtctgtcagaagaaccagtagacacttccagaattgtcctttatttatgtcatctccataaaccatctgcaaatgagggttatttggcatttttgtcattttggagccacagaaataaaggatgacaagcagagagccccgggcaggaggcaaaagtcctgtgttccaactatagtcatttctttgctgcatgatctgagttaggtcaccagacttctctgagccccagtttccccagcagtgtatacgggctatgtggggagtattcaggagacagacaactcactcgtcaaatcctccccttcctggccaacaaagctgctgcaaccacagggatttcttctgttcaggtgagtgtagggtgtagggagattggttcaatgtccaattcttctgtttccctggagatcaggttgcccttttttggtagtctctccaattccctccttcccggaagcatgtgacaatcaacaactttgtatacttaagttcagtggacctcaatttcctcatctgtgaaataaacgggactgaaaaatcattctggcctcaagatgctttgttggggtgtctaggtgctccaggtgcttctgggagaggtgacctagtgagggatcagtgggaatagaggtgatattgtggggcttttctggaaattgcagagaggtgcatcgtttttataatttatgaatttttatgtattaatgtcatcctcctgatcttttcagctgcattgggtaaatccttgcctgccagagtgggtcagcggtgagccagaaagggggctcattctaacagtgctgtgtcctcctggagagtgccaactcattctccaagtaaaaaaagccagatttgtggctcacttcgtggggaaatgtgtccagcgcaccaacgcaggcgagggactgggggaggagggaagtgccctcctgcagcacgcgaggttccgggaccggctggcctgctggaactcggccaggctcagctggctcggcgctgggcagccaggagcctgggccccggggagggcggtcccgggcggcgcggtgggccgagcgcgggtcccgcctccttgaggcgggcccgggcggggcggttgtatatcagggccgcgctgagctgcgccagctgaggtgtgagcagctgccgaagtcagttccttgtggagccggagctgggcgcggattcgccgaggcaccgaggcactcagaggaggtgagagagcggcggcagacaacaggggaccccgggccggcggcccagagccgagccaagcgtgcccgcgtgtgtccctgcgtgtccgcgaggatgcgtgttcgcgggtgtgtgctgcgttcacaggtgtttctgcggcaggtgaatgacgggcgtgggtcggtgcgcgctcggcttgcgcacacggtgtctctaagtgcgcgggtgacgagagtcgggatgtgccggagaccccggggcggagagcgggattacaagtacaggaatccctggtcacgctccccgcccctggaaacccagctggggcgagggagggcgtggacgggaccgttctgggagctcgcctttggctgcggttggctccaggccccaggcgcagtttgctcgcggcgtggggatgaagtccgtgtccctggaggggcccaggaagggcgaggaaagcggagtggagtaagttcgtctaggatcggtcccgggtggctctgggatccaatctgcgccgccctggcccaggtcccaggttcaggtcctttacgccactgtgtccaccacctggctgagcgctgaggtcagcgcgggctgtttcctggcccttgggaatgtgccaggacccgtcccctaaggactagcgaggaggtgactcactgtgacaaggagaccccagggaacggactgtatgaggtcagaaccccgcccgggatggggtacagcgggactccagaagccctctcccctgccccttcgcggtctccgtcctcccatcggcacagtgacctatttggctggaacagtttgttcccaaggaagccgggcactggaggtccgggacaccgcgtcgggtccccgctccgcggcgcgctgtaggggtcggggagtcacggccctgctctgggcgggctctaaccagcctgtcagtcggggaagggc

SEQ ID NO: 2412 - DNA, 6000 bp, Homo sapiens
ggatccctgtagagatgctcaggctgctgaggagggcgcggtgcttggtctctatgaatacgatgacctaaagcaaaaaaagaagatggctatgtcggtgaagctctatggaactggggatcaggaggcctggcagaaaggagtcctgtttgcttctgggcagaacttggcatgatggagacgccagccagcgagatgatgccaaccagatttgccgaaattattgagaagaatctcaaaagcgctagtagtaaaccgagtttcatatcagacccaggtcttggattgaggaacaggcaatgggatcattcctcagtgtggccaaaggatctgacgagccctcagtcttcttggaaattcactacataggcagccccaatgcagacaaaccaccccttgtttgttgggaaaggaattacctttgacagtggtggtatctccatcaaggcttctgcaaatatggacctcatgagggccgacatgggaggagctacaactatatgctcagccattgtgtctgctgcaaatctcagtttgcccattaatattataggtctggcccctctgtgaaaacatgcccagcggcaaggccaacaagctgggggatgttgttagagccaggaacaggaagaccatccaggttggtaacactgatgctgaggggaggctcatactggctgatgcgctctgttacgtgcacacatttaacccgaaggtcatcctcaatgccaccaccttaacaggtgtcatagatgtagctttggggtcaggtgccactggggtctttaccaattcatcctggctctggaacaagctcttcgaggccagcattgaaacaggggaccgtgtctggaggatgcctctcttcaaacattgtacaagacaggttgtagattgccagctggctgatgttaacaacattggaaaatatagatctgcgggagcatgtacatctgcggcattcctgaaagaattcgtgactcatcctaagtgggcacatttagacatagcaggtgtgatgaccaacaaagatgaggttccctatctatggaaaggcatgaccgggaggcccacaaggactctcatagagttcttacttcgtttcagtcaagacaatgcttagttcagatactcaaaaatgtcttcactctatcttaaattggacagttgaagttaaaaggtttttgaatgaatggatgaaaatattttaaaggaggcaatttatatttaaaaatgtagaacacaatgaaatttttatgccttgatttttttttcattttacacaaagatttatatattttttttttgagacggagtctcactctgtcacccaggctggagtgcaggtggcatgatctcagctcactgcaacctccgcctcctaggttcaagcgattctcccacctcagccacctgaatacctgggactacaggtgcccaccaccatgcccggctgatttttgtatttttaatggagacggggtttcaccatattggccaggctggtctcaaaactcctgaccctgtgatctgcccgcctcggcctcccaaagtgctgggattacaggcgtaagccaccacgcccggccagtatatatttttaattgagaagcaaaattgtacttcagatttgtgatgctaggaacatgagcaaactgaaaattactaaccacttgtcagaaacaataaatccaactttttgtgcaaaaaaaaaaatacaaatattagctgggcatggtggtgcatgcctgtaatcccagctactcgggaggctgaggcagaattgcttgaacctgggaggcggagactgcagtgagctgagattgtgccactgctgactttgtctcaaaaaacaaaacaaaacaaaaaaacaaaatgaaaacaaaaagccagggctgcctctgctcaataatgttctatctttgttccgcctcttctctggggtctcacttcttgggagcctgtgtgaaggtgaattcctctgaaagctgactgcccctatttgggactccccagtctctttctgagaaatggtgacattgttcccagcacttcctctcccttcctaggcagcttctgcagccaccactgagccttcctcacatcctccttcttcaggcttgggctttccacctttcaccattcccctaccccatgctgctccaccgcactctggggagggggctggactgggcactcttgtcccccaggctgagcctccctccatccctatgctgcctgcttcccaggaacatgcttgggcagcaggctgtggctctgattggctttctggccgtcaggaacatgtcccaacatgttgagctctggcatagaagaggctggtggctattttgtccttgggctgcctgttttcaggtgaggaaggggatggtaggagacaggagacctctaaagaccccaggtaaaccttagcctgttactctgaacagggtatgtgatctgccagcagatccttgcgacagggctgggatctgatgcatgtgtgcttgtgtgagtgtgtgctgggagtcagattctgtgtgtgacttttaacagcctgctcccttgcctttttcagggcagaagtcctcccttagagtgtgtctgggtacacattcaagtgcatggttgcaaacttttttttttaaagcactgaatagtactagacacttagtaggtacttaagaaatattgaatgtcgtggtggtggtgagctagaagttataaaaaaaattctttcccaaaaacaacaacaaaaagaattatttcattgtgaagctcagtaccacaaaaatttaaataattcattacaagcctttattaaaaaaaattttctccccaaagtaaacagacagacaatgtctagtctatttgaaatgcctgaaagcagaggggcttcaaggcagtgggagaaggtgcctgtcctctgctggacatttgacaaccagccctttggatggtttggatgtataggagcgaaggtgcagacagcagtggggcttagagtggggtcctgaggctgtgccgtggcctttctggggtttagccacaatcctggcctgactccagggcgaggcaggccaagggggtctgctactgtgtcctcccacccctacctgggctcccatccccacagcagaggagaaagaagcctgtcctccccgaggtcagctgcgttagaggaagaagactgggcatgtctgggcagagatttccagactctgagcagcctgagatgtcagtaattgtagctgctccaagcctgggttctgttttttagtgggatttctgttcagatgaacaatccatcctctgcaattttttaaaagcaaaactgcaaatgtttcaggcacagaaaggaggcaaaggtgaagtccaggggaggtcaggggtgtgaggtagatgggagcggatagacacatcactcatttctgtgtctgtcagaagaaccagtagacacttccagaattgtcctttatttatgtcatctccataaaccatctgcaaatgagggttatttggcatttttgtcattttggagccacagaaataaaggatgacaagcagagagccccgggcaggaggcaaaagtcctgtgttccaactatagtcatttctttgctgcatgatctgagttaggtcaccagacttctctgagccccagtttccccagcagtgtatacgggctatgtggggagtattcaggagacagacaactcactcgtcaaatcctccccttcctggccaacaaagctgctgcaaccacagggatttcttctgttcaggtgagtgtagggtgtagggagattggttcaatgtccaattcttctgtttccctggagatcaggttgcccttttttggtagtctctccaattccctccttcccggaagcatgtgacaatcaacaactttgtatacttaagttcagtggacctcaatttcctcatctgtgaaataaacgggactgaaaaatcattctggcctcaagatgctttgttggggtgtctaggtgctccaggtgcttctgggagaggtgacctagtgagggatcagtgggaatagaggtgatattgtggggcttttctggaaattgcagagaggtgcatcgtttttataatttatgaatttttatgtattaatgtcatcctcctgatcttttcagctgcattgggtaaatccttgcctgccagagtgggtcagcggtgagccagaaagggggctcattctaacagtgctgtgtcctcctggagagtgccaactcattctccaagtaaaaaaagccagatttgtggctcacttcgtggggaaatgtgtccagcgcaccaacgcaggcgagggactgggggaggagggaagtgccctcctgcagcacgcgaggttccgggaccggctggcctgctggaactcggccaggctcagctggctcggcgctgggcagccaggagcctgggccccggggagggcggtcccgggcggcgcggtgggccgagcgcgggtcccgcctccttgaggcgggcccgggcggggcggttgtatatcagggccgcgctgagctgcgccagctgaggtgtgagcagctgccgaagtcagttccttgtggagccggagctgggcgcggattcgccgaggcaccgaggcactcagaggaggtgagagagcggcggcagacaacaggggaccccgggccggcggcccagagccgagccaagcgtgcccgcgtgtgtccctgcgtgtccgcgaggatgcgtgttcgcgggtgtgtgctgcgttcacaggtgtttctgcggcaggtgaatgacgggcgtgggtcggtgcgcgctcggcttgcgcacacggtgtctctaagtgcgcgggtgacgagagtcgggatgtgccggagaccccggggcggagagcgggattacaagtacaggaatccctggtcacgctccccgcccctggaaacccagctggggcgagggagggcgtggacgggaccgttctgggagctcgcctttggctgcggttggctccaggccccaggcgcagtttgctcgcggcgtggggatgaagtccgtgtccctggaggggcccaggaagggcgaggaaagcggagtggagtaagttcgtctaggatcggtcccgggtggctctgggatccaatctgcgccgccctggcccaggtcccaggttcaggtcctttacgccactgtgtccaccacctggctgagcgctgaggtcagcgcgggctgtttcctggcccttgggaatgtgccaggacccgtcccctaaggactagcgaggaggtgactcactgtgacaaggagaccccagggaacggactgtatgaggtcagaaccccgcccgggatggggtacagcgggactccagaagccctctcccctgccccttcgcggtctccgtcctcccatcggcacagtgacctatttggctggaacagtttgttcccaaggaagccgggcactggaggtccgggacaccgcgtcgggtccccgctccgcggcgcgctgtaggggtcggggagtcacggccctgctctgggcgggctctaaccagcctgtcagtcggggaagggcaagggtctcctctacctctttcccaccgcggccgggagaatcgcggcccagcctgtcctcgggtcggggcgctggactccggggcgggagcggagcccacgcctggatgggaggcggggagggttcatgtctttgaggggtggggggtctggggggcacgacgctgctcagggcctctatcagctgcctcgggggctcagggcttcccgacctagcccagattccctctccgaaagctacagggctgagcggagcaggggggcgagtcgccccctggggcgccgccgcctggcgcggaccacagcgcgtcctctccgtcccaaacccctgggggacacttgcgccctcttcgtgaggaaaagcatcttggagctgggttaggaacttggggcgcccaggcagcttcccctctccttgcctccc

SEQ ID NO: 2413 - DNA, 6000 bp, Homo sapiens
ttgtgcctatgatgtattgagacccagaatgtccatttcaaacataccagtgtgtctccgcttggctggcaacccaagagtgcccatctgaggaattgtgccaaacacttgcttgaatcttcaatctggattaagttggtctcgggaggcagggcctcagcaatctatattttgaaaaaactccctaggtgcttttctttctttctttttttctttctttctttctttctttctttctttctttctttctttctttctttctttttctttctttctttctttttctttcttttctttctttctttctttctttctttctttctttctttctttcttcctttctctttctctctttctttctctttctctctttctttcttttctttcgacagagttgcactctgtcacccaggctggagtgcaatggcaccatcctggactcaagtagtcctcctgtttcagcctcccaagtaaccgggaccacaggcgtgatccccccgcccccatgcccagatttttttttttttttttttttttttgagatgcggtctcgctctgtcacccaggctggagtgcagtggcgtgatctcggctcactgcaagctccgcctcccgggttcacgccattctcctgcctcagcctcccgagtagctgggactacaggtgctgccatcatgcccggctaatttttttttgtatttttagtagagacggggtttcaccgtgttagccaggatggtctcaatctcctgacctcgtgctccgccctcctcggcctcccaaagtgctgggattacaggtgtgagacactgcacccaaccacccagctaatttttatttatttttatttttagtagagacagggtctcagctagttgcccaggctagtcttggacccttgggctcaaatgattctcccacctctgcctcccagagtattaggattacaggcataagccactgcccctggcctccccaagtgattgtgatgggcctctctggttaagaaacctcaaaattagagagggagtggggttcaatactacagcacaggactcagggcaaacaggcctgggttcagatcctggctgtgccacttatgaactgtgtgatgttaggcaagttacttaacttatctgagccttggttgcctcttctgtaaaaagggagctaatagatatccactttttaggaggattgatatttttaaactgcttagaacagcccccaaacataaaaatatataaataaatcccaactcatgcctagcagagggtggatagaggttatttgagggctctgtccactgtactgggtgacccctttatggggcagtggcctttggcctttttagctgtatgactcaggggcaagtctcatatctcttccatctcctgccctttaaacttggtgtgaagttaccaagagcctcctctcccaaccagctgggacgtgaaactgtgggctccactgatcacaagcagtggggtgaggtggggtggagcagatgtggcatgtgtcccgggcttcctgcctcatgaggactcagcagagctttcacccccagaaactgcaagttgggacttgtccctaggaaaatccagttgctgccaaggtcgtgcagtcactcagccctggagtcaagccagagcaggcaggtaggtgccagggctccctcatgggcaaactcactctccgttttccctctcctgaagggggaggagaggagccaggtagaccagccacctttaattttctttttgcctgcaaaacggtttccttggacacaggcaacacgaggcaggggctgccaggtgtctagacttcagatcacctgatgtgcctggcaggatgtggctcagcctgggagaaatcatcccttgcgctgccccgcccggcccctccttacccctaggccacccgcctgacgacatccttgggaaaggccctcagcctacagcacctgtcagctgctgtctgaaggaggtagttggcagggggaagtgataggggggaggctcagtaaaactgaaggcagagaggaataatcatacttctgttttcaatgcacttctctatacgaagtgctgctggcacgttacctacattaactcagttaattctcatgtctatcctctgagacagtcactattactatccccattttatagatgaggaaactagagctcagacaagttaagttgcttgcccagggtcacctagtaaaacctggactccagcccaggtgatctggctccagagccctcctgcttaaccaccaggatacagcctttcattcagctctgttctgtctgccttgctgcatggactctgtgatcaatttcttgagtatgtgtctgtagccatgctctttaaacttgtacatggccccatttatggatgaggaaactgagacctagagacattaagtggctttttaaagcttacgtagtaactggcagagctaggaccacaacccgggtgctttttgccccaaagtcccgggtacttttacttggcagagcagggttaccctacttggggatctgggtcgggggacttaggaggctggaggaactgtcagactgtttcttcttttgggaattgaccttctggccagggctgcgattaggaaactgctggactctggcaattcacacatatttggggggcattcacacccatgagggacacctctggggggaaaacaaattgattttagctgataatacctggtggcaaacaggaccctggtccttgctcttgcaatagacttgcctttgttgacattagcttgcccttcagttgcctgctctcccagtgaccttggtgtgccaggctggctgagctctgctggtgggggtcaggcctcctgtgggaaggaagcaggaagaccagctggaaggagtgagagagaccctctggtaggaagacgtcacctgaggtgacacagcaaagcccggccaggtaacatagtgtctaatctccgccgtgaccagggccttccttgtatctctgctgcaggcgccatgtcagaaccggctggggatgtccgtcagaacccatgcggcagcaaggcctgccgccgcctcttcggcccagtggacagcgagcagctgagccgcgactgtgatgcgctaatggcgggctgcatccaggaggcccgtgagcgatggaacttcgactttgtcaccgagacaccactggagggtgacttcgcctgggagcgtgtgcggggccttggcctgcccaagctctaccttcccacggggccccggcgaggccgggatgagttgggaggaggcaggcggcctggcacctcacctgctctgctgcaggggacagcagaggaagaccatgtggacctgtcactgtcttgtacccttgtgcctcgctcaggggagcaggctgaagggtccccaggtggacctggagactctcagggtcgaaaacggcggcagaccagcatgacaggtgcggacatgtgcacggaaggactttgtaagggaccaggattctcagaatccatggtccaagggctgacctgtctggtcctggtccagcatgctccaggtagaaggaaacaggcccagagaggggaagcaacctccctgaggtcacacagcaagtaggcagcaaagaccaactagctaacatttattgggaatgttcattatgccaggccctttgccaagcttctaaggtagatttatttagtccttatagcaatgttataacataagacattcttgtcaccctgcccgcctttctttttgagacaggtgtcttaactctgttggccagactggagtgcagtgatacgatcatggctcactgcagcttcaaactcctgggctcaagcgatcttcctacctcagcctcctgggtagctgggaagctgggactatagttgtacaccactacgcccggttaattttttgagtttttgtagagacaaggtctcaccatgttgcccgggctggtcttgaactcctgagctcaagcagtcctcctgcctcagcctcccaaagtgttgtgattacaggcgtgagccaccatgcccagccccttgccatccttttagggcaaggaaaccaggctcagagaggtagagtgatttatctaaggtctcaaagtgaatttgccgttgggtcaagactaattataataacaacaactactgacgtttatatgggcccggcattgtgctgaacactttcatggattttgtaacagaatccctagatcagcactgtccagtaactctgcagggatgggagtgtccggtacaggggccacgagccacatacggctgttgtgcatttgacacacagctcatgtgactgaggaactgaattgttcattttatttgattgtagtctgtttaaacaagcacacagagctagtagtggttcctctgctgggcagcttgacttagagcagacccatgggtgcgggtgcggtgatggataaaatcacatctgtgaagcatggtgggacactccataatacccctcaagagacagagtggacgttccccgagttcttcctgttctcagcagtcggccccattggccccagggaagggtgtcctggccccccactgtcttcctcagttgggcagctccgccgcgtcctcttcttcttggcctggctgacttctgctgtctctcctcagatttctaccactccaaacgccggctgatcttctccaagaggaagccctaatccgcccacaggaagcctgcagtcctggaagcgcgagggcctcaaaggcccgctctacatcttctgccttagtctcagtttgtgtgtcttaattattatttgtgttttaatttaaacacctcctcatgtacataccctggccgccccctgccccccagcctctggcattagaattatttaaacaaaaactaggcggttgaatgagaggttcctaagagtgctgggcatttttattttatgaaatactatttaaagcctcctcatcccgtgttctccttttcctctctcccggaggttgggtgggccggcttcatgccagctacttcctcctccccacttgtccgctgggtggtaccctctggaggggtgtggctccttcccatcgctgtcacaggcggttatgaaattcaccccctttcctggacactcagacctgaattctttttcatttgagaagtaaacagatggcactttgaaggggcctcaccgagtgggggcatcatcaaaaactttggagtcccctcacctcctctaaggttgggcagggtgaccctgaagtgagcacagcctagggctgagctggggacctggtaccctcctggctcttgatacccccctctgtcttgtgaaggcagggggaaggtggggtcctggagcagaccaccccgcctgccctcatggcccctctgacctgcactggggagcccgtctcagtgttgagccttttccctctttggctcccctgtaccttttgaggagccccagctaccctttttctccagctgggctctgcaattcccctctgctgctgtccctcccccttgtcctttcccttcagtaccctctcagctccaggtggctctgaggtgcctgtcccacccccacccccagctcaatggactggaaggggaagggacacacaagaagaagggcaccctagttctacctcaggcagctcaagcagcgaccgccccctcctctagctgtgggggtgagggtcccatgtggtggcacaggcccccttgagtggggttatctctgtgttaggggtatatgatgggggagtagatctttctaggagggagacactggcccctcaaatcgtccagcgaccttcctcatccaccccatccctccccagttcattgcactttgattagcagcggaacaaggagtcagacattttaagatggtggcagtagaggctatggacagggcatgccacgtgggctcatatggggctgggagtagttgtctttcctggcactaac

SEQ ID NO: 2414 - DNA, 6000 bp, Homo sapiens
tcctcccttcccctcgggtgtgtgcagtggtggcggtgatgggggtgaggtcccagctctctggctaccatgggtgacccttgcgtcccacttcccctcgctgtgggggaggggagtctccgtttggaatcctccgtgagcaagggctccttggctttaccactcccccgtcaaggggagaggggaggaggccgcgcagaggaagtggggggcgtcaccttggggagggcgcatcctcctcctttattggtccttgtctctctaagtagcttaccctctctgccgtttttgctccctatcccacctcacttcagcgctcccacccccccgctgctgtgttccccacgctccagacccagcagtgactgtgcgccctcccccaggtatgtgaggagcagcgctgtgaggaggaagtcttccccctggccatgaactacctggatcgctacctgtcttgcgtccccacccgaaaggcgcagttgcagctcctgggtgcggtctgcatgctgctggcctccaagctgcgcgagaccacgcccctgaccatcgaaaaactgtgcatctacaccgaccacgctgtctctccccgccagttgcgggtgcgtgtgtaactccccccacccccgacacgtattgtctccccactttccaggaaaaggaaagcttgagatatcagaggctttctgccccctggagaggaagcaaggggatcaggacctttgggaaaggaattggggtggaacaaacgatggggcattgtggtgtgatggttagtatcactcccgcccaggcttgagctgcaggcaggcattaaaccccctcctcctgacctccaggggatgccactccttcctggtctttcccccagatagcaacaagtcaaattgcatgtctacactcactagtactttgcctctgggtttacgcagccaccatgagttatttattggcagcagaagggcatgcctgcacacccccactggagtaggggagtggaatgtgcttcatgtgggggagggggttttgccttggttgagtctttatcctcatgtggactttgtgatagaaaagcctcccagagccaattaaagccaggccctgattgctttaaggaagggctgatgtatttcatcccaccttctttgcttcctcttatatcccggaagaaacagcttcttcctaatccttcctcgtcctcattctgaggaactggagcagctgctttgggcctggtggaaacagctccctcttccccccttagcccaaggcccaagctgagggacagacagggaggtgagctgcatctgcttccgatgtgataatggtgccccctcccctggcccgccctctctgaccaaggtctttcataaccctgtggggagctgctgtcactcctgtggtttgggaagtggctccctgggcctcttgctggaaacttgggctgggctcaggccgggcaggaaagtcaccggttctgtcccgcctcagaaggagcctggggaggaggcgggggagctgctggatctggaagaggttatttaggacatgcagattgtctcctagggaggctgggggagagggtgggtgagctggcaccttcctccaccttgctctgtggcgggccaagtcttctgctgaccctgagaggagtctctgggccccatctcccagggaggagggcagcaagcaggctgctgtgattggctggcagggaagccagggtactggggcccccgactgctgtgagtcgaggaacaggattcctcttcctgccaagtagctcagagatgggagtaggaggccagagttgggaatccaggaggcgccacagctctttgtgatgaatctggtagtttttggcaagtctgaaggtggagctagtttccagggccagagagcaagatgtttttggaggggttggggctggaaggtagaaggggaacttcctttttgtgaaaagatggaggtggtttgtgtgcccacgtatgagggtttttcagtacaggcaaaaagtactcttccctctgcctgagctgggggtggagtgcccaaaagacttcctagaaggtcaaggttggaagggacctctgagaactccagttggtccaaatccgtgtgcagcagaggaggctgaggcccaaggaaggagggcaaggtcctgcctcagcatcgcactgagcagatgagtgtagaacctgggtcttctagctagaccaggttgccttaaaagtcaggaatgtgatggccgctgccacctactgaagctaagcactcccaggggtgtgttctccaccagttaacactgggattctctggttgcctggatatggggaaaggtggccactttccctcaaacacaaccccttgcctccccatagggagagtcccactcccagttgccttccagatgcttccttagaagctgagtcccttctgtttactgctgagttaggagttggctcctgggacatgcactaggggtagcgttgtaatttatctgtctcacttctggctccaggccaggctattttctctggggctctgtgagggtaggggttgatttgagaggctgacacctaagctggggccaagagagagacagctgtggctggggcctggaagaggttgggtggggttgccatttctgcctcaataaggagtcaaacccacaagttccttcctgagataaaacaatgaagaaatcctcatgtgtgcaactcagaaatggggccaggtctgggaacccatgacgagtggactggggtggagctcccagccttctcccgagacctagtactggcaggtaggcttgggtaggtgaggatagggcttgatccctctggaatcatttggagccatcctgtctggcttggcctctacctatcctcctgaaagtcaagtggcatggggcactacgggttccagctaaagggggtggggtggggtgctatacctcaggacccatccctgatatcctaccaaggggatgtggcttgggttgggcaatctcccctttgaggaacctgagaaaaggctctgtggctgtcattggaggagtcatactcccttctgttgattcaagaagtgtggacttggctgggatgcagagttgcaggggaagctagtggtgatctcccctttcacaaatccttggggttgagagagtctttctgcttcatcccagaagagagcccagttcatggtgatgctgtggtatctgctgcttccgtctttcagccctggctggagaaatcctcagagccctgaatgaagtcaggagaaggcctggattattggccccttaaacataaccagacaggattaaaagggataatccatgtaaagcatgttgtcctggcacctagtaaatgatcagtaagtgctcaaagcacatgcctcctcctcttccctgccttgaactccatggtgcccggccttaaaatcagaaacagaactggggtcttgggctttaaaagtttgatgggcttccctgcctgagactttgagacttctgctttgctccctcctcttcacttctccagccactgaccccaccctttccccgctttttcaggactgggaggtgctggtcctagggaagctcaagtgggacctggctgctgtgattgcacatgatttcctggccttcattctgcaccggctctctctgccccgtgaccgacaggccttggtcaaaaagcatgcccagacctttttggccctctgtgctacaggtaagagccctatgcacatttttgccaaattggaaaaatcagaagacttataagggtgagaggtaactgaagattctggtttatactgtcaaaattcctttgtgaaaattataccccctctgagcccccagtctcaatgcagaaaagcaggttataatcagctatatgggatctcagacccctccagtttgtagtggggacactgagggtatagagagaagtgacttgcccaaggtctcacagtgaacaggttgggaacagaaccccagtctcttggccctagttgtgttcccatactagggagtgtcttgtctattcccgggacctatggaaactggcagttggttctgatctctaggaaagatactctttcctgtcttcctcccttgctgatatcttgccccacccactgctggagttttccagcatgtcctctgctctactcatgctgcctggcactttccaaggagtcggaagtccatgctggccgttatccttcaggtttccttctctcatggttccctttcctcctctccaagattatacctttgccatgtacccgccatccatgatcgccacgggcagcattggggctgcagtgcaaggcctgggtgcctgctccatgtccggggatgagctcacagagctgctggcagggatcactggcactgaagtggtgagtgctgggtagctgggcagcagcctctccattcataaagtagtgctatgccctgagcctccagtagagggaaacctccaaccccaacctggtcccaagtcctggtttcacaaccttggggctttgtggctttttatctcctgccttggtctggggaagagcaagtatcttgggtggggtgaagggcactggccctaggggttcttttcttgccaagtggtgtgctggagtgggggtggggggtttggtgtcagatgcagggctgctctcacactcccttgccacatcctcttgctagtttctgagaactaaagagcgattcctggggccgggctgtggcctaacctccccagacttccccatgtgttgggagctgtccttcccctgcacctgctgccagatgctatggggggagtgtttgctcctcactcttctcccatgttcccaggactgcctgcgggcctgtcaggagcagatcgaagctgcactcagggagagcctcagggaagcctctcagaccagctccagcccagcgcccaaagccccccggggctccagcagccaagggcccagccagaccagcactcctacagatgtcacagccatacacctgtagccctggagaggccctctggagtggccactaagcagaggaggggccgctgccacccacctccctgcctccaggaaccacaccacatctaagcctgaaggggcgtctgttcccccttcacaaagcccaagggatctggtcctacccatccccgcagtgtgcactaaggggcccggccagccatgtctgcatttcggtggctagtcaagctcctcctccctgcatctgaccagcagcgcctttcccaactctagctgggggtgggccaggctgatgggacagaattggatacatacaccagcattccttttgaacgcccccccccacccctgggggctctcatgttttcaactgccaaaatgctctagtgccttctaaaggtgttgtcccttctagggttattgcatttggattggggtccctctaaaatttaatgcatgatagacacatatgagggggaatagtctagatggctcctctcagtactttggaggcccctatgtagtccgtgctgacagctgctcctagagggaggggcctaggcctcagccagagaagctataaattcctctttgctttgctttctgctcagcttctcctgtgtgattgacagctttgctgctgaaggctcattttaatttattaattgctttgagcacaactttaagaggacataatggggtcctggccatcccacaagtggtggtaaccctggtggttgctgttttcctcccttctgctactggcaaaaggatctttgtggccaaggagctgctatagcctggggtggggtcatgccctcctctcccattgtccctctgccccatcctccagcagggaaaatgcagcagggatgccctggaggtggctgagcccctgtctagagagggaggcaagccctgttgacacaggtctttcctaaggctgcaaggtttaggctggtggcccaggaccatcatcctactgtaataaag

SEQ ID NO: 2415 - DNA, 6000 bp, Homo sapiens
tgggctcactgcaatctccatctcccaggctcaaacaattctcctgcctcagcctcctgagtagctgggactacaggcgtgcgccactgcgttcggctaatttttatattttttttttggtagagatggggttttactgtgttggccaggcggtctcaaactcctggcctcaagtgatctgcctgcccctgcctcccaacgtgctaggattacaggtgtgagccaccgtgcccggccaactttgtgcttttaagtcccgcaatcacaactaactttttaaaaaagggttcaccacgtgccagccactcttctatgtattttaaacaaatcaacccatttcctcctcacaaccactctgtgggggggtactactgttatcaccatttttagaaaaggaaactgaggcacagagaggtggtttaacttagccaaattcacacagtgagggagtggagtggcagaggggtgtggctccaggccctggagggtcctctccatacgctagaccatgcgtttaccgttagaagccaggtcttcaggatttgctagagatgcaattctaggagtagggctcttgctgctcaaacttttgcttttcttagaggggttatggatgcatgttcataacagaaagggtactccttgagaaagggaataataataatcatttcagaaactactatctctgaatgcttgctttgtgccaggcacaggtaagacattttctgcttgtttaattttcagaacatcattatagggctattatattatccccactggataaaagaggaagcagagaggttccagtaattctctcaaagtcataagctgtggagccaggtttgaactgaaagcagtctctgactccagaaccctgtttagcacccctgttctcagccccatggctcgcttggctctccccagcatctcaatgggtctgaaggtaactaagccatggcatgtggactgtggggtgatgggcctcacccatcaccttgttcagcctctcacttctcagatgcggacttttttttttggagacagagtttcgctcttgttgccctggctagagtgcaatggcacgatctcggctcactgcagcctctggctccagggttcaagtgattctcctgctcagcctccggagtagctgggattacaggcatccaccaccacacctggctaattttttgtatttttagtagagacaaggttttaccatgttggccaggctggtctcgaactcctgacttcaggtgatccacccgtcttggcatcccaaagtgctgggattacaggcgtgagccaccgtgcctggcccagatgggggtattttgatgatgaagaggaagagaaagaaaatgtatctttcctccttggggtttcttatttggcctgtgacattccattcccacccctcctccaatttgccattttattgactttttctaactggatgtacctgggtagaaactcctcatactattggccctggtcattgctttgtctttagttttccttttagaaaaacaaaaacaaaaacaagaaaaacaagaggagcctctatttctttgaggtggaggtaactggtgaacttgtgctggtcctgcattgagctcacctgcctccccagtggccagtccttggccctgaaagtcagggatgatctagctctaggcatggctattccatccaggggtgaggcagaagtatctctcctaaagtcctgctcaccaggagctcccgtccccatactacaggttcacatccagctttcaggactagtcagtctatgtggccctccctcaattaataaatcagcaactaatttgccaggtgcggtggtttgtgcctgtaatcccagcactttaggaagctgaggcaggcagatcacttgaggtcaggagttcgagaccagcctggccaacatggtgaaatcccgtatctactgaaaatacaaaaattagccgggcatggtggtatgcacccgtaatcccagctactcaggaagctgaggcaggagaatcacttgaaaccaggaggcagaggttgcagtaagctgcactccagcctggtgacaagagcaaaactttgtgtcaaaaaaacaaagaaaaccaaaaaacaaagaaaaacacaaaaaacccttctatttgttaaaaaaaaaaaaatccaccgtgaaccaaaaattagtaaaaacaatgaactaaaattttgtttttgcaaaatgtatgataacaaaatgttaaggaaggtcatgtgccgttatggttcactgcagccttgaactcctgggctcaagcgatcctcctgcttcggtctccctagtagctgggactacaggcttgtgccaccgcacccagcttattttttttttttattttttgtagagataggagtcttgctttgttgtccaggctggtcttcaactcctagcttccagtgatcctcctgcctcagcctcccaaagtgctgggctgatgggacatttttatacatagtgccatgttactataaatgagaagttttaaaaatactgattttaaaaattaatttatgtcaagaatttttataaccaaagttaaaaaaccaaacaaaaaatatgaaaagggttaatatctttgagaggtgatgagaacttataagtcaataagagaaaacaaacatccctataaatgaataagctaaggacatgaatgggtaatgtacataagaaatgtaaatgtctagtaatatgccaaaatagatttattattactaataagccactttcactctctagttggcagagttgttttgaaaaatagatatgtaatgatggtggaaaagattggtttaactattcagcaggaaaatttggcaattagaagtgtatcaaaagccttagaatgtttcataaccttagattgggaaattccacttctagaaattaattcacttctagaaataatcatgagtgtgcacaaagatattaccacaaaaatattttacagtattatgtctaatagagaagaactagaaataatttaaatttccaccaatacaggtttgccaaaatacattttgtacattcacctaatggtatattatgtccctattacaaattatgtcctagaatatttaatagcatggaaaagtgttaacagtatttttttaatgaaaaaagcttacaaaacagtttgtgatgattccatttaaaatgtgtgtttattcatagaacaaagattagaaaaataaacattgatatattaaagggttatttcatggcaaattgcaaatgattatttcctttttttgtggcttatttgtatttttgaagttttctacaatgtaaaagaatattttatgatatgaaaactacaatacaatttataatataagaaagaataattcggccgggaacggtggctcacgcctgtaatcccagcacttttggaggccgagaccggcggatcacgaggtcaggggttcaagactagcctggccaacatagtgaaaccccatctctacgaaaaatacaaaaattagtcaggcatggtggtgcgtgcctgtagtcccagctactcgggaattgcttgaacccgggaggtggaggttgcagtgagcccagatcgcaccactgcactccagcttgagcaacagagtgagacttcgtctcaaaaaaaaaaaaaaaaaaaaaaaagaataattaacagaaaatggttagacacttccttagtgtctcctaagtcaggaggaccccagtagggcagggatcctcatggcctcctcccatttggagcattattggaggtctttttcggcctcttcgtcaagtggaatctagcttccggtaaaactacaaagtaaccaaaagtttgggaggtggaagaaatgcaaccggtagatctcacagagtctgtgcaagaaactgattcaatgagaatctagtttctccgtccacagtttctccaaacagaaactaaggccgactttaggggcttgtccaaacctaggcaagcaacttaacaaggtgaggccatgactccatggcctttccgttctgttatatgctgacttagactaaagctctcatactttaaagtgcacagaaatctagttaaaatgcagattctgattcaggttaggggtgggcctgagagtctgcatttctaaccagctcccaggcgatgaccacgcacgggacaggtctgggatcacagtttaactagcaatggtgtagaacacagaatctgcagcaagaaggccagcttcccaatcctagctctgccacggaccaactgaatgacagttgcctcggtttccgagttttcgtgaagatgtagtgagtcattacatcgtgaggctttcgagcagcgttcactaagaactagctctgacattatttatcgcattccttagagcaagcagccggtgaagtagggtttgacgaatgaataagtgaatgaatgacctttggagaaaaattgtttcctgggtgactagagtccgagaagcaaaatgggagggcccgtgggtgggtaggaggcccacctcctagaaagttctctgcacccggtggtccagagggcctggagtgcccggaagccggccggcttgcgctcagcggcccaatggggccgcgggagggaggggagagcgctcagccaaccctttccgtccggggcgccgcagccccgcccctcggagcgttgcgacgtccgagcattccacggttgctacatcgtcgcgaggggcggggcgcctgtcagggaagcggcgcgcgcgcgcgggcggcgggcgggctggggatccgccgcgcagtgccagcgccagcgccagacccgcgccccgcgctctccggcccgtcgcctgccttgggactcgcgagcccgcactcccgccctgcctgttcgctgcccgagtatggagctgctgtgttgcgaaggcacccggcacgcgccccgggccgggccggacccgcggctgctgggggaccagcgtgtcctgcagagcctgctccgcctggaggagcgctacgtaccccgcgcctcctacttccagtgcgtgcagcgggagatcaagccgcacatgcggaagatgctggcttactggatgctggaggtaccgcccggacgcgtccccctcccccaccgctcccgggtctggacacaccggggccgccctgtcgggacatcccggtccccacagcaatctgcaggatgctccgaggctaagactcccggggcctggcctttcactagggcacccacgccagctgcctcccttgctttcccgagccctaatcggctcctcccgacagtgactgccagtcacttggcaccctaactgtgcctctcttcgggccgagcaaacgggaccaaggacactctctccccttcggcttctcacagcgtctcccgcttccctccgcctcccggccttctccggagagcgcgcctggaaaaccctgggctcggccgcccccgcccgggagccggttcctgtgtctttcgcggggttctggcggggaaggcgatgggggtggcgcgcgccctgttccggccgacagggaaatgaaaagtgcaggaggcagcggcaggagcctcctcccttcccctcgggtgtgtgcagtggtggcggtgatgggggtgaggtcccagctctctggctaccatgggtgacccttgcgtcccacttcccctcgctgtgggggaggggagtctccgtttggaatcctccgtgagcaagggctccttggctttaccactcccccgtcaaggggagaggggaggaggccgcgcagaggaagtggggggcgtcaccttggggagggcgcatcctcctcctttattggtccttgtctctctaagtagcttaccctctctgccgtttttgctccctatcccacctcacttcagcgctcccacccccccgctgctgtgttccccacgctccagacccagcagtgactgtgcgccctcccccaggtatgtgaggagcagcgctgtgaggaggaagtct

SEQ ID NO: 2416 - DNA, 6000 bp, Homo sapiens
tgtgattgtacattcttattttcaaaatttcttcttctttttttttctttttttttttttgagacggagtttcgctcttgttgcccaggctggagtacaatggtgtgatcttggctcaatgcaatctctgccacctgggttcaagcgattctcctgcctcagcctcccgagtagctgtaattacaggcgcccgccaccacatccagctaattttttgcatttttagtagagacagggtttcagtatgttggcaaggttggtcttgaaactcctgacctcaggcgatatacccgcctcggcctcccaaagtgctgggattacaggcgtgagccaccacacctagacccaaaatttgttttttctaacgtggcaaatacacatatacaaaagctacttggggtcctcaatgtttattaatataaagggattctgagagctgggtgtggtggcacatgcctgtagtcccagctatgtgggaggcttgggtccagaagtttgaggccagcctgggcaacacagcaagaccccatctctaattaataagaataaataaatataggagttctgaagccacaatgattgagatcactgctttaggaaaacatttggtatttaaaagtgccaaatatcagctgcagagagccaccttgcccaagatcacccttcctggggtagcccacatctactgtttgatcaagacctgagtataaaggcagggccttttcagcttgatgggcaataatgctccaggggtcctggctaagttgtccacttctttattgggcctgcattgcaccccacatctccctctgcccaaacctttctcctacttcctttcatagttgttgatccctaagaaacaccgtaaatacttccatccctcatcccatcccatgccccaaaagttcaaaacagggaaatatgttgtacatgcagaaaagcctctgtaagaccacacccgggcttctaaatctcaacacatttccttttaaaagtagcttttcagctgggtgtagtggctcatgcctgtaatcccagcactttgagaggccaaggtgggtggatcacctgaggtcaggagttcaagaccagcctggccaacatggtgaaaccctgtctctactaaaaatacaaaaattagccaggcgtggtggtgcacgcctatgatcccagctacttgggaggctgtggcaggagaattgcttgaacctgggaggcggaggctgcagtgagctgagattgtgccactgcaccccagcctgggcaacacagtgagactctgtctcaaaaaaaaaaagggggggggggcttttccccttcattctttgtatcacacaatctagcatttcattacataatgtgatgatatctattgcatggggaattagtcctgactccccaacaaaagtccttaagggcacccataactcaccaagagcttaaaatctccccagcactgaatgttttatatatacatctcacttacactcacaaatccatgaggtagaaactgttatcccatttcagaaatgaggaaattgaggttcaggagattcagtggcttgcccaagctattaagtgacagagtgatgatgtacaccaagtctatctgattctaaagcctgtaagtcacttcattatgctcttttctgtttttgttgttgttgttggagatggagcctcacaggctggagtgcagtggtgcgatctcagttcactgtaacctctgcctcccagattcaagcgattctcctgcctcagtctcccgagtggctgggattatagacacctgccaccacgcccagctaatttttttgtgtgttttttagtagagacggggtttcgccacgttggccaggctggtcttgaactcctgacttcaggtgatccacccgcctcagcctcctaaagtactgggattacaggcgtgagccaccacgctcggcccattgtgctgttttcttttctcaactttttacattaaaaaaaattttttttctcccctcttaagaaaaaagtttgtttcttaaatcctctcaaacactatcacaaagcagggcacagaactgatgttggggttgactccaaggccaagtgtttccatgtactcacagctctgcagcatctctgtcagcgtttccacggatgctttctcggcactctcaaaccctgcctctgtcagcaaggagctcacaaccacctgcagggttctcctccgggccagatgatagttatcggcagggttagtggactgtttacttcccgatctctgtgaatcagcagagagattttcatccacaggagaaggatgcaatcacatagttcatacgtggtcaacggcaagcaaagttattttactaaataattttattttaaaaatcagtgcttaatgtttagatttacagatcttggccaactgagtaaaaattgagcacccaaggtgctttaaatacagagaccacttctccgcttacctaaaacgtacagtcccaatgagataaaatagcaggtcttttactttctactttagcagattattagaatacatagctgaagaaacacgcatgatgggattaagacgtgtcccgcagaaaaaacaggatccctctcttgtgcctcccatcttcacaccatttcattgaaagggaaaatgaaaacagtaacaagaggtgaccgcgaggagaggagggcaaaagataaaagcacaaaaaagtaagaaagctaaatattttgaaacgggaatgcctttcaactttggccggccaataagaaggcgaaaacggcatcttcagaccaatcgggggtgttccgggctcccaacccccaacagcgaacgagccaatcaagacacaggtccgccaactccggaggccgcagccaagtcccaaggagggggcgcctacggcctgaaaacaccctccgccagtcggagctcatgatggggctgaatttctgggcattatcttgttgctcagtcgaggggaaagttgcaggatacccaaactctctcggctccgagcccgcgcttcctgcccttaccgttccggagccaccggccccagctgtggccgccgcgtcggccatcttgttctggcgtagtgtgcgcgagcgcggggcgcgatgggacttgtagtcgcggggcggggcggggcggggcggcgtgcgccccttggttttccgaagcccagtcggttgggggacgcctccggtgaccccggctcacgtgactttttttttttttttttggatacagagtcttgctccgtttcacaggctagagtgcaatggcgcgatctcggttcactgcaacctccacctcccaggctcaagcgatcctcccgcctcagcctccggagtagctgggattacaggcgggcaccaccacgccccgctagtttttgtatttttagtagagaccgagtttcgccatgttggccaggctggtctcgaacacctaagctcaagcagtccgcggcctcggcctcacaaggtgctgggattacaggcgtgagctaccgcgccagcctcacgtgaccttttgagagtgaagtgttctggggccttcagtggcttggttgtgggccaggaaaacgcgcccggtttcactgagttaaaagaaacctattttaatatgaaaatcggttcttataaagagcataccaggagatcatctacactcgcagggttttccaaacttgtcttattattagtaacacctggctgggcccagcccaatcccagtgacttcactctctggaagaggggcttgggaatctttctcattaaggagctccccagatgattcttctgagcgagtaatgttgggaaaccctggagcatccagcctggtgattttgtgctgagggccgccccgcctgtcaatggcccacttggaagtagagcctggaccacctagtccaagtctatcgctgcatcctgctgccttcgcgccctcgacccgcaagtatttgcgaggcaagtctagggggcgggagacttgtcccttgccgcctcactcccagggcgtggggtgcccgcggctaccagtggttttctccctagcctgtcagcccctctagctgcgccgtgttcgtccccatttgcaggtgcctggcaggacgcagattctgggcttggatcctaacactagccagctatggtacttcgggcacttgaccttaatcctcagtgtgtctcagtttcctcttctgtaaagctgggggaaagatgagatgatacacagaaagagtctgtcacagtgcctgacgtgtagtaagagtcaagaaatcggccgggcgcggtggctctcgcctgtaatcccagcactttgagaggccgaggcgggtggatcacctcaggtcaggagttcgagaccagcctgaccaacatggtgaaaccccgtgtctactaaaaatacacaaaattagccgggcgtggcggcgtgcgcctgtagtcctagctactcgggaggctgaggcaggagaatagcttgaatccgggaggcggaggttgcagtgagccgagatcgcgccactgcactccagcctgggcgacagagggagactccatctcaaaaaaaagaaaaagaaaaagaagtcgctcctcatgatgttgtttacttcctggatagcacgtggaggagttgccaacgccgggaggcagcggtccgggaacccgtgctgccccggccccgccgcccacacctgagcctccgtggcgccccgcccccgcacctatgccgcgtggggcgggggctgcgggcgggggtgcgcggcgccggatgagcctcctggcctcgccgagggtgtacagggggtgggagagtcaggccggggaccgaaacttggctgagcagagcaccagcccctttgtctcctccgccccctcttccccacttcctgcccagctctggatcggcggcgcggcgcggactttgtaaacacttcgccactgcaggggtggagactggctctgttcggatgccggccgggggggagaggtgcaatcctctcctcgcggctggtggttgcgaccacccccactccccaaaggcaggctccggaggcggcgggacagagcgcctgcgaccccagtcggtgctccggggaggtcacctgacgaggaggtaggcttgggtgctggagaaaccggggtagatgggatgtcagctcaggctggagaccatgcgttggggatcggtgctgggtgggtcaatggggtcgccgcatcctcatcacttcctagttggcaccgaaagcttggctcactttcccactgagtgaggtgttctgcacggaattgaagggcagagaaacccccaaaggccctgagccctctgtatgtacacacatcggcacaaccccctccagctgatctggaagccccgtggctttaccgggctgttggtcttctcatgcctcaaagatggggtggaaggccagtaggagggcagaccagtgtggatggggagtctgtgagtgctctggcaagtgcaccgggatgaaactggagggagggacccctcagtggtgtctgattgatacatagatgatgatcttagcttcttctgtgtctcttgaagtgccaacaagaggaataactgaataaattggttgctgttactaagggagcattaagttattcatttgcattgattgaacacctactatgtgcctggcattatatggaatgctgagggtgcaatgatgttattcatccacagctaatatggatcacaaaacaatagacatagatgccaagtacactggctggggtggctgggaaggcttcagagagaaaaggacatttgagttgggttcagaaggatgaaaagcatagaagtctttgggggcacttattccacagaactggattgaaccccagctgtggtgttggacactggaatataggggcgacccagaaacaattcctgctccctttaatccactgtctaaccatcaagggaatgaacaggatgaatcccagaaaaggcagttttct

SEQ ID NO: 2417 - DNA, 6000 bp, Homo sapiens
caaaaggtagaaacaacaggtgaatgaacaaacaaaatgtgctgtatacatacaatggaatattattcagcctttaaaaggaaggaaattctggtaatgttatagcatagatgaactttgaaaacattatgctagaccaggtgtggtggcgcaggcctgtaatcccagcactttgggaggccaaggccagtggatcacctgaggtcaggagtttgagaccaacctgaccaacatggcgaaaccccttctctactaaaaatacaaaaattagccaggcctggtggtaggcgcctgtaatcctagccacttgggaggctgagaaatagcttgaacctggaaggaggaggttgcagtgagcagagattgtgccattgcactccagcctgggcgacagagtgagaactccttctcaaaaaaaaaaaaaaagaaaagaaaaagaaaacattatgctaaggccaggtgtggtggctcacgcctgtaatcctagcacttgggaggctgaggcaggtggatcacttgaggtcaggagttcaagactagcctggccaacatggcaaaaccccaactctaccacaaatataaaaaattagccaggtgaggtggcacacacctgtaatcccagctactcaggaggctgaaaatcgcttgaacctgggaggtggaggtggttgcagtgagccgagatggcaccactgcactccagcctgggagacacagcgagactccatctcagaaaaaaagaaaagaaaaaagaaaacattatgctaagtgaaataaggtagacataaaaagacaaataaagattctacttatatgaggtatctagagatggaaagtagattagaagttaccaggggatggagggggagggagaatggggagttattgtttatgggtacagagtttctgtttagaatgatgaaaaagttctggaaataatgtaaatggctgcacaacattgtgaatgtacttaataccactgaattgtacacttaaaaatggttaaaatgataaatttttttatgaatatctcactaccacacacacaaaaaggtcttattctctgatgggcaatttttctttcttctgcctgaagctgaacctctatttaagagtcacgttaaagtcttttggggaaaggggaaaggtttctaagatggagtttttgaagctcggctctgtgaatgagcttccaaggtggacaggaggtttcatgaatactctgaagctgtgctgaattttaaacacaaaaaaagcattttttggggaatgggtccacagattttatcaaatgtacaaaggggtctcaaaaggtaaagaactcctactttaggggcccagtggctcagaagataaaagcaagtggtacttgacagggaagggtgtctaacaagagacctaccacctaccaccaacccccctgctatactgagcaagtcactaataccagcctctagacatgacttttaaactctaaattccaagattgttccaagaactgcattcttatctcttgggaactattaattcattcctttaggacaaagttcaaaaagtagtagcctgggaatctgtggtaggccccaaaatcttttctaaagtccacaggtcaaaactattttcataataaaattaagttgttatttgactttttcactctcattctctcaggtagttttcctgagtctatgtgacttttgatgacaacatgggtctgatgaataacagaatatgtgattgtacattcttattttcaaaatttcttcttctttttttttctttttttttttttgagacggagtttcgctcttgttgcccaggctggagtacaatggtgtgatcttggctcaatgcaatctctgccacctgggttcaagcgattctcctgcctcagcctcccgagtagctgtaattacaggcgcccgccaccacatccagctaattttttgcatttttagtagagacagggtttcagtatgttggcaaggttggtcttgaaactcctgacctcaggcgatatacccgcctcggcctcccaaagtgctgggattacaggcgtgagccaccacacctagacccaaaatttgttttttctaacgtggcaaatacacatatacaaaagctacttggggtcctcaatgtttattaatataaagggattctgagagctgggtgtggtggcacatgcctgtagtcccagctatgtgggaggcttgggtccagaagtttgaggccagcctgggcaacacagcaagaccccatctctaattaataagaataaataaatataggagttctgaagccacaatgattgagatcactgctttaggaaaacatttggtatttaaaagtgccaaatatcagctgcagagagccaccttgcccaagatcacccttcctggggtagcccacatctactgtttgatcaagacctgagtataaaggcagggccttttcagcttgatgggcaataatgctccaggggtcctggctaagttgtccacttctttattgggcctgcattgcaccccacatctccctctgcccaaacctttctcctacttcctttcatagttgttgatccctaagaaacaccgtaaatacttccatccctcatcccatcccatgccccaaaagttcaaaacagggaaatatgttgtacatgcagaaaagcctctgtaagaccacacccgggcttctaaatctcaacacatttccttttaaaagtagcttttcagctgggtgtagtggctcatgcctgtaatcccagcactttgagaggccaaggtgggtggatcacctgaggtcaggagttcaagaccagcctggccaacatggtgaaaccctgtctctactaaaaatacaaaaattagccaggcgtggtggtgcacgcctatgatcccagctacttgggaggctgtggcaggagaattgcttgaacctgggaggcggaggctgcagtgagctgagattgtgccactgcaccccagcctgggcaacacagtgagactctgtctcaaaaaaaaaaagggggggggggcttttccccttcattctttgtatcacacaatctagcatttcattacataatgtgatgatatctattgcatggggaattagtcctgactccccaacaaaagtccttaagggcacccataactcaccaagagcttaaaatctccccagcactgaatgttttatatatacatctcacttacactcacaaatccatgaggtagaaactgttatcccatttcagaaatgaggaaattgaggttcaggagattcagtggcttgcccaagctattaagtgacagagtgatgatgtacaccaagtctatctgattctaaagcctgtaagtcacttcattatgctcttttctgtttttgttgttgttgttggagatggagcctcacaggctggagtgcagtggtgcgatctcagttcactgtaacctctgcctcccagattcaagcgattctcctgcctcagtctcccgagtggctgggattatagacacctgccaccacgcccagctaatttttttgtgtgttttttagtagagacggggtttcgccacgttggccaggctggtcttgaactcctgacttcaggtgatccacccgcctcagcctcctaaagtactgggattacaggcgtgagccaccacgctcggcccattgtgctgttttcttttctcaactttttacattaaaaaaaattttttttctcccctcttaagaaaaaagtttgtttcttaaatcctctcaaacactatcacaaagcagggcacagaactgatgttggggttgactccaaggccaagtgtttccatgtactcacagctctgcagcatctctgtcagcgtttccacggatgctttctcggcactctcaaaccctgcctctgtcagcaaggagctcacaaccacctgcagggttctcctccgggccagatgatagttatcggcagggttagtggactgtttacttcccgatctctgtgaatcagcagagagattttcatccacaggagaaggatgcaatcacatagttcatacgtggtcaacggcaagcaaagttattttactaaataattttattttaaaaatcagtgcttaatgtttagatttacagatcttggccaactgagtaaaaattgagcacccaaggtgctttaaatacagagaccacttctccgcttacctaaaacgtacagtcccaatgagataaaatagcaggtcttttactttctactttagcagattattagaatacatagctgaagaaacacgcatgatgggattaagacgtgtcccgcagaaaaaacaggatccctctcttgtgcctcccatcttcacaccatttcattgaaagggaaaatgaaaacagtaacaagaggtgaccgcgaggagaggagggcaaaagataaaagcacaaaaaagtaagaaagctaaatattttgaaacgggaatgcctttcaactttggccggccaataagaaggcgaaaacggcatcttcagaccaatcgggggtgttccgggctcccaacccccaacagcgaacgagccaatcaagacacaggtccgccaactccggaggccgcagccaagtcccaaggagggggcgcctacggcctgaaaacaccctccgccagtcggagctcatgatggggctgaatttctgggcattatcttgttgctcagtcgaggggaaagttgcaggatacccaaactctctcggctccgagcccgcgcttcctgcccttaccgttccggagccaccggccccagctgtggccgccgcgtcggccatcttgttctggcgtagtgtgcgcgagcgcggggcgcgatgggacttgtagtcgcggggcggggcggggcggggcggcgtgcgccccttggttttccgaagcccagtcggttgggggacgcctccggtgaccccggctcacgtgactttttttttttttttttggatacagagtcttgctccgtttcacaggctagagtgcaatggcgcgatctcggttcactgcaacctccacctcccaggctcaagcgatcctcccgcctcagcctccggagtagctgggattacaggcgggcaccaccacgccccgctagtttttgtatttttagtagagaccgagtttcgccatgttggccaggctggtctcgaacacctaagctcaagcagtccgcggcctcggcctcacaaggtgctgggattacaggcgtgagctaccgcgccagcctcacgtgaccttttgagagtgaagtgttctggggccttcagtggcttggttgtgggccaggaaaacgcgcccggtttcactgagttaaaagaaacctattttaatatgaaaatcggttcttataaagagcataccaggagatcatctacactcgcagggttttccaaacttgtcttattattagtaacacctggctgggcccagcccaatcccagtgacttcactctctggaagaggggcttgggaatctttctcattaaggagctccccagatgattcttctgagcgagtaatgttgggaaaccctggagcatccagcctggtgattttgtgctgagggccgccccgcctgtcaatggcccacttggaagtagagcctggaccacctagtccaagtctatcgctgcatcctgctgccttcgcgccctcgacccgcaagtatttgcgaggcaagtctagggggcgggagacttgtcccttgccgcctcactcccagggcgtggggtgcccgcggctaccagtggttttctccctagcctgtcagcccctctagctgcgccgtgttcgtccccatttgcaggtgcctggcaggacgcagattctgggcttggatcctaacactagccagctatggtacttcgggcacttgaccttaatcctcagtgtgtctcagtttcctcttctgtaaagctgggggaaagatgagatgatacacagaaagagtctgtcacagtgcctgacg

SEQ ID NO: 2418 - DNA, 6000 bp, Homo sapiens
tttggggaagagaaaagtgaaggggccaaagaagagactttctggaattagcctttctcaacctgcacgaatcccaggggaattccaacagatgggtaacttgttccaatgccatttctagcagtgtctgttgccacccctagaaaggggcaggccttgacagctctttgaaacttgaggatttaaaatttaaatgtctttgagagcaagataaacacatctactgctcagcagggaaagggaaacttggcaggggccccagaactttccccacccccagccctccctaaacttcctcttgtggtttttcaagagtacaacctgttctccacagccaagccagtgcctggggcagggggccagggcgtgccaagggctccgctgcaccccaccctaccagcgagtgagggaggaaggtgcgtgcgtgggagaagagcagcttggaggtttatagttcttaaggttcacgtcctgcttacccgttttctcagtgcagccaccctccacccagttcccaccctcgactcccagcatcaatacccatgcccccaacacacatccctttctcaaagacagatgcacgaagtgctttgactgcaggcagagagggaccgcctcaaggcctccccaaacctgtggggagggcccttgtaagaaatttaaaagcgtttcagaaaggaggtggaaaaggggctggaatccatggaaactgtcccgtgctctcgcttgcatcaccagcattatcccagcctgtctggagggactgggtaggatatacagatgcagctttggaagcaggagctgtgggaaagagaggtgtgagcatcttaagcctggacccactccttggccatcttccttactcatctaccaagctggaatgcacatctagaatgtgagcatctctgctattcttaattcccaacaaaagaggtgtcttggtttcccaaatccccagattctggcacatcacgtccaagttgagaagttctttcttgaatataatcttagttcattcctcccggtttattcatattcctcctttccctttgagtgaggcttacacagggggaaacattcatacgtttgtgtgcacgcacacacgcgcgcgcacacacacacacacagccatcaggaaaggataccagctctgtgcagttcccacaactctattccaggcctgctgggctcactgtaaacagtaccagccctatggctcagctaacagatggctgtatcatccaagatacaggaccacagactccctttaggaaactcctaagttcctggctcaagtgcacattttttgtggtcagcgaaggaggcaggctagcctaatggttaagaataaagcctcccaaatcaagtgacctaggtttaaatcccagctctgccatttgtttcttgtgtctgaaggaagattacttatctccagtgcctgcgtttcctcgtctataaaatggagagaatcctaatgcctacctcataggactatattaggaggtttaaatgagatatgatctctaagccacttagaagagtacctgacagtgttatgtaactgttagctagtattctaagcccttgagggaaggggaagccggaaggagaagatgtttgggaccatggaggtcatgatctcaataactggcatagactagaactctgctacaattatcagaggctttcagtgttaagttccaggggaagaaactctgatttgattaccatgacatccccaacagctgtgggaatagcctgtgcagatggagtatggccatagcaaataggtgctgaatgaattcataaattgctgtgtcagtcatttcccgaaggagccccagaattgaacggccagaagaatctgtgaggaagcaaagggagatccacttctctatccacgtctggtcccaaagagaaatgaggtggtaggcagagggcaaggactcgtcagaggaaacagtctcagagtccagggatgaggagggggtgcccaggattgtgtggactgtcacatcacccccaggtggaccctcccagctgtacccagctgggaattcctgggttcttgggacccagcccagaaaactgccttttctgggattcatcctgttcattcccttgatggttagacagtggattaaagggagcaggaattgtttctgggtcgcccctatattccagtgtccaacaccacagctggggttcaatccagttctgtggaataagtgcccccaaagacttctatgcttttcatccttctgaacccaactcaaatgtccttttctctctgaagccttcccagccaccccagccagtgtacttggcatctatgtctattgttttgtgatccatattagctgtggatgaataacatcattgcaccctcagcattccatataatgccaggcacatagtaggtgttcaatcaatgcaaatgaataacttaatgctcccttagtaacagcaaccaatttattcagttattcctcttgttggcacttcaagagacacagaagaagctaagatcatcatctatgtatcaatcagacaccactgaggggtccctccctccagtttcatcccggtgcacttgccagagcactcacagactccccatccacactggtctgccctcctactggccttccaccccatctttgaggcatgagaagaccaacagcccggtaaagccacggggcttccagatcagctggagggggttgtgccgatgtgtgtacatacagagggctcagggcctttgggggtttctctgcccttcaattccgtgcagaacacctcactcagtgggaaagtgagccaagctttcggtgccaactaggaagtgatgaggatgcggcgaccccattgacccacccagcaccgatccccaacgcatggtctccagcctgagctgacatcccatctaccccggtttctccagcacccaagcctacctcctcgtcaggtgacctccccggagcaccgactggggtcgcaggcgctctgtcccgccgcctccggagcctgcctttggggagtgggggtggtcgcaaccaccagccgcgaggagaggattgcacctctcccccccggccggcatccgaacagagccagtctccacccctgcagtggcgaagtgtttacaaagtccgcgccgcgccgccgatccagagctgggcaggaagtggggaagagggggcggaggagacaaaggggctggtgctctgctcagccaagtttcggtccccggcctgactctcccaccccctgtacaccctcggcgaggccaggaggctcatccggcgccgcgcacccccgcccgcagcccccgccccacgcggcataggtgcgggggcggggcgccacggaggctcaggtgtgggcggcggggccggggcagcacgggttcccggaccgctgcctcccggcgttggcaactcctccacgtgctatccaggaagtaaacaacatcatgaggagcgacttctttttctttttcttttttttgagatggagtctccctctgtcgcccaggctggagtgcagtggcgcgatctcggctcactgcaacctccgcctcccggattcaagctattctcctgcctcagcctcccgagtagctaggactacaggcgcacgccgccacgcccggctaattttgtgtatttttagtagacacggggtttcaccatgttggtcaggctggtctcgaactcctgacctgaggtgatccacccgcctcggcctctcaaagtgctgggattacaggcgagagccaccgcgcccggccgatttcttgactcttactacacgtcaggcactgtgacagactctttctgtgtatcatctcatctttcccccagctttacagaagaggaaactgagacacactgaggattaaggtcaagtgcccgaagtaccatagctggctagtgttaggatccaagcccagaatctgcgtcctgccaggcacctgcaaatggggacgaacacggcgcagctagaggggctgacaggctagggagaaaaccactggtagccgcgggcaccccacgccctgggagtgaggcggcaagggacaagtctcccgccccctagacttgcctcgcaaatacttgcgggtcgagggcgcgaaggcagcaggatgcagcgatagacttggactaggtggtccaggctctacttccaagtgggccattgacaggcggggcggccctcagcacaaaatcaccaggctggatgctccagggtttcccaacattactcgctcagaagaatcatctggggagctccttaatgagaaagattcccaagcccctcttccagagagtgaagtcactgggattgggctgggcccagccaggtgttactaataataagacaagtttggaaaaccctgcgagtgtagatgatctcctggtatgctctttataagaaccgattttcatattaaaataggtttcttttaactcagtgaaaccgggcgcgttttcctggcccacaaccaagccactgaaggccccagaacacttcactctcaaaaggtcacgtgaggctggcgcggtagctcacgcctgtaatcccagcaccttgtgaggccgaggccgcggactgcttgagcttaggtgttcgagaccagcctggccaacatggcgaaactcggtctctactaaaaatacaaaaactagcggggcgtggtggtgcccgcctgtaatcccagctactccggaggctgaggcgggaggatcgcttgagcctgggaggtggaggttgcagtgaaccgagatcgcgccattgcactctagcctgtgaaacggagcaagactctgtatccaaaaaaaaaaaaaaaaagtcacgtgagccggggtcaccggaggcgtcccccaaccgactgggcttcggaaaaccaaggggcgcacgccgccccgccccgccccgccccgcgactacaagtcccatcgcgccccgcgctcgcgcacactacgccagaacaagatggccgacgcggcggccacagctggggccggtggctccggaacggtaagggcaggaagcgcgggctcggagccgagagagtttgggtatcctgcaactttcccctcgactgagcaacaagataatgcccagaaattcagccccatcatgagctccgactggcggagggtgttttcaggccgtaggcgccccctccttgggacttggctgcggcctccggagttggcggacctgtgtcttgattggctcgttcgctgttgggggttgggagcccggaacacccccgattggtctgaagatgccgttttcgccttcttattggccggccaaagttgaaaggcattcccgtttcaaaatatttagctttcttacttttttgtgcttttatcttttgccctcctctcctcgcggtcacctcttgttactgttttcattttccctttcaatgaaatggtgtgaagatgggaggcacaagagagggatcctgttttttctgcgggacacgtcttaatcccatcatgcgtgtttcttcagctatgtattctaataatctgctaaagtagaaagtaaaagacctgctattttatctcattgggactgtacgttttaggtaagcggagaagtggtctctgtatttaaagcaccttgggtgctcaatttttactcagttggccaagatctgtaaatctaaacattaagcactgatttttaaaataaaattatttagtaaaataactttgcttgccgttgaccacgtatgaactatgtgattgcatccttctcctgtggatgaaaatctctctgctgattcacagagatcgggaagtaaacagtccactaaccctgccgataactatcatctggcccggaggagaaccctgcaggtggttgtgagctccttgctgacagaggcagggtttgagagtgccgagaaagcatccgtggaaacgctgacagagatgctgcagagctgtgagtacatggaaacacttggccttggag

SEQ ID NO: 2419 - DNA, 6000 bp, Homo sapiens
ggtgactggtgagtcacacaaaagagaagtaagtcctgctcctctggagctttcaggctgcttatggtacagtttgggagatgcatgtttaaaattcaaatccaaatcaacctactccgaaatgctgggaatacatcaaggaacaagagtgaaatgacccctcccctccattcatatgtgaagaattcccagaaacaatgcagagggcaaaaggaattggcactgatggtggtacatggatgtgtggaagctaccagctctggagaagggaattgtttaggtaaaaacagattcctggagatggagagttctgagccaaatttggaaggagatcaccaaggagagaacattactgtgcaagctgtgaagggtggagtttttggatagctggtttgggatacatccaggaggaagtgggctacaagctaaaattgatctgtgccctctgccttggttctctgatgctttgccttcaattagctttcaaatgaaagagatgtctttttatccctagatgatgaacaatggcctcctccaacagccctctgccttgatgttgctcccctgccgcccagttcttacttctgtggcccttaatgccaactttgtgtcctggaagagtcgtaccaagtacaccattacaccagtgaagatgaggaagtctgggggccgagaccacacaggtgggaacaaggacagggggatttaagcagtcaaaaggaaaaacatgttaagaccctagacttgtatattgacacacttgtaccttgtaaggcagaggaatgtaattaaaaagcacttatttggctccttttgcatgtagtatgtgtacaggagtcagagagtagaatacaaagcaataggtaattggtctatgcttctaaagacaatttgggtaattgaagaaaatgggccatacacaggaagtgccatgacattttccttcatacccttcaaaaatttataacaggctgggtaaggtggctcacgactgtaatcccagcattttgggaggccgaggcgggcagatcacctgacgtcacaagtttaagaccaggctggccaacatggcaaaacctcatctctactaaaactttaaaaattggtcaggcgcagtggctcacgcctgtaatcccaacactttgagaggccaaggcaggcagatcacttgaggccaggaattcaagaccagcctggccaacatggtgaaaccccatctctataaaaatataaaaattagccaggtgtaatggtgcagtcctgtaatcccggctacttgggaggctgaggcatgagaatcacttgagcccgggaggtggagggtagaggctgcagtgggccgagatcgcgctgctgcactccagcctgggcaacagagcaagactgtctcaaaaaaaaaattaaccaggtgtggtggtgggcacctgtaatcccagctactcaggaggctgaggcaggagaatcgcttgaacccaggaggtggaggttgcagtgagccgagatcgcaccattgtattccagcccaggtgacagagcgagactcatctcaaaaagtatatatatttataaccggccgggtgtggtggctcctgcctataatcccaacactttggaaggccaaggcgggaggataactttaggtcaggatccagcctgggcaacagagtgagaccccatcacacacatgcaaaaaatttataacagttgaaattatttaagtatgatttacatggctctcagtaaacttactgatttcagtaatttgaaaatattttggctgggcgcagtggctcacgcctgtaatcccagcactttgggaggccaaggtgggcggatcacaaggtcaagagattgaaaccatcctggctaacacagtgaaacccgtctctactaaaaatacaaaaacttagctgggcgtggtggtgggcacctgtagtcccagctactcgggagactgaggcaggagaatggcgtgaacccgggaggcggagcttgcagtgagccgagatcgcaccactgcgctccagcctgggcaacagagtgagactctgtctcagaagaaaaaaagaaaatattttatctggaagttttatacaatttcaataatcatataatgtttttttcaccaagcttcatgttggtgttgcccctccttactccagtgtgctgtgcaaatttttatcatttctgcttgtgccacaatgctaagcactgctctctggcagagaatgggccagttcccagtgctggaaactaaactactctgacctgaatcatatcccccaactgtcctaaaccacaggccgaatccgggtgcatggtattggcgggggccacaagcaacgttatcgaatgattgactttctgcgtttccggcctgaggagaccaagtcaggaccctttgaggagaaggttatccaagtccgctatgatccctgtaggcaagtttgggatgtgggatgatgatggaatggtctgaataactccatagcttctcagaagatgtggggctgcctagacggtctgcttacctgtccctcaccctgattaggtcagcagacatagctctggttgctgggggcagccggaaacgctggatcatcgccacagaaaacatgcaggctggagatacaatcttgaactctaaccacataggccgaatggcaggtgagagatggctaccagatgtgtgggctggaggcagcaaaagttctagagctaatgaaatcctgtcttttagttgctgctcgggaaggggatgcgcatcctcttggggctctgcctgtggggaccctcatcaacaacgtggaaagtgagccaggccggggtgcccaatatatccgagctgcaggtatggggaaaggagttgcctgggtcctatagtttggaaaggcaaggagagtctgaacccatggttccacatctggtactggcagagaaaattaaggaaaaaacaaacatgaggatgaagatatgcatgtgtttttacctaaaacatagcatgcgtccttctttgtgtatctgctcctaaagagcaaagcaagggcagcatgtggggtatgtcccctgtgtaagtccctctgcacccccctgttttgtggagggtggcaaatcagcttctttccccagggacgtgtggtgtgctactgcggaaggtgaatggcacagccattatccagctgccctctaagaggcagatgcaggtgtgtatgggtatggatgggaggggtcagcaaaggaggaatttttggaatgtaactttcctgtctgggatagctcccaggtgttttatgatgcaaggaactgccttgagctgaggctgtccttttctgccacatgactcaggtgtgctttgtcggattggcaccataattaattttttttttttcgagacagagtcttgctctgtcgcccaggctggagtgcaatggcacgatctgggctcactgtgacctccacctcccaggttctagcaattctgcctcagcctcccgagtagctgggattgcaggcacgcaccaccacagccagctaatttttgtgttttagtagagatggggtttcaccatgttggccaggctggtctcaaactccttacctcataatccgcccaccttggcctcccaaagtgctgagattacaggagtgagccaccacacccggccctacttaattttttttgagacagggtttcactctattgcttgagtgcagtggcacaatcagctcactgcagcctcaaactcctgggttcaagcaattctgcctcagccccccaagtagctgggactacaggcgcacaccactccaccaggctaattttcgtattttttgtagagacagggtatcaccacgttggccaggctggtcttgaactcctgagctcaagcaatctgcctgcctaggctcccaaagtgctggaattacaggtgtcagccactgcacctgaccctggctaatgttttttatttttgtagagatgggatctcattatgttgcccaggctggtcttgaacttctgagctcaagtgatcctccagccttggcctcccaaagtgctgggattactggcgtgagctctttgttttcaactacttagttcctactgtaggaccttcacttagtgtcagccatcttatgcttttccttttccctcgcccttctctccttgagtctaagaagccccccaagggtgtgctctcaacattgtcaagctctttcccccccattgtacagaatctccatctgttttctctgtcaggtgctggaaacgtgcgtagcaacagtaggccgagtatccaacgttgatcataacaaacgggtcattggcaaggcaggtcgcaaccgctggctgggcaagaggcctaacagtgggcggtggcaccgcaaggggggctgggctggccgaaagattcggccactaccccccatgaagagttacgtgaagctgccttctgcttctgcccaaagctgatatccctgtactctaataaaatgccccccccccccgttttaatctgttactgtggttttgttttgggtgttttttgttttttttgttgttgttttttttttgcgggggaggggatggtacagactaaacgtggggaaaagaagtaaaaagtgtggaagagaaagtacaggacactgggtctgtccccaccccaattcccttacaagtaatggagccggggatggaaataaatgacgtccaaggtcttttccagttctgactttgggaaacggggagggcacttccgcaggagggaggactaaaggaagaggaaagggcggcgcaaagaaggaggtgctgcgtcgccaaggtggcatcctcggctccgccccggcgctctcccagggcccctagctttccgctgggtcgggcggaaatgagccgtggcttttggctggcggagccgctggcagggaccgggccccaccctgccccagtggctgccgactcacgcgggtgcagctctgttccgcggaggcacgccccctcccgtctctccgtctcgaccccctcgcggggcccaggtggggcccaagtcgccgccagcgtctgtgccgcgtcccttgctctgtgaaggacaggcctcgcgccaggaccccggtggacttctgaggtggccagagccccaccgcggccccttgcttctccttccctgcccactagcccatcgagcctcgcgctcacccaacctcggtccccatcctaccgtgcctcggggttctagcttatggggcctaatcccctctcccccaccttaccgcgcgcccctggcttctccagtctccaacctcggtccccaagcccctcgcctacctggtctgtgcaccctgccctgggtctcgcggcgccctcaccagccctcttgttccagttgctccagtcggaggcgcctccaacccaccagtgcctcctcctagtccatcgcgccttgccctcccactccaccaccagttctcaggtctcttaactctgcgatctcgggactcttaacttgggtctcgcactcccatgctccaatccttagagacagcaccccttttcacacacactcacgatctccctcccaaacatacccctctgggcttcacataccccataggttgctgcctgttccaaggccttgggattcacttgtaactccaaggctgccctgcccccactagtccgcccactgttccatatcaacccactccaggccacagggtcttggggaccttccttttagcccccaaattttgtgttctttcacaacaaacaccccagtgttctctgcttaggcctgcccccacccagcgtgcagcatgcaactcctgggcctggctttaccccaccccgcctgacagctgttgccatttgcttccccacctcctggatatctttgattttctgacctctccttcctctagcttgtctgttctcttttccttgtgtgctccaggtgccaggatggtgggagaactccgctacagggaattcagggtgcccct

SEQ ID NO: 2420 - DNA, 6000 bp, Homo sapiens
acagagtgagaccctatctcaaaaaaaaaaaaaaaaaaaaaagacccaactcaagtatcatctccaggaagccttcccctactcccagcaattaaatgctcctcagagaattcccatttttggtttactctttggtttacctccagacaggaagcccccactgacactgttgtagtcccagggtgcaacacaaagcagagatcacaagctgagtttaataattgcttgtggaatacatgtcccaagccacctcctgcaggaagcccttccagatgcccattctagccagtctggctctttgcttccataccttcacaacacttgtgcctcccccagggcctctttctcatcttgctttctggggcagctgtgtgcacatttgtctgtgtgcagcaactctctaaggcagggatttttactcctatttttgatgaggggagctgtggctcagagaggttgaataacctaaggccacacagtgagtggcagagccaggaatgtgacttgggtccatttgaatccaaagtccctgtactttccactgccctacctagatgtccctgtacctcctataaaatcagcatggagcctggtgcctggtagtccctacaaatattcacaaattggagcttagctcagctctcaggcaaggcccaggtcaaaagggcagatacagctttgggaccttagttgccaccacatgccataccttcttcccagcagaaggactccctccaagacagggtaggggtggaggatgtgaacaggggcagaaatgggcatgttttggggtcagacttggaggaatagcagagattggagtgtcagaaggtgagcatgcctgggggtgttggggagatgcaattcatcagggacagcttagtgtcaggggattagactggggcccatgaaggagaggcagaggctgatgggcctaggggtggtgtgggtaggtgagcttccccagacagtgactctgccctgccctctctccagctaggtcctcttccccattccttccccctttcctgactggatcctcttgggagagttaccctccttggcttcctctgctccaatctttttatcagttggccatcattacttatcattacctcaagtcaaacctccagatccacatggggctaggacattggcactggaccaaagaggccctttcctttgctttctctttgtctttttaatgctttgttgcaaagacctaggcggggagagagagagagagagagagacagagattgacccacagtcagggtcagggaattgaggggaaccaacccaattctctctccttcaattcaccaggtttgtatcctgcccttcctgcagatcagtgtcctgctagtcacctgggggtcaggggatggagtgaaggacaagacctccttccattgcagtgaagccacttggagaaatgtgtggaaaacagcaagacccagtgactctctcctcaccttctttccaatctcaggagagattttgtcccttcatccaccggcttctagattaaccacccacacccacacaggcgagagtttccctgaatattggaggtgacaggacatcaggacaaagtacaactattgtgccttggcccaatcactactttctttgtctggggccgccgctggctcctggctgcctttcgcacttttctccacccccacccctttctccccttccccctcacctggaacaccttccccttcctccttggctccttctgaactgccttcagagccacagactgtggggagtggccactgcgctcccaaggtgaggccctccaagcggggccgagtttgcccctcaactgggagccagcatgacctctgtgtgggctgctctctgcttcactgccccttcccccaatctgctaggtgaccctgggcccctttgtgccctctctgggccttcggaggattctttggggagacagtctgctctgacgccccttcccctgcagcaagcagcctggggagggaggtgaggataagtgaagtcaagttgttcagggggctaagcccatggaagggaagatgccacagagatacatgtggtcttgtgattgttgttttgtgctttttccccttttttgaaagctcaggtgactaggtgacttgagcttttaatttggtgacaatgtgggcactggctgagtccttaagagtacattgttgtaaatgccggtgacaacacactggggcatgggatccagagttaacccctccaggtcacagccaggttatatctccacaatgaaggggggaggtgggccatactttctcgccctaatgaaggtagctcaaaaacccctaggccaggttgtaatcctagccttatataaaaggaattctgtgccctcactcccctggatccctgggcaaagccccagagggaaacacaaacaggttgttgtaacacaccttgctgggtaccaccatggaggacagttggcttatgggggtggggggtgcctggggccacggagtgactggtgatggctatccctccttggaacccctccagcctcctcttagcttcagatttgtttatttgttttttactaagacctgctctttcaggtctgttggctcttttaggggctgaagaaggccgagttgagaagggatgcaagggagggggccagaatgagcccttagggctcagagcctccatcctgccccaagatgtctacagcttgtgctcctggggtgctagaggcgcacaaggaggaaagttagtggcttcccttccatatcccgttcatcagcctagagcatggagcccaggtgaggaggcctgcctgggagggggccctgagccaggaaataaacatttactaactgtacaaagaccttgtccctgctgctggggagcctgccaagtggtggagacaggactagtgcacgaatgatggaaagggagggttggggtgggtgggagccagcccttttcctcataagggccttaggacaccataccgatggaactgggggtactggggaggtaacctagcacctccaccaaaccacagcaacatgtgctgaggatggggctgactaggtaagctccctggagcgttttggttaaattgagggaaattgctgcattcccattctcagtccatgcctccacagaggctatgccagctgtaggccagaccctggcaagatctgggtggataatcagactgactggtcccactcttcccacaggcctcagagccccaactttgttccctggggcagcctggaaatagccaggtcagaaaccagctaggaatttttccaagctgcttcctatatgcaagaatgggatggggcctttgggagcacttagggaagatgtggagagttggaggaaaagggggcttggaggtaagggaggggactgggggaaggataggggagaagctgtgagcctggagaagtagccaagggatcctgagggaatgggggagctgagacgaaacccccatttctattcagaagatgagctatgagtctgggcttgggctgatagaagccttggcccctggcctggtgggagctctgggcagctggcctacagacgttccttagtgctggcgggtaggtttgaatcatcacgcaggccctggcctccacccgcccccaccagccccctggcctcagttccctggcaacatctggggttgggggggcagcaggaacaagggcctctgtctgcccagctgcctccccctttgggttttgccagactccacagtgcatacgtgggctccaacaggtcctcttccctcccagtcactgactaaccccggaaccacacagcttcccgttctcagctccacaaacttggtgccaaattcttctcccctgggaagcatccctggacacttcccaaaggaccccagtcactccagcctgttggctgccgctcactttgatgtctgcaggccagatgagggctccagatggcacattgtcagagggacacactgtggcccctgtgcccagccctgggctctctgtacatgaagcaactccagtcccaaatatgtagctgtttgggaggtcagaaatagggggtccaggagcaaactccccccaccccctttccaaagcccattccctctttagccagagccggggtgtgcagacggcagtcactagggggcgctcggccaccacagggaagctgggtgaatggagcgagcagcgtcttcgagagtgaggacgtgtgtgtctgtgtgggtgagtgagtgtgtgcgtgtggggttgagggcgttggagcggggagaaggccaggggtcactccaggattccaatagatctgtgtgtccctctccccacccgtccctgtccggctctccgccttcccctgcccccttcaatattcctagcaaagagggaacggctctcaggccctgtccgcacgtaacctcactttcctgctccctcctcgccaatgccccgcgggcgcgtgtctctggacagagtttccgggggcggatgggtaattttcaggctgtgaaccttggtgggggtcgagcttccccttcattgcggcgggctgcgggccaggcttcactgagcgtccgcagagcccgggcccgagccgcgtgtggaagggctgaggctcgcctgtccccgccccccggggcgggccgggggcggggtcccggcggggcggagccatgcgccccccccttttttttttaaaagtcggctggtagcggggaggatcgcggaggcttggggcagccgggtagctcggaggtcgtggcgctgggggctagcaccagcgctctgtcgggaggcgcagcggttaggtggaccggtcagcggactcaccggccagggcgctcggtgctggaatttgatattcattgatccgggttttatccctcttcttttttcttaaacatttttttttaaaactgtattgtttctcgttttaatttatttttgcttgccattccccacttgaatcgggccgacggcttggggagattgctctacttccccaaatcactgtggattttggaaaccagcagaaagaggaaagaggtagcaagagctccagagagaagtcgaggaagagagagacggggtcagagagagcgcgcgggcgtgcgagcagcgaaagcgacaggggcaaagtgagtgacctgcttttgggggtgaccgccggagcgcggcgtgagccctcccccttgggatcccgcagctgaccagtcgcgctgacggacagacagacagacaccgcccccagccccagctaccacctcctccccggccggcggcggacagtggacgcggcggcgagccgcgggcaggggccggagcccgcgcccggaggcggggtggagggggtcggggctcgcggcgtcgcactgaaacttttcgtccaacttctgggctgttctcgcttcggaggagccgtggtccgcgcgggggaagccgagccgagcggagccgcgagaagtgctagctcgggccgggaggagccgcagccggaggagggggaggaggaagaagagaaggaagaggagagggggccgcagtggcgactcggcgctcggaagccgggctcatggacgggtgaggcggcggtgtgcgcagacagtgctccagccgcgcgcgctccccaggccctggcccgggcctcgggccggggaggaagagtagctcgccgaggcgccgaggagagcgggccgccccacagcccgagccggagagggagcgcgagccgcgccggccccggtcgggcctccgaaaccatgaactttctgctgtcttgggtgcattggagccttgccttgctgctctacctccaccatgccaaggtaagcggtcgtgccctgctggcgccgcgggccgctgcgagcgcctctcccggctggggacgtgcgtgcgagcgcgcgcgtgggggctccgtgccccacgcgggtccatgggcaccaggcgtgcggcgtccccctctgtcgtctta

SEQ ID NO: 2421 - DNA, 6000 bp, Homo sapiens
caggcgagagtttccctgaatattggaggtgacaggacatcaggacaaagtacaactattgtgccttggcccaatcactactttctttgtctggggccgccgctggctcctggctgcctttcgcacttttctccacccccacccctttctccccttccccctcacctggaacaccttccccttcctccttggctccttctgaactgccttcagagccacagactgtggggagtggccactgcgctcccaaggtgaggccctccaagcggggccgagtttgcccctcaactgggagccagcatgacctctgtgtgggctgctctctgcttcactgccccttcccccaatctgctaggtgaccctgggcccctttgtgccctctctgggccttcggaggattctttggggagacagtctgctctgacgccccttcccctgcagcaagcagcctggggagggaggtgaggataagtgaagtcaagttgttcagggggctaagcccatggaagggaagatgccacagagatacatgtggtcttgtgattgttgttttgtgctttttccccttttttgaaagctcaggtgactaggtgacttgagcttttaatttggtgacaatgtgggcactggctgagtccttaagagtacattgttgtaaatgccggtgacaacacactggggcatgggatccagagttaacccctccaggtcacagccaggttatatctccacaatgaaggggggaggtgggccatactttctcgccctaatgaaggtagctcaaaaacccctaggccaggttgtaatcctagccttatataaaaggaattctgtgccctcactcccctggatccctgggcaaagccccagagggaaacacaaacaggttgttgtaacacaccttgctgggtaccaccatggaggacagttggcttatgggggtggggggtgcctggggccacggagtgactggtgatggctatccctccttggaacccctccagcctcctcttagcttcagatttgtttatttgttttttactaagacctgctctttcaggtctgttggctcttttaggggctgaagaaggccgagttgagaagggatgcaagggagggggccagaatgagcccttagggctcagagcctccatcctgccccaagatgtctacagcttgtgctcctggggtgctagaggcgcacaaggaggaaagttagtggcttcccttccatatcccgttcatcagcctagagcatggagcccaggtgaggaggcctgcctgggagggggccctgagccaggaaataaacatttactaactgtacaaagaccttgtccctgctgctggggagcctgccaagtggtggagacaggactagtgcacgaatgatggaaagggagggttggggtgggtgggagccagcccttttcctcataagggccttaggacaccataccgatggaactgggggtactggggaggtaacctagcacctccaccaaaccacagcaacatgtgctgaggatggggctgactaggtaagctccctggagcgttttggttaaattgagggaaattgctgcattcccattctcagtccatgcctccacagaggctatgccagctgtaggccagaccctggcaagatctgggtggataatcagactgactggtcccactcttcccacaggcctcagagccccaactttgttccctggggcagcctggaaatagccaggtcagaaaccagctaggaatttttccaagctgcttcctatatgcaagaatgggatggggcctttgggagcacttagggaagatgtggagagttggaggaaaagggggcttggaggtaagggaggggactgggggaaggataggggagaagctgtgagcctggagaagtagccaagggatcctgagggaatgggggagctgagacgaaacccccatttctattcagaagatgagctatgagtctgggcttgggctgatagaagccttggcccctggcctggtgggagctctgggcagctggcctacagacgttccttagtgctggcgggtaggtttgaatcatcacgcaggccctggcctccacccgcccccaccagccccctggcctcagttccctggcaacatctggggttgggggggcagcaggaacaagggcctctgtctgcccagctgcctccccctttgggttttgccagactccacagtgcatacgtgggctccaacaggtcctcttccctcccagtcactgactaaccccggaaccacacagcttcccgttctcagctccacaaacttggtgccaaattcttctcccctgggaagcatccctggacacttcccaaaggaccccagtcactccagcctgttggctgccgctcactttgatgtctgcaggccagatgagggctccagatggcacattgtcagagggacacactgtggcccctgtgcccagccctgggctctctgtacatgaagcaactccagtcccaaatatgtagctgtttgggaggtcagaaatagggggtccaggagcaaactccccccaccccctttccaaagcccattccctctttagccagagccggggtgtgcagacggcagtcactagggggcgctcggccaccacagggaagctgggtgaatggagcgagcagcgtcttcgagagtgaggacgtgtgtgtctgtgtgggtgagtgagtgtgtgcgtgtggggttgagggcgttggagcggggagaaggccaggggtcactccaggattccaatagatctgtgtgtccctctccccacccgtccctgtccggctctccgccttcccctgcccccttcaatattcctagcaaagagggaacggctctcaggccctgtccgcacgtaacctcactttcctgctccctcctcgccaatgccccgcgggcgcgtgtctctggacagagtttccgggggcggatgggtaattttcaggctgtgaaccttggtgggggtcgagcttccccttcattgcggcgggctgcgggccaggcttcactgagcgtccgcagagcccgggcccgagccgcgtgtggaagggctgaggctcgcctgtccccgccccccggggcgggccgggggcggggtcccggcggggcggagccatgcgccccccccttttttttttaaaagtcggctggtagcggggaggatcgcggaggcttggggcagccgggtagctcggaggtcgtggcgctgggggctagcaccagcgctctgtcgggaggcgcagcggttaggtggaccggtcagcggactcaccggccagggcgctcggtgctggaatttgatattcattgatccgggttttatccctcttcttttttcttaaacatttttttttaaaactgtattgtttctcgttttaatttatttttgcttgccattccccacttgaatcgggccgacggcttggggagattgctctacttccccaaatcactgtggattttggaaaccagcagaaagaggaaagaggtagcaagagctccagagagaagtcgaggaagagagagacggggtcagagagagcgcgcgggcgtgcgagcagcgaaagcgacaggggcaaagtgagtgacctgcttttgggggtgaccgccggagcgcggcgtgagccctcccccttgggatcccgcagctgaccagtcgcgctgacggacagacagacagacaccgcccccagccccagctaccacctcctccccggccggcggcggacagtggacgcggcggcgagccgcgggcaggggccggagcccgcgcccggaggcggggtggagggggtcggggctcgcggcgtcgcactgaaacttttcgtccaacttctgggctgttctcgcttcggaggagccgtggtccgcgcgggggaagccgagccgagcggagccgcgagaagtgctagctcgggccgggaggagccgcagccggaggagggggaggaggaagaagagaaggaagaggagagggggccgcagtggcgactcggcgctcggaagccgggctcatggacgggtgaggcggcggtgtgcgcagacagtgctccagccgcgcgcgctccccaggccctggcccgggcctcgggccggggaggaagagtagctcgccgaggcgccgaggagagcgggccgccccacagcccgagccggagagggagcgcgagccgcgccggccccggtcgggcctccgaaaccatgaactttctgctgtcttgggtgcattggagccttgccttgctgctctacctccaccatgccaaggtaagcggtcgtgccctgctggcgccgcgggccgctgcgagcgcctctcccggctggggacgtgcgtgcgagcgcgcgcgtgggggctccgtgccccacgcgggtccatgggcaccaggcgtgcggcgtccccctctgtcgtcttaggtgcagggggagggggcgcgcgcgctaggtgggagggtacccggagagaggctcaccgcccacgcgggccctgcccacccaccggagtcaccgcacgtacgatctgggccgaccagccgagggcgggagccggaggaggaggccgagggggctgggcttgcgttgccgctgccggctgaagtttgctcccggccgctggtcccggacgaactggaagtctgagcagcgggggcgggagccagagaccagtgggcagggggtgctcggaccttggaccgcgggagggcagagagcgtggagggggcagggcgcaggagggagagggggcttgctgtcactgccactcggtctcttcagccctcgccgcgagtttgggaaaagttttggggtggattgctgcggggaccccccctccctgctgggccacctgcgccgcgccaaccccgcccgtccccgctcgcgtcccgctcggtgcccgccctcccccgcccggccgggtgcgcgcggcgcggagccgattacatcagcccgggcctggccggccgcgtgttcccggagcctcggctgcccgaatggggagcccagagtggcgagcggcacccctccccccgccagccctccgcgggaaggtgacctctcgaggtagccccagcccggggatccagagaaccatccctaccccttcctactgtctccagaccctacctctgcccagtgctaggaggaatttcctgacgccccttctcttcacccatttcctttttagcctggagagaagcccctgtcaccccgcttattttcatttctctctgcggagaagatccatctaacccctttctggccccagagtccagggaaaggatgatcactgtcagaagtcgtggcgcgggagcccactgggcgctttgtcacattccaccgaaagtcccgacttggtgacagtgtgcttcccttccctcgccaacagttccgagtgagctgtgctttagctctcgtgggggtgggtcaagggaggatttgaagagtcattgccccactttacccttttggagaaatggcttgaaatttgctgtgacacgggcagcatgggaatagtccttcctgaaccctggaaaggagctcctgccagccttgcacacactttgtcctggtgaaaggcagccctggagcaggtgtttttttggaactccaaacctgcccacccaacttgcttctgaaagggactctaaagggtccctttccgctcctctctgacgccttccctcagccagaattcccttggagaggaggcaagaggaaagccatggacaggggtcgctgctaacaccgcaagttcctcagaccctggcacaaaggccttggctacaggcctccaagtagggaggagggggaggagtggctgcctggccacagtgtgaccttcagaggcccccagagaaggacacctggcccctgcctgcctagaaccgcccctcctgtgctccctggccttggaaggggtatgaaatttccgtcccctttcctccttggggcccaggaggagtg

SEQ ID NO: 2422 - DNA, 6000 bp, Homo sapiens
gtacagtaacatgctgtacaggtttgtagcctaggagcaaagggttatatataccatatggcctaggtgtgtaatagactactgcatctagatttggtgtgagtacattttgtgatgttctcacaacagtgaaatcacctaacgatgcgtttctcagaatgtatccctgtcattgacacatgactgcatttgcaaagcaggacagtatttttatttaaattattatgcatgtttatttggggagatgatgaagattgtgagagtcattaatcctgcctctaaactatgccttgctgttgccataggcttttgcccctaattttagccctttcctgcatagtttcttggtggtgaaaaaactggatgaaagggaaactagaattttgattactttctctgctaagtaaatgtcaatccattcagaaccagctacccagagaggggtgaggggtagggaaatggggacaatgcaacctaaaaatcctcctgctaacatctctggttcccctttgtaagttggatggacttctaacctctttttcctgagccagagtttcccaaattgtgtttcctgagtgtcaatggatatataacacaaaaggtttttagggtcaaattagtttggaaatgctatatagtaagtcctcatttttatcattgttaggtttttggaaactgcaactttaagcaaaaggatgtatcatgtaatcaattttaccataggctaattgatataaacaagagttaagtttctatggcatatttctggtcacaaaacatcaacgaacttctaaacaaagaccaaaacacttctaatattaaacattgaaataagtgtaagctatgcatacatttaagaaagattaggctgggcacggtggctcatacctgtaatttcagcaccttgggaggtcaaggggggcagatcacttgagctcaggagtttgagaccagcctgggcaacatggtgaaaccccatttctacaaaaaaatacaaaacttagccaggcatgggggtgcacgcctgtagtcccagctactcgggaggctgaagttggaagattgcttgagccagtggggtgggggtcaaggctgcagtgacccgagactgtggcactgcactccagcctgcacagagtgagactctgtctcaaagaaaagaaaagaaaagaaagattaataaaaacaagaaatgtactcccgcttattccagttcagggttacaggtggccggagcctatcctggcacaaggcaggaatcagttctggacagcacacaggacaccatcccattgcagggcacactcacacaccctgacactcactcagactgcaggcttgcaaatgaacctcacctgcacagctttgggatgtgggaggaaaccagggtatctggaagaaacccacacagacagtggccctggcctcaagcggatttttttttttttttgagatgaggtctcgcccagggtggagtgcagtggtgtgatcatggctcactgcagcctcgaccacccaggctcaagtgatcctcccatctcagcctcatgggtagctgggatcacaggtgtgcaccaccatgcccagctaatttttaatatttttgtagggatggggtctcactatgttgctcaggctggtctcaaactcctgggctcaagcaatcctcctgccttggcctccccgagtgttggaattacgggcatgagccaccatgcctggactcatcaatgttatcatgaaacgatcttgcacaaaatgatgttattcaaggatctgctgtattaacaaaggagtgtattagcttcctagggctgccacaagaaagcacaataaactaagtggcttaaaacaagagaaatgtattctcttacagttctggaggctgggagtccaaaatcaaagtgtcagcagggctggctccttcttggggctcagagggagaatgtgttccatgccttctcctggcttctggtggctgccagaatccttggcattccttggcttggagctgcatcactccaatctctgcctctttcttcccatgatattccccctgtgtgtctgtatcttttttcttctccacttataaggacactactcattggatttagggacaacctactccagtatgatctcattttaacttgattacatctgcaaagactctatttccaaataaggtcacatttacaggtagcaggggttaggacttgaacatatctatttggggggaatacaattcaactctcaacagggagaaacagattttttcatctgacagcttcttacaggctttaatttcagtgactctgcaagaggggaggacataaaaaccatgtttttttttattttttgtttttttttaaatggagtattttatgtaactggtgttctaaggaacatgtttggggaaaaatgccttgggtgagtgagactatttagcagtggccactcactttaccaaagattcacagtgactgaccatatagtctggttgcctaacgatagatgcttcttatggctgtccctcaagagattgttggcagtccctgtggcctctttgtaagggttcccatacctggctggtgaggctgcagtagtatggtgggggaggctggccaagcaggccatcctggagaacagtgtgtttgtgttctgatgtttgtggctacagtgctctggtttcagacatcctggaacttccatgatgttgcatttttctgaattctgaaagggaatatacaatctgcatgttcaaaggtgaaatgagggacagttgacagggctgttttacctggatgagtaagttgtacaatgcatgtctctaggggtggaattcacatagtggagatggtagatccaattttcttgtaatagagtgccctgttctcagaacaccagtattttgtgacaattttccagcatgtggcataaagtgtcttgaggaaggggcacctttttctagttctcacaaaagtaacatatggtaaagaggtggccctgagtgggagggagaagccttcatcaactcttggaatgtgagatctgaaaggcctctgacagagtattggtccatctctggaattgttaggactcttccttacaaataatagaaacccaattccaagtggctaacacaaataggaaactaataatcagaatgcaaggacaggaatgcagctgggactcaggaacatgctggatccaggtactctgacatggtcaggacttacatctctctctttacctgcttttttcccttagtccaaaacatggtggtagacaactcctgggtgtcacgtgttggatgttcagcagtcagtagagactgacctcctctatgctccagtgttaaaatctcgaagacctagtatttgatagcacaacagggtgactatagtaaaaaataatttaattgtacatttaaattaactaaaagattataattggattgtttgtaaaacaaaagataaacacttgagatgatggataccccatttaccctgatgtgattattatgtgttgtatgccagtatcaaaatatctcatgtaccccataaatatgtgtgtactatgtacccacaaaaattaaatataacaaattaaaaaaaaaccgccccattacaggagaggtccaaatgaaaacattttgtttgagtttaactggccacaggtccaatggtttcttatacaccacacagtgggtaaacagctcaagggcgggctgcccgccagcataaacctttgagtggcaaacactaccagggtggccatggaaaatgccctcttgctgaccataattgcacagaatgtgtgtaaataaaagctaaaaggaaaaagaaaattctgtagctcttccagaagaggcaaacggagaaatgaagaaatataaagagataggcactatataaatactaagtactataaatagggcatttcccaacccactaaatattttgatattttccagggatggagccagagatgttctggaaggatgaaggagactgcatgagtaattggggtggggtagcagagagtttgccaatccctacctcactgggttttagttatgtttcagttaatctgcctcctcatttacgaggcgggtattgttagctccacttttcagatgaggatactgagattcagtaaggttattacccaaacttatgagaaagccaagatttcacaatatttcaacccaactcgactttgtctaataccagtgcgtaccaatggcattattaatccagactgggcgatgaattaaaaactctgacgtgacgtttctgcaggtttctggaagaagcctggatcacctggggacggggtgaagttggcgttgccctccttgcagtaatagctgctattgttttgcagcagttattatggatcagatactgtgctgggtctatgatctcatttagcccttacgacaatcctgtgaggttggcattactatgatctctattttacaggttaggaaactgagccttaaataaactactggattttcctgagtattctgtgaataaattcctattactgaaatacttgaaagggctagattaataaattaacaaagccttcttcggagcaactgtgctgaaattccgtacgcgtgacgttcccaccctctgccactcggtgacgtcacgatcaatcccaccactaagttcccagccaagcgctaccgccgctatctcgcgagagccgtagtttcttccattctgttttggacatgcgcggggcgtaaggcgctttggccagagtggtttgatggttttgtgttagtcttcctgcagctgagcttccacaagacactttttccctttcagccacccaatatctcgcgagacttgctattctgcgccccctcccaccttgcgcttgcgcagatcttcaaagcagaaggtcgcgcttggaggaagtggcggctttgagtccggtggcccaatcgctgttactacttctctgaagctcctctcggctgcttgccgagacaccctgccgccaagatgcctcgaattatgatcaaggggggcgtatggaggaataccgaggtaagtctccttttcccgccgtccgctgcccgccgctccctctagcagcttgtgcgcacgcgcgcggaggtcgggggggcgacgaggagaccctgtggggtctgcgtggagggcagcccgggggctgacccttggggccctttccgtgtgtctggccccgtgttgtgcgagcgccagtaggacagggaccgtgatgtcaccacctggctactcggctccaagctcacttgttaggccctgagtgaacatttgttgacttgaatacgccccctcccaccccgcccccccgccccccccggccccgggaagaactcagagttccaactcagccagagttggtcccccggggcaccatccactcttagtccaggcaccacgactctgtctcatactcagaaataaagaagttgccgtggccacaactttgtgtctccattgacttccttgcagaggggaagcagtttgagtgccaggttcagagagcccgtttatgcccgcatctctctggttatctgttatcagggcataacctgtctgccatctcgacagatcccaaggtctgtctctttctgtcactgcctttgcctagatagaagccagaaaggaaaaactggcctaggatagtctctgtttccagaaacgtagtggatagtgccattggtgagccaaagggcagtagagtgggagtgaaatagaaattagattttagtgcgttttgtgttcagagtgtaccgaatttatcagtttctggagcacatcatgtcttttcatgctctgtgtctttttttcgttacattttatggcttctttttttttttttttttacatcttttgccttcctagcgcttgacatctttctgatcatccttcaaacctagttcggaaacacttcttggaatctctgtaagaattaattgcacccccgatattc

SEQ ID NO: 2423 - DNA, 6000 bp, Homo sapiens
ttaatccagtctatcattgttggacatttgggttggttccaaatctatgctattgtgaataatgccgcaataaacatatgtgtgcatgtgtctttatagcagcatgatttatagtcctttgggtatatacccagtaatgggatggctgggtcaaatggtattcctagttctagatccctgaggaatcgccacactgacttccacaatggttgaactagtttacagtcccaccaacagtgtaaaagtgttcctatttctccacatcctctccagcacgtgttgtttcctgactttttaatgattgccattctaactggtgtgagatggtatctcattgtggttttgatttgcatttctctgatggccagcgatggtgagcattttttcatgtgtttcttggctgcataaatgtcttcttttgagaagtgtctgttcatatccttcacccactttttgatggggttgttttttttcttgtaaatttgtttgagttcattgtagattctggatattagccctttgtcagatgagtaggttgtgaaaattttctcccattttgtaggttgcctgttcactctgatggtagtttcttttgctgtgcagaagctctttagtttaattagatcccatttgtcaattttggctttggttgccattgcttttggtgttttagacatgaagtccttgcccatgcctatgtcctgaatggtattgcctaggttttcttccagggtttttatggttttaggtctaacatttaagtctttaatccatcttgaattaatttttgtataaggtgtaaggaagggatccagtttcagctttctacatatggctagccaattttcccagcaccgtttattaaatagggaatcctttccccattgcttgtttttctcaggtttgtcaaagatcagatagttgtagatatgcggtgttatttctgagggctctgttctgttccattgatctatatctctgttttggtaccagtaccatgctgttttggttactgtagccttgtagtatagtttgaagtcaggtagcgtgatgcctccagctttgttcttttggcttaggattgacttggcgatgtgggctcttttttggttccatatgaactttaaagtagttttttccaattctgtgaagagagtcattggtagcttgatggggatggcattgaatctataaattaccttgggcagtatggccattttcacgatattgattcttcctacccatgagcatggaatgttcttccatttgtttgtatcctcttttatttccttgagcagtggtttgtagttctccttgaagaggtccttcacatcccttgtaagttggattcctaggtattttattctctttgaagcaattgcgaatgggagttcactcatgatttggctctctgtttgtctgttattggtgtataagaatgcttgtgatttttgtacattaattttgtatcctgagactttgctgaagttgcttatcagcttaaggagattctgggctgagacagtggggttttctagatatacaatcatgtcatctgcaaacagggacaatttgacttcctcttttcctaattgaataccctttatttcctcctgcctaattgccctggacagaacttccatcactatgttgaataggagtggtgagagagggcatccctgtcttgtgccagttttcaaagggaatgcttccagtttttgcccattcagaatgatattggctgtgggtttgtcatagatagctcttactattttgaaatacgtccctaatttattgagagtttttagcatgaagcgttgttgaattttgtcaaaggccttttctgcatctattgagataatcatgtggtttttgtctttggttccgttgatatgctggattacatttattgatttgcgtatattgaaccagccttgcatcccagggatgaagcccacttgatcatggtggataagttttttgatgtgctgctggatttggtttgccagtattttattgaggatttttgcatcaatggtcatcaaggatattggtctaaaattctcctatttggttgtgtctctgcccggctttggtatcaggatgatgctggcctcataaaatgagttagggaggattccctctttttctattgattggaatagtttcagaaggaatggtaccagttcctccttgtacctctgatagaattcggctgtgaatccatctggtcctggactctttttggttggtaagctattgattattacacaatttcagctcctgttattggtctgttcagagattcaacttcttcctggtttagtcttgggagagtgtacgtgtcgaggaatttatccatttcttctagattttctagtttatttgcgtagaggtgtttgtagtattctctgatggtagtttgtatttctgtgggatcggtggtgatatcccctttatcattttttattgcgtctatttgattcttctctcttttaattgtgatgttagggtgtcaattttggatctttcctgctttctcttgtgggcatttagtgctataaatttccctctacacactgctttgaatgtgtcccagagattctggtatgttgtgtctttgttctcgttggtttcaaagagcatctttatttctgccttcatttcgttatgtacccagtagtcattcaggagcaggttgttcagtttccatgtacttgagcgcttttgagtgagattcttaatcctgagttctagtttgattgcactgtggtctgagagacagtttgttataatttctgttcttttacatttgctgaggagagctttacttccaactatgtggtcaattttggaacaggtgtggtgtggtgctgaaaaaaatgtatattctgttgatttggggtggagagttctgtagatgtctattaggtccgcttggtgcagagctgagttcaattcctgggtatccttgttgactgtctgtctcgttgatctgtctaatgttgacagtggggtgttaaagtctcccattattaatgtgtgggagtctaagtctctttgtaggtcactcaggagttgctttaggaatctgggtggtcctgtattggatgcatatatatttaggatagttagctcttcttgttgaattgatccctttaccattatgtaatggccttgtctcttttgatctttgttggtttaaagtctgttttatcagagactaggattgcaacccctgcctttttttgttttccatttgcttggtagatcttcctctatccttttatttgagcctatgtgtgtctctgcacatgagatgggtttcctaaatacagcacactgatgggtcttgactctttatccaatttgccagtctgtgtcttctaattggagcatttaatccatttaaatttaaagttaatattgttatgtgtgaatttgatcctgtcattatgatgttagctggttattttgctcgttagttgatgcagtttcttcctagtccccatggtctttacattttggcatgattttgcagcagctggtaccggttgttcctttccatgtttagcgcttccttcaggagctcttttagggcaggcctggtggtgacaaaatctctcagcatttgcttgtctgtaaaggattttatttctccttcacttatgaagcttactttggctggatatgaaattctgggttgaaaattcttttctttaagaatgttgaatattggcccccactctcttctggcttgtagagtttctgctgagagatcagctgttagtctgatgggcttccctttgaggctaacccgacctttctctgtggctgcccttaacattttttccttcatttcaactttggtgaatctgacaattatgtgtcttggagttgctcttctcgaggagtatctttgtggtgttctgtgtatttcctgaatctgaatgttggcctgccttgctagattggggaagttctcctggataatatcctgcagagtgttttccaacttggttccattctccccgtcactttcaagtacaccaatcagacgtagatttggtcttttcacatagtcccatatttcttggaggctttactcgtttctttttattcttttttctctaaacttcccttctcacttcatttcattcatttcatcttccatcactgataccctttcttccagttgatcgcattggctcctgaggcttctgcattcttcacgaagttcttgagccttggttttcagctccatcagctcctttaagcacttctctgtattggttattctagttatacattcttctaaatttttttcaaagttttcaacttctttgcctttggtttgaatgtccgcccgtagctcagagtaatttgatcgtctgaagccttcttctctcagctagtcaaagtcattctccgtccagctttgttccgttgctggtgaggaactgcgttcctttggaggaggagaggcactctgttttttagagtttccagtttttctgctctgttttttccccatctttgtggttttatgtacttttggtctttgatgatgctgatgtacagatgggtttttggtgtggatgtcccttctgtttgttagttttccttctaacagacaggacgctcagctgcaggtctgttggagtacctggccttgtgtcagtctgcccctgctgggggtgcctcctagttaggctgctcgggggtcaggggtcagggacccacttgaggaggcagtctgcctgttctcagatctccagctgggtgctgggagaaccactgctctcttcaaagctgtcagacagggacatttaagtctgcagaggttactgctgtctttttgtttgtctgtgccctgcccccagaggtggagcctacagaggcaggcaggtctccttgagctgtggtgggctccacccagttcgagcttcctggctgctttgtttacctaagcaagcctgggcaatggcaggcgcccctcccccagcctcgctgccgccttgcagtttgatctcagactgctgtgctagcaatcagggagactccgtgggcgtaggaccctccgagccaggtgtgagatataatctcatggttcgccgctttttaagccggtctgaaaagcgcaatattcgggtgggagtgacccgattttccaggtgcgtccgtcacccctttctttgactcggaaagggaagttcttgacccctcgcgcttcccaggtgaggcaatgcctcgccctgcttcggctcgcgcacggtgcgcgcacccactgacctgcgcccactgtctggcactccctagtgagatgaacccagtacctcagatggaaatgcagaaatcacccgtcttctgcgtcgctcacgctgggagctgtagaccagagctgttcctattcggccatcttggctcctccccccaagatatagttttaaataccaatcatggaccaaggtgagcaatcagattgagtcattgcttgggagatacaaaataaattcagttatattggagatatctgctaggaagaaattcccttcaccttcttcccaaagattctaaagtaattcaaaggaaatcagccagtctagcaataaccttgatgtcacatgagaataactggtatctataatgagaagctttgaatcatggagttatctgtttctcagtataagcttatttttagtataatttatccaaattctaaataggatttcataaaactttgggttccataatacgtagcctaaaaattaccatttttttttaatatcacttgagtctgcctcagggcctagcaccatggtatcgtattcatgtaggatgccttcaaaatctgttagtttatttaataaactcatgagtactgctgctagagataagaagatcggtgaaagacccaaacctcttccatttaggagctgatatggctaggctttgtgtccacacccatgtctcatcttgaattgtaatcctcataatccc

SEQ ID NO: 2424 - DNA, 6000 bp, Homo sapiens
tgtcaatcttctgccaatagcctctcagtgtcaggcacacaaggcctttcaccatctggcctagtgcttctctgacctcatatcacatgattttctttctgggttactcttctttagctacagtggcctcctggcagttgcttcaacttaccagacctgtccccaccctacggtttgcacaagttgttctcatagtctggaatgctctttcttcagatatgtgcaggtatctccttcactttcaagtcattcttcaaatactactttctcagtgaggcctgcttcaactgcccaatttaaaaatgacatcttccccatttctcctgtgcttggtctccttccacatcccttcctgtataaacttttttgataacactcatgaccttctaacatactatataatttaggtatttattttaggcatttatttttattgtctaacttctgcatgtgagtttgatgatggcatatgtttttgtctgttttgttcactgctctatctgcagcttcgagaatagtgtcaggtacatggtaggcctacaacaatccgttgaaatgtagaagttgtttgattccagtacaagagttttacatattggattccatgggaacgggaacaactaagttttcatgtgcctgaagagctcaaaggctctttgaaactctggtattccatggttcccttaccattctgactctcaaaaacataatcattttttcagcagccaagcactacttttaaaagacactggactgtgaaatctacaatgataggtccctaagaggatgatcatgattacaattctacaagctacctggtactgtaaaattttttaacatttcttttctaatcattgtactgcttttccttatgaatgcaattggaaggtaggggaagccaatttgattacaccttaataattttgtggcaccccaaccccctgcagtgcatcagcatatttgatacatcttttcacgctggtttttcttttgaaatgtgtaacatcaggcagggcatggcagctcactcctgtaatcccagcactttgggaggctgaggcaggaggatctcttaagcctaggagtttgagaccagcctgggcaacctagggagatccccatctatacacaaaatttaaaaattagctgagtgtagtggcacatgcctgtagtcccagctactgaggaggctgaggtggaaggattgcttgagcccagaaggttgatgctacagtaagctatgactgcatgacttcactccagcctgggcaacagagagggaaaccctgtctcaaaagaaaaaaaaaagaaaagccctgaatacttttgtaatttttgtagcacaaatgctgaaattattctgcacaactttagtatccatcctttggctattcccattttgaaggaacatagaattttagggctgtaaggttttagttcatttggttctatcatctcattccacagatacaaaaactggggtgcaatgatgttaagtgacttgctcaggtactaccgggctgagtaatctttttggtcagaacaacttgctctaaacataaaacaagatacttttgagaatgcaattggaaaacagttctcaacgtcagaaaacaaatatagcaacaattgcaatatacggttctaaacaatatgcaatctacccagtttatttccatggtgacaacttaagcattaaaaatagaaggcaaatatagcaaaggatgaaataattgataaatagaaaataaaaagtccccacaaacatcctagcaagtaagagttatgaatctcaaacaacaaagaatttccaagtcacctgaactgtcactgtagcatccacatgagaagaaaccacttctggccgggtgcggtggctgacacctgtaatcccagcactttgggaggccgaggcaggcagatcacaaggtcaggagtttgagaccagcctgaccaacatggtgaaaccccgtctctattaaaaatacaaaaattacccgggcgtggtggcacacgcctgtaatcccagctactcaggaggctgaggcagaagaatcgcttgaattggggaagaggaagttgcagtgagccgagatcgggccactgcactccagcctgggtgacagagcgagactctgtctcaaaaaataataataaaaagaaaccacttccatggaatcagagagatggttccatattagccatgacttctgctgctcttttgagaatgtgggcttactacctaatcattttaagatgcccatgggcacttttacttagatacatgcactttctctttgcactagtgagtctacgtgaatattacatgccagaggaacgttaaagtctacgctaacaatgcttcatttttctttaacaattttgtccaggtcatggagacatttttgtggagtgataaattaacttggtctcctgatgtgttttccccacatgccttggaaaatcacttgtttttctgagaggtggtagtcatcaaagccttaacttcagcaacagcttcgctgttttagctttgttataattaagataccctagtaccattgatagtttaggatatttgatatgaatgtaatgcaaaaatatttttggccctttgtatatagcaatggtctcaaactatgagcaaaattatggctaaatcagattttcaaaaatggattttaagaaattccaggaggtaggaacctggttaactcatgtgactttaaaaatcagatctctgccaacagcccaattcagtttcctaagaataaatttttaaacttcctgtatcaatgccttaactcagtttcccttctccatgtgtcactctcattaacttttgttgtgcgtgatttttttttttctttttttgacggagtctagttctgttgccaggctggagagcagcggcgtgatctcggctccctgcaacctccgcctcccaggttcaagcgattctcctgcctcagcctcccgagtagctgggactacaggcacgtgccaccacgcccggatacttttttgtatttttagtagagacggggtttcatcatgttggccaggatggtttcgatctcctgaccttgtgatctgcccgtctcggcctcccaaagtgctgggattacaggcgtgagccaccgcgcctggcctgtgtgtgattttatgcaggctggacaccagtatcctagaataagatgatctggattctatcctgataaactggatcaaacaggtactcatctgatgcaggtgaaactccagtgcaggaacttctatgataacattaactgaacataattttaattgaaatgatctacttttatgtttctttagatgtgaacattaatttttctcttaatcttctgttaactaatttcttggtaatgtactcaaaagagctttcaaccagtcttcccatgtaagaagttatcaccatactcactctgttactttcccttatactgcacactttgctcagcaatgaattgatccctgatttacacatcaagctgagctctcacatcctaaatatatctattcttttggaattttaggtatttggcaaatattgaagcgttggggagattaaagagaatcaaacacaacactagcagactcaactacaatccacagaggaaataaccaaataagttgctattttaaacaatttaagcaaatagaaggaagggatttcagaactcacagtatctataggcaagaaaataactgaagcagtgatgcttaaaaagacttggtgagggttaatacttgaatccctataaaatacagtattttatagtatttgacaacacaggtgtgaaggtgagcatggataaccagttttcttctctaagcaggcaataagaatgttaaatataaataagacttcatataatataaagagtgaaagactgaaagcattgtcttacgactactgtattatttaaagaactacatctatatcaattaaatgtggcaggacagaatgtacagtacaatactgggggtgcaagattttaaaatgaggaacaggccaaaatctaaacacagaatcgtccaaaaaaaaaaaaaagccttcaagtagaaaaagttttcaataacaaaacatggtagttaaacgcctgcgtctagtaacatgagttggggaaaaaacattaatagcagattaatgaaacagattctgtgcgaggtcagggtagggagtgatggcgcgcggaagcggcgtaagagctggtttcgccgtcccagaaagggttccacatccacacgcctgtactgcggccctgcggggagcgttcagacccctccgtttcccttcaccattgtaaacgcgcaatcccattaagatcccgttcactccaattcctggaaagaagcttagaacggtgaatctcttcctcggagttgaaaatcaacttccagtgccggtcacccaatccttcaaaaatcctagccctctcgggcccaattcctaaagaattcaagcctgcaccctgtacaccctgaccgatctcagctcgtccccactccgctcccagcgtccccagctctaaacgccgccgcgtggctcagcgctgcccaagccgggccctgaaggccgcgcacaacgccccgcccccggcgagcgtggcggaagtagctcgctcgggctgggagagcgcgcgccacctggccaagcgcgcatgcgcccgcactgccagtgcggggggcgtccgtatcgcttactcctcagtctccgcaacccccgccccaccgagagtcgggctcacgccatcttgtaccccccccatcgccccgtcacacagccgagtcaccttttccctttctacactccacactctcagtcccccaccccgcccctttccaagcgtgtcccgggccgcagcagcagaaaccgcaccatctccacccccacattctcctcgcgggaagcgcagcagtgcctccaagggttcttaaagcagaggttgtagggcttgcggggggcggtgcggggattcgggcgggggagacgtcagagagccgggagggacgcagagcggagatcccagcgtcgctgggcccccgcgccggccacgccctggccccggctcgagggcggctgcctgggtcttcgtggtctacgccggagtgttgaagggagggcggctgtgggaggcgctggccgggcgcagcgccctggttccgctgccgagcgtggagttgcctctcgactcctcccttttggcgggtgggcgtggggtgaggggggctgggctgtgctgagaagcggggtgcgcgggtcgtctaggtagtgtgggggctgccggaggaatcattaaagagggaaattgttgctttatggcacggcgagagaagagttaggtagttagtgggagtgtagcatccagaaagaggaaaagatccgctgtgttctctgtggggtgagctcacgtctgtgacccctggggaaattatttagcttgtctttgccttgttttggtctgtaaaatggcgatcttatagcctatttcagaattgtgaggattatatgagaaaatacacgttaaacgcttagaacagcgccaggtgctgctcagtacatattagctctgcttttgctctccacgttttaggagttcagaatgactgtgaccttattttctcagagaatcaggacacttggtctcacacgtgagagtgaagttatgaagacagtgatatgtaatatttgacactcagacgatcctggacgtagtattactgtacacgtggataaattagcatttctccaagaggctaatagaaatgttaagttatttcggtagaaagaaatgtgtgtgtatatatatgtatatacatatgtgtgtatataagtatatgtatgtgtatatatgtatgtatgtatttggaaggagaggacctggggtcttagtatatgtgaagggcagactctggaagaggaattaaattcgccctgcaaagatttacttgaaggacaaaacttggggaatttct

SEQ ID NO: 2425 - DNA, 6000 bp, Homo sapiens
acaaaaaattgaattagccgggcatggtggcacatgcctgtggtcccagctacttgggagcctgaggcattgcttgagcctgggatgttgaggctgcagtgagctgtgactgagcaactgcactccaacctgggtgatagagcaagatcctgtcaaaaaaaaaaaaaaaaaaaaaaaaaagaaaaagaaaaaagaaaaaattctcaacactttttaatattgattacatattgaaatggcaatattttggatatgttaggttaaatatattactaaattaatttcaactgtttcttttttactttttaaaatgtggctactataaaatttagaattatgtatgtgtcttgtatatttctatccagcagcactgatctaaaagtctttgttccaggacagaattaggtatacagattacagatgcttaactaatatttgattgtttggtatggctaaagctcttcatcatttttaaaaacatttatttcttttttcccctaccatgccaatgtacatcattttattacattaagggactgtatctttaaaaatgcatgcttacaacaaatctagacagatttacagaatggagttattatcagagcatttcatatgctatattcatattcactcaatttgtgtttaatcatttccttctgcaaatctgtggttctaagcattgaagcaaagctcttcagagcatcagtaaagacttgtacaattaagaatgggggctcagccgggtgcagtggctcacacctgtaattccagcactttgagaggccgaggtgggtggatcatgaggtcaggagttcaagcctgaccaacatggtgaaacccagtctctgctaaaaatacaaaaattagctgggcatggtggcgcctgcctgtaatcccagctactcgggaggctgaggcaggagaattgcttgaacccgagaggtagaggtggcagtgagccgagattgcacactgcactccagtctgggcgacagagcgagacttcgtcaaaaaaaaaaaaaaaagaatgggggctgggcatggtggctcacgccaaggtggtaggatcacttgaggccaggagtttaagaccattctgggcagcatagtgaacctatctctcagaaagaaaaagaatggggatgacttcttacggactaagaaatcagattactgaaattaaccttggcaaataccaatgaatcactaattgttggcaagccaactgtgttgttatatttaatgggaaaatcatgatcactgatgttctctgtctggctcctggattttccggctctttttagcatatctaaccggaaggactccaggaagcaacagaagagtgcaaaagggagacaagaaaggtgatcagactcgtttatttatttattttttgagacagagtttcacttttgtcacccaggctggagtgcaatggcgtgatcttggcttattgcaacctccgcctcctgggttcaagcgattatcctgcctcagtcttccaagtagctgggattataggtgccggccaccatgcctagctaatttttttgtatttttggtagagacggggtttcactatgttggccaggctggtcttgaactcctgacctcaggtgatccacttgcctcggcctcacaaattgctaggattactggtgtgagccactgtgccggctgaccagactcttttaaaagagttttataaaggagtccatttagtattccataatgttctttgagcatggagtaaatgcatctgatggcttccaacactgtcggaatccgagccaaacaacaccctgcctatgttattttttttagccaattggacttccagcagaaaaaggtcccactcaaggaagtgtctgggttggttgtattgtaagttttttggtggaagtgggaagggggtttgaatttggttgtctgaattgtttcagaatgcactacagtgcttcctccccttctcctatcccttgactcctctccaactaccattcaccaccactaccaatggttaacatttatttaatgcttactacataccaggcacttttttcagtagtttacatctgttatgacttcactggatacttaaacatttgagttagatactactaacctaatttgaaaggtgaagaaactgaggcacagagtggttaagtaagttgcctagtcgtgcaggtaatatacagagcagccagaaagagtaaccaaatctgcctgtcttggtgcttgaaactctagatgctacagcatctgaagattctgacttcacactgcagaactgtgaggttagggcaagcctgtgcctacagattattccttgagctgctgtgacacctggaggcatagatttgctcacctccaagctttggtggcctttgagtaaatgtcaaaggactgctaatgaattatggcactttcctgagtgcctaaacaagttattaattacagggtattatttgaaatgttttgcaacatataatgttcattagtttgaacaaaggtatatataatttcttgtaataatatttattatggatttgtattgtgtctttgggtattttttggaccctgaggacatagaaaaatggcagtattacatctattttgcaatctctttgcaatcttgttttctttccattctcttcctgtatactctgctctccagggagccccctagcgtttaggcagccttggagatgggcttgagtccattaaagtctagggtggaaagaaaattgaaatggaggaaagcaggaatgtgacccaagtatggaaactgtagatacactactttattagattatatgtgctttttaattttgaatcaggatagaggaggactacgggctaagctcagctggactttttatgagatatgtacaaatgcccctaatttttctgtagcaacaacctgattgattttgggcagtttgcaggtgtcggggataacaaaggaaatacatttcctctgcttaaagatttcatgccctaatgaaagaagggagaaacaccaattaaatagcggtgtgtccttcacagctgaagatgattatattgggacaaatcaagtctttatcaaagaccatggcatgattaattcattaaatagaattgtctttacatagtttccaaatttgccattagctcatggaatgttagagtaagacagattatcagagatattctaattcagtttcttcatcttatactgtatataaggaaacaagcccagaaaaaagtgtgagaatcaaagatgtggttttcagatttccactcttttggactttctactacaaatgactcgacttctttgctagtttgaactaagcttcccggttcttttagtgttaatttcaaattgtttccagagcagaggatatctcagtactctgtccaataagttcataaaataagagttatgagtaaaaagtcttaataaatcagtaattacctcttgctatataacggcaaacagtatctttattctagaattttcttttttttttgcccgttaataaacataaaagcaagcagtcaaatgacagcctttttgctttggctaaggatcgatttatctgcccactaggatggcacaaaacatacagtaactataaactgaataataactagaaatacatatacccacacaaatagatggcctatatattttgtttaggcagattattcttagaatatttatcagtacatagtgagtcctgaagactttaaaacataagctaatagttggctgaaatttcagataaagaattatcaaatgtctgatgttgggcaatccagtatttcagcttcttgttcagtaaaattaaaaacacatgctggggcaatgggcttgctctttattgtgcagagtggttacatgggtgtaagcacaggtaaaaattcactgagctgtacacttaagatttgtgcattttactgtatatacattatatctcaaaataaaactagaaatataagaaaaagccaaccacgacggactgaaaacaaacatacaaatttggacgtgcgatgatcttttagtcattatggtttcagatttgctgttagttactgattgatatttaatcaaagtgacgtgaaacactttttcccctcttgagctgatcgttcagtaagctaagttacttaaaaggatcttgtgatctttttataagaccagaaagcctttaatttacctgttattaagtaagatggagtagtaacggtttccaaaatttgtataacacacgatgaagtctctagggggcagggtaaacacagattttttttttcacttcatccttctctgcggcgatgtctttatggagttcgtcaggcaacggtatcagatagcaaatgggtttttaactaatctttccctaaggtactgtagttctatattctatcctatagattctcaaaatccacttttacactaggatgccactggagggcagttctgatttggatatatcttaaaaatgatttgcttttatgttttcatctccctgcgttataaagcaccatcctctgaatttggtcgttgcatcgggtcaaaagttctgcagcttgaaaaaccctgcaaaaacatccggaaaggagggagaacactacaactcccagaacgcaatgctttccctctcgccagcctgtcccctccagctgctcaatgaccagcctctgtgagcctcctctcagccctattggtcagtttgctcgtcagtgagtgaggcggagggaggggaggaacagagaatcccggatggtacgtttcccgccaccgcggggcgcgcagcggaaaacccgaagaagaagaagcttttgattggacagtcgctagtccgacctcagagaactcagccaatcataatgcttatatgctcccaaggtccccgcctcttcctcgaggtaacctttggtggcgggaagagttcggaagttttcgcgccggggtggagtcatcctgggaacctccacgcgactttggtggaggtagttctttggcagcgggcatggcgggtaccgtggtgctggacgatgtggagctgcgggaggctcagagagattacctggacttcctggacgacgaggtgagggaggcgccggcgcgcgggctctagcgctcggagcccctgcggacgcggcccggccgggaagccagaggcccgccagacctccagaccgtgtgccgcagcggagcctgccgggcccgagcctccagccccaatcttgtaacttctcaacgccggactcgctagtttgtgttcgataagtgaactcttaggaagccagctttctcttaagtacaagcgatggtccgggcgcgcaaaaggcgacaggttcccattaagtgcaagcagattggcaaagcccacctcggccttttgcatttcactgctctctcttgatttgaggagactgtgggggaggggctgccctagggctatagtgaccagccgcgttgcagagtgctcagattttagggactgacgttttacctggaggaaaagactccataattcggctgcattctttttcaataccaactaagatgcagataaaaagtgttttgtgtgcaggccaaggggattttatgtgcaacccaagacttaaagccatagaatgttgaaaaaaccatcttgaagggttgatgatgtgaccaaatagctgagattctctattcctttaggtcggggtatgagaaccctttccgtattatagagatgattggaaaaaatattactttttacataattcttaaatgaaaagccattttaatgtgactattaagagtctgttttatttacatttttattgtatatatttgaagtgcacatgttttgatatacatggtgaaatgattactacagtgaaacaacatatccatctattcacgttgttacctttaacattcacattgctaggtttaacttaacattttaacaaagtttgcacttactgtccatttagacttctcatgagctcatt

SEQ ID NO: 2426 - DNA, 6000 bp, Homo sapiens
acgcggcaggaatttattgatggaattctttcctcaagtaagttccaagacagatgactatgactgatacaatttttaaaggaaataagcacattttaaaagtgtgggtctggtaaacttgtgttacaataaagcattgtcttataagttgcctaggaagtcacgacccttaaaaaaatgtttttttggtaaaatttgtggctctggagtcaggaacactcactaactgtgtaatcacagatatgttgttccctccactgaggctgagaacttgttagaataataaagttaataatatatgattcttaaggtgttttctgtgtgtgtgtgtgtgtgtgtgtgtgtgtgtgtgtgtgtgtgttgcctggcatatgtgtaataggaagtcaataaattcaagtccctttttcattctaattcacattctgatctaactttgtcattagtaggaaattagaactctataaaacttcttaagatacttatcacctttttgtttgatggcccaatcatttgtatgtgatttccctgacagatgttactagatgtcattcttaaggtaaatttcatataatttattctttgactagcaattgacccatataaaattgccagtgttaaacattttcaacctaaaaaaacagcattttatatgattcacctaaatagtaattaaagataaattaagattatatataactcttcatttgctgtgatgtaaatcagttttttaaaaaaggattttaatatatttgatcactgatgatttaaccagctacactgagattgaaatgtgcaattgagaatgtcttgagaaagaactaacaagtcactacttaccattgttttcaaaattttagagtttccaaccagtcgcttggagatgagcgcagttgcagacatctttgacagagatggcgatggatatattgactactatgaatttgtagcagcccttcacccaaataaagatgcatataaacctatcacagatgccgacaaaatcgaagatgaggtactcattatcttcccattgcgtacaacactgatagtatgttctgccacgatatcatgcacaattcatacaaccattttattttcactctaattgttgtgtcaaagttttaaggattgtactatgtaatattgacattaaagtaaatatttcatcattgtttttggcaggtgacaaggcaggtagctaagtgtaaatgtgcaaagcgatttcaagttgagcagattggtgataataaatacagggtaagttttcaaagtaatgttgtagttcctttaaaggacataaattgaaatctgtatacaatttgatctccattgttttccaggagtcttatttatttacttttttacctcatgtcaaaatttaatggtatatgaaactcttacatttaacattttaatttgtataacggcagcctgcattttgcatattaggaaatatctttgacatctacatcatgcacattacctttaaagaaaaattcacaagaaaatactcaaatctcatatatttaggttgcttcatattattttatattttgttatgattagaggtaagttttcagatttcaaacaagaaagctactctaatccagaaccacaaagttaaaaatatggactcattttaataaatatgaaaagagaggataatgtcttctccacttgtgcagtaatttttgcttttattcaaaatctcaattaactcggttcactctcttcaaaacagaagaacagtgtgacttcattactctttctctatttttttttttctcttttggaacatctcttatatgtagtagctagataagaaatgtgctgagtttccccaatacagtgtgctacttctaaatgaaatattatttttatttttatacttaaaaaaataatcatcaatgtattcaaaattttaacttaaatttgaaatcctaagattttcaaaaatatgtgtacagaaaatagtctgattatttggtttgaaattgggacaactgggtgcctgcacatctctaaactagatactacatccagaagcacagagtgtgagtatgtgtgtatgttctagagtcatacagaaagtttcctgttgaactaattgtgtctttcttccatttttcatttttatcagttcttcctgggaaatcaggtataaaccagtggaatgtattctcaagttcctgatgatttttttttaactttaattcatagtcattaaagcttgccatggccaatctttcccatgctgtctccctagctactacattgttggttggcgtggtgtttctgtaaacgctataagggtccttgatccaggattcctttttgccttgtgtctctcagatgaggagattacttttaagcaaaccagataatgaattgtagcttggcttgctacaatgttacgaatgcaatttttaattcccattttttataatatgagcatatattttatgctagtactcattggaacacaaatttgattctccacacatctctgtgttaggctcattggtgtttaactgtttaggacatacggtctacagtagctgagaaggatcagcctcaggcagtgacacaggaagacagagagccaagaggtctccttggcactcagccacaagtaacaagttctctccaaagaagctatttgccatttgttcaaaatcaccaattttggggcttggcatctctgagtagaaatgttaactcagtaggctttaagtaatattccttttgaggaaagttatcgctataatatatgcagaatcttaaagtcacattttatgccatcttgatcgaatatttatattattggcacttaagtcaatataaaatgtttatgttgacatttaagtcagtataacctgtgtagtggcactacatcatgatcagaattttgaaactaaggagatactctgttttgatttaaacatgttcatgaagcttttattttattttattttattttactttggaaagaaccatgctatctatagtatctgaccatattacattagatatgactctgccactccattttaaagccatattacatctcaagcttcaaattatctattacctttatttattgcaagcaaataatttatttaaaatagaaatagttacttggaatagatttttaaaacttccattagttatactataatactgaaatgttacttttccattcttgctattttcggagtcagcaaatgggagagcatcttttatttgcagagagaatgagagaaatacctcaaaaggttttactcactgaaagcacagtcagcaacattagtctattttctcttgtcttgtgatttggttactgggaatatttagagaaattctgaagatgatgttagttgtctggagaatgcctaattaaaacagaaaattatttgtattcattacacttgaaatatcatctctataaggaacttttagttatttccttataacttttgttttgagtataatcttgaaccaaaatcatctagtcccattatctggttccttaagggtaattttctttaaatcccctcctttccctttgcttattagcggcaccaatttttttctaacaaaataaatttacacttttatttttaaattttaattaacatttcaggaagaattataggaaagtttaagtctcaatgtttaaggaaaaaagatttagaaatagtggtttttaaaagtttgatggaaaaacacatgagttcctgctggtgcattttacatgctttctaggtccttctgagttttaggatcctgagggatttggttggtattgtttttgggttttcttcttgaaactcagtattaaaacactgaaaagtagcagatttttttctacctagagttttctgtttatccatcatgagcccaaataaagtcacaattgtatgttacctgctttacaaagaagccatttatgtttaattgactgttcattttgctttcttgtctgctgggatgacaaccgtgaaattcagtctggtagtttttatgagttggacatgaacctattagaaatgatttaaagtataaaatcatttctcacaggctttcaaaacataaacctgtgatcagaaacctggaatctagaaatttattcaggacttgcagaatttgtagcatatctacattattggagatctattgaaagggcaagaaaaagatgattgcctgttagtatcaacagttatggtacagacaactatgagagaaaccttttagatttggcagctgtatcattaataatgtgtcattggctattctaatattacagtaatctaaaatggcatattaatccagcctttaacaaattggtttaccagatcattagggatgcagaaattttagttgactgtgaaatttatatgagtcatactcatttactttattctttttaagtgaaaactgcccttacagaaaagaaaatgagtttataaagatttctcacagagttcagtggaaaacggttttactgtaagagagagtttaatgaagaagaatcaaagcttattaaatttttcttagaatcattttattttggataagccctgggcaagtgggccagtgcttactttcatggctatgtttaattcctagaaacattttaaaattactgccttactaatattgtttctgtcataagaaagaaaaataatttttagaccaaagctttggtagtatacttgataacctttgtaatcttttttttttcaaactgtttcctttgggctaaatcagcatgcagccgtctaacacaaatcattacaaacccccttttctgagattttactaatcgctatgaactaagcaagaaattaaagtcggttgctttagctactgcaaattgcacatcatcctgtagtttagaattattattgacaactagaggttctttctttcttcactgaacagtttggagactcccagcaactgcgactggtccggatcctgcggagtactgtgatggttcgtgttggaggtggatggatggcacttgatgagttcttagtgaaaaatgatccttgcaggggtaaggagatgcttatcatgataacatcatgaaagtatttcaattttatattatatccagcaccaaaacatactgggcataattttggtcatttattccaatagtgaatgtttcacattggtctgtcagcctaaagttcccaaagaacctgtggcagtcatgtaaaccatattcttctcatttttttctttcttttttttttttttttttactttttctggataaatatggtgggcgggaaatactagaatccattttctttaggagacttttacatctacgattttccaaacaattataccaaccaaggaaaggattttgtctgttatgacatagcaaagtaagagaaaagaaaattgaggtgatgaagaccgaaaatactggataataaaagtttaaaggtcaaagtttttatgaaatgaagagcaggtgaggaaagccataattaaaaaatttttaaataataatccaatgctaacttgactctttgaagttgcagattagaacattaaaaatataaacatataatactatagctctctacatatcttccagcccaagtcctaagttagcttttaatttttctgttttgagatccttctgtcaatttttaagttctcaaccaatttacgttacacgtggtcatttgattgcaatttctaattaggtaccaattactcagtaggcccatttttcttcccccccaagaaaaaaacaataaaattgttataattttcttttacctgtgagctcactgtaatcctttttagcaaacaacaaatgttcacgtcagtgctgtctccttcagctaccaagtgggatcccaggtttcctcctgtagggcctcttggttttggtgatggtgtcaccatctggtacacatagacatatcagtcatcaggcttctccaccaaggccaccatggattgttatac

SEQ ID NO: 2427 - DNA, 6000 bp, Homo sapiens
tgtggagacttgttatgttaattaacaccctctatcaaagatgggttgctgaatctatagcgatgaaatattgccatgtcatttaaaaagtggtacaagcttgcatagcattttctggaagaatgaaatgctatatattatatacaccgtttaaatttgaagctagaatataagaagaagacagttacatcaaatgtattataaatttttgagtcagttcaatattttgaaaatgtagtttatattatattactgtgggcttaccatcagccagcattgagttccattaacatacttaggtttgggtctcagagtagcaataaatatttgctggacaccacttaaagcccattgtgcatatctaacaccctacagaaaggagcctatttgtggtatcaccactctcacaccaggaccaggaaacctccagaaggcacgtatccagagcaggggtagtggtttttacaacaaattatttttaaatagcataaaattacctgtaattttataaaacatttcttaataatattttgcagtaacactattcattcttttccatctcctctgcttcccttcatacattcaccattcaccattcaaagaaaaacagaatatttaatttcttaacaccagaactggagacttcttagcatatccagtttctaaaaatggcaagctttcccacatgagaacaaaccagtaaggtaaggttcagactaggttggaagggcatagaattcagtggaatgttgacagtccagtccaccaaattctaggtataaccttggctcctctaggtgtagaagtgattgaaagtacattatttgtatcagctgttctccaggggaaacacagatgttagattaacctatttttttctcttccttataatgttggagttttaaatttttttcatttaggaggatcctgtattgggaaaatgataatttaagttatgatatttaaaaagtaggtgttatcagagtgtgctgtcaattgaacgttgactccattatagtaaacttgtaaataaaaggtctaaaaagcatttattcagtaaatcacaactcttttgaaccaactaccgggaacacaaaaatgaataaaacacagtcttttaatcttgtggaccgaacagtctaacatagcaaaatgccagagtaggaggtatgtcacagagctgcttcacagaggttaaagacaaaaggccacttaaattagaataaaacatataaacatatcatataaatttaaattcagagagtacatgtacacgtttgctatatgagtatattgagtaatagtagggactggacttgttttataccagtcatccaaatgttaaacacggtacccaataggtaatgtttcaactctcaggcccctgtgatcctccgtgctttttggagtcttcagtgtctattatttccatctttatgtccatgtgcgcccattgtttggctcccatttatacatgagaacgtgtgatatttgattttctgtttgagttacttcacttagggtaatgccttccagctctatgcatgttgctgcaaagtacatgatttcattcttttttatggctgcatagtattccatggtatatatgtaccacatttttttttaatccaatcaactgttgatggacacttatattggttctatgactttggtattgtgaatagtgctggaatgaacatatgagtgctgttgtctttttgatataatgatttcttttcctttgggtagataccgagtagtggaattgctgggtcaaatggtagttctaattttagttttttgaaatattttcatactgtttttcataggcatcgaactaatttatattcccaccaacagtgtataagcacgcccttttctcagcatccacatcatttgttgttttttcactttttagtaatagtcatcctgacttgtgtaatatgatatctcagggtggctttaatttgtgtatctctgataattagtgatgttgagcatttttcatgtgtttgttggctgcttgtatgcttgtatttcttcttttgagaaatgtctgttcatgtgtttttcccagttttcaatggagttgtttgttgttttcttgttgagttgtttgagttccttgcagattctggatattagtcttttttcagaggcatgatttgcaaatattttctcccattctgtaggttaactgtttactctgttgattctatcttttgttgtgcagaagcttttttatttaattaagtcccatttgtctatatttgtttttgtcacatttgcttttgggatctttgtcataaattctttgcctaggccgatgtccagaagagtttttttaggttttcttgtatagtaaaacacctatatttcaaagtgaacacccctgttcacatagtgtgagtagcatgggcatcatcgatctctgcggcctctggcactcattgtgtaatcaagtaatcgctcttggtgcaggggtccagagagactggggtgtttgcagatctctaacattctatatgagattttggaagcgtgtcacatttttaagggcaaagattctcattttgtaatcacattttcagagttctatgatctgtcttatctatggatatagttctgatggtagaaagtacaattaagtatgtgagacatttgtaaaacatttatttgaaagatcatccttgaggatgtcaaggctttgttcattccgcttgctggcagagactggctagaactgccagaacagaggagagtggctcttactggcattttaaagggacagttctcacatgggctgacctgctgtcaggctcactcttccaacctccccttcactttttactgcatagacactttgggccctctctcccatacccccaaacatttatctttccttacccaggcttctctctactttgtacttttttattcatgctgccatatttcctggcatagttaatgctattttaaatattaacctccttaccttatttgttagaacttatttttggtcaatcagtattgtttctatctctagcaatactgtctctcccaatgctattctccattaataacataattatatctaaatttgggagagttatttttttgtataatacagtttttgaagcatgaaatatcctataaagttggccctctgtatccagatattcaaaaataaaatggttaaaaatattcaaaaataaaatggatggttgcatctgtactgaagatatacatacttttttccttgtcattattacctaaacaatacagtataacaactatttacaacaatttacattgtattaggtattattagtaatctagagatgatatgaagcatatggggaggatgtacttaggtcatatgcaaatactacatcattttatatcagggacttgagcatcattggattttattatgcacggtatcctggaaccaactccccttggattccaagggatgactgtacttgtattttgaagtacatgttagaaagtactttgttttctattttgtccccttttcctccccaattagtagatgattttcactgtgaataaaccaattgaagtttttgtttatttgtttaattctggcagtcaaacaaatgccaccagagttttgttttcagccaatgccaacagttaattgaagtctttgtttctgctgtaggaattcatgaagaaactggaagaaaagagagctgaactaaataaagccaccactatgggcgacaccgttttggctatctgccaccccgactccatcactaccattaagcactggataacaatcatccgggcgaggtttgaggaggtcagtgtgtctcagataatcttcagagtagcaatagctttgagagttgaggggtgtgggaaatttcaggaattaagatgcacttatggccatgggaaaatgagacctctacatagaaaacgttcttttaaatacgcttcttgtatgcattacaatctctgcaattcacttttctttaaaagctcaaagaaattttgcagctatgtccctggaaaattagaaggcaaatatttagtacactgtataacattttggcctccttccacattgtttctgttgaataatccagcagttggatggtgtttcggagcagtatatactggtggagtgaattggtatacataaagtgaattaattctgtatttaatatcttagcttttttttttctttcttttgacggagtctcgatttattgcccaggctggagtgcagtagctggatctcggctcactgcaacctctgcctcctaggttcaagcagttcctctgcctcagcctcccgagtagctgggattacaggcgcgtgccaccatgcccagctaatttttttgtatttttagtagagatggtttcaccaggttggtcaggctgatcttgaactgacctcgtgatccgcccacctcggcctcccaaagtgctgggattacaggcgtgagccaccacgccctgccagtatcttagctttttacatttctactctgtgccacatggagtaagcttacctgatccttcagagaatgcatatttgaactcaaattagaaagcaaaaggaagcctgagtgattgacatgcatctttaaattctgaagatgatgaacatcatcgtgggctctcatgtcctcctcaagccagatcttgatgccactaatggaatctaaaaagaccagaagcattatgggtctagctcaggatgatcctaattttcatttaaaatttatttattttacatcactgcaattattttactaagttggaggaaattcagagaaatttctgtttctctgacaggtgctggcctgggcaaagcaacatcagcagagattagcaagtgctctggctgggcttattgccaaacaggaattgttggaagctttgctggcttggttgcaatgggctgaaactacacttactgataaggataaagaagtcatcccccaggagatcgaagaggtgaaagcactcattgcagaacaccaggtaaaataaatataatcctaactcctgttaaccattatctcagatattttctttctttcactgctgtacttctcaaaacattgctttgttctcgttattttcacttcttcagactcctcagctccttacaactgtgtttccaactctgcaactgccctaaaacctctctttacaggaaccctctgtgacctttgcaaaactttccttctttgtcctctgtggggttacactcgtggtattgtctcacgttcactcctgccctcccttttgccttctaaatgtcagctctccttactccttaggtgttatcctcagctctctatttctctcactctgttccctcttttggtgatctcacccacctccacctccctggcttcagtgggtacaaggtacccacattaaggtatccacattaaatgtggatgcattatgttcacattgcattaatcaaacaaggtttgattgctctgcatttttatgtctgtgaagatgactgtcatcacttgaaatacatcatatgaaaaagggaacgtgttgtctttcttaggaaaagcagccttcctatatatccttcttgttttaaactcaaatgatgggtgtcacactcactttgatttacttgattgctcacagtttgtttaatatgcatttacaaagagaaatattaagtgttagctcagttggttaagcaattaatgttgccattattttgtgtgtgtgtgtgtgtgtgtgtgtgtgtgtgtgtgtgtgttttaaaagcctaataagacatcaatgtctataatggctctaagtgtaccaggtcatgtttcctgtgatcagaggtattagagttcttcagtgtgacaaatattccagaaaggtgttacttcacttttcccttttgtctgggtctccttttccccatcacttttcacagtctctgcctttccacagcctttgctgcatattccaaatagagggatacct

SEQ ID NO: 2428 - DNA, 6000 bp, Homo sapiens
tagaaacacaccatttattgattaaaattttaaagtcagaacccattctttatttctttctttttttaattttattattattatactttaagttttagggtacatgtgcacaatgtgcaggttagttacatatgtatacatgtgccatgctggtgtcctgcacccattaactcgtcatttagcattaggtgtatctcctaatgctatctgtcccccctcccctgaccccacaacagtccccagagtgtgatgttccccttcctgtgtccatgtgttctcattgttcagttcccacctatgagtgagaatatgcagtgtttgggtttttgttcttgcgatagtttactgagaatgatgatttccaatttcatccatgtccctacaaaggacatgaactcatcattttttatggctgcatagtattccatggtgtatatgtgccacattttcttaatccagtctatcattgttggacatttgggttggttccaagtctttgctattgtgaacagtgccacaaaggttagtgtgtcagtatgttttagaattctagacactttttagacacaaaccttcccccacaaaataagcctgtatgggtggtggtaatataacacagtgtaaattattaaattattgtgccttgaagtgtaaagaaaaacctccaaaataatcagaatgacttaaaattattgttataagcatgattgtctcatttggtttcatggaaggttagaaaatatactcttgttccgttaaaaaaaaaaaacttccttgtttgttttaatggtgatagagctttatcttcaacttcatacttacaccaaatacagacacaaagaggaggcttctgtttaactgtccagtctggagtgttgtacctgtgcgctgttcctacctagatcatgtgacacagttggctcctaagaaagatgaggaaaaaatgatgagacttgaaatgtgggctttctttcatagaaatggggactgtgaaattaaatttaggctactttggatttattgacattttaaattcatattccattgtaattcagcactagaagttctgagaggaaacagtgtttcagattttgaaagagtcccctaattttttacttttgtgaatttacatcagaaattttttaaaatattcaaatactgatgattattatcttgggagataaaagtagaagtacttagaaatttggcaaaagaaatagatcagtgtacatcaatatctacactctttaatagagatataatgttgttgtaagatcttaataaaactgctcttatttggaaataattttgaatttagtgatttgaggagggcgtaaccatcatgtagatgttgtaaagaaataaaacagattatgacagtaggtagcatcatatttatttcacaatcaccatcagtagtttaagtaagtcctactaattcggtgtagaattttctagaaatctttatggtatacttattgttttagaaagttatgtatgtggtttttgttgttgtcgttattggtttttagtgccacaggagacctatttgtttcactggaaaagtaatagactaaacttgtaagtgcttatcttcctttttgaaaaaaaacctgagaaacttccagatagctccttactttcctggaaagtacttgcacagctttgacagtgtccattaattataagtttaatgaactcatgaacagatagatgcttgggattattttctaataatataaatatttttaaaatgttaacttagaagaatataagaacttgaaagcaaagaacctacctttaagaatactttacttttagaaaatattccatttcagcgaactgagtttgggcggggtatttaaaatgaatcttttgtaaccctatataataaatcatagaaatctgtttaaataagtttaaatttgtgatttaaagcattctaaagagttgttgatatttgtaatatcatttcaataaagttcttttgattttgttgtgctagaaatgaagaaaagtacaaaacttacaatattagtttcctgagtttttagctatatctgaaagttttgctttaggatttaaagcttttagtagatgatattgtaaatatatttatatagggctttttttaaagcttaagaaataaatttttgaggtgatgaaaatgttctggagttagtggtgattacaaaaccttgtgaatataattttaaaaacactgaattgtatacttataatagtgtattttatattatatgagttatattgcaagttttaaaacgtataaagttgaaaatgtgagacataaaatatataatctttcagtgagaactatgatttaacccacattatagttgaataaataaaatagaactagtcttaattttttaaatgagaagtaactgttgttttgttggtcttaaactttgaatttgtttaagcaatattttatgtcctgtatagaagatacatacaacattctagttagaagctttagaaatgttctaaatgagaataatattcatagtaccacaagtttgattcttataattctgaataatcaacttaaatatattactgtgctggttatttactttctatccattgcatgttttctgagtgcagaattaaatcgtaccaatgaaatactacattcattgtatcatagtacaaggagggatctacgagagcctctcattttacagaggaaggaattgaggctcagagagatgaaattacttgcccaaactcacagaactaattagttactgtacagtgaaagctttcttgacagcatttaaactgttgcttcaaatcttagcatgccagaatgggctgataatgataacaccattttttagatttcccagtagacagggtatgactgtaggtttaattgttgtttcaatgtagtgaaaagtataaatgcgtcaaggttgccctgagagagcaaacagagatgaatatatgatgaggagcttgggactgatgacctagaaaaatagaactcttaaattttactttcttaaagtgatataacttgagggtatctcaatttaggaagtctgtgctgcctttgaagctaaagaagaaacatataagagtctgatgcagaaaggccagcagatgcttgcaagatgcccaaaatctgcagagacaaatattgaccaagacataaataacttgaaagaaaaatgggaatcggtggaaaccaaactcaatgaaaggaaagtatgtgctttgattaatataatagaatcagtgttttagttgtttcatgtcttggacttggccttatttctgagtagagctatcaggagtagaactttcaatgatttatgtttaaacattttttgtatatatttggagatttcatggggtagttgaaaataatattctgttttaacatgagaacatatttaaaggggtgggatatattcaaaaatagataaatatatagatcaaatgttacttagttatatttttaaatgttaagaactactcaaattctgggtcattaaataattaattctattttaatctaattaaacaaaagactatatatatgggtgagggagagagggaaagcaagagagtgagatgattgtgtatattcttttaagtacttacatttaaaaattcatgagaatggattaaaatgtatattaaattatgaatatgtctttgttacttttttaaaaccgcaaaactgacaatctaagaaatctcaatattgcatgaaaaaaacaataggcaagaaatacaagattatatgccatcactgatggagcataaagtatgtatttcataatattttgagtccccaaattaattgtatgaatgtcaacttttctttttacagattatatttagtaattgtgttctttggttaatttccaaaaaacatgctttagcgtatattaatttttttttagttacagtgagatgctgcttactaggcttaaagggttttggtttgccagtattttagtgaggcccattacatttataagatatttagttaatatattaatagatatgcataaataaagtggggataggaaaggaatctgccagagaatatttaaactgaaacaaacaaaataaccaaggcccttaaacatcacatactaaacaatctgtccttgcagactaaactggaagaggctctcaacttggcaatggagttccacaattctctccaagacttcatcaactggcttactcaggctgaacagaccctaaatgtagcttctcggccaagtctcatcttggacacagtcttatttcaaattgacgaacacaaggtatgtagtgagtcaaatagataggattctcttttcagacaccaggcttttttttttttttttgagactgagtctcactcctctgtcgtccaggactgtggtggtgtgatcttggcttacttcaacctctgcctcccggttcaagcgattcttgtgcctcagcctccccacaggtagctaggattataggtgcccaccagcatgcctggctaatttttgtatttttagtagagatggggtttcagcatgtttgccaggctagtcttgaactcctgacctcaagtgatccacccacctcagcctccaaaagtgctgatcacaggcgtgagccactgcacccggctgacagcaggcctttttaaagtcaaaagcatgcatttggtatttcgaaagctttcgtttgtcctttaaaataatttcaggtttatgacaccagaagcatttttaagattgatctgattttcatttgtttctacttatttcctttttttctgggaaaggtttttgccaatgaagtaaattctcatcgtgagcagataatagagctggacaaaactggaacccacctaaaatattttagtcagaaacaagatgttgttctaatcaagaatctacttatcagtgtacaaagtcgatgggaaaaagtggttcaacggttggtagagagaggaagatctttggatgatgcaaggaagagagccaagcaggtaataaccctttagaaaaattctctgaacttgtcaataaaccacttcttgctgttgaaatatatgttatggatgtacttttatcacaggctgtattaggcataacaatcatggcatggtgccatggtggttctttcctaaaagggctgtggcctcagtttggatgctgacatcactttttgacctggcagcaatttcagcccctggggactaatcttaagaagactgattatagcttgacttcatagacaggctattatcattgaggcccagaaagaagctcagaatttttttttattgggtttgttttctttttctttgtccttttgacctctgttctcataatcagagtgagacatcatacttcattgtattgctaccttttgtttagttcctaagccagactttcttcacaagctatcagtgctgagagccagacatgtagccctcccgacagctttctgaaggggcatattctctgtctgagttggtcggcactccccacctctttgaacacttgttgacagaccttcatttcttctctaatattttgagcagataatagagctccatctcactttgaaattaatttttttgaatcttttggggccactttaaaattttaatctagagattttcacaaatttcacagagaactctcctctccttactccctttacctgttgttaacattccattctagactaaacacaaagaggtaaagttatgcatctctgtgtgtctttgtactccatggaagagagaggtgtacctacctcgcttgacaaatatatatatttttaaacatttgatttttactagaaatttagtgtaatattgtaggaggattttacaattactttttgcctcagtcagctgcaattttctagccttagtgttgtaccccattgttttgaggagttaagctcagttgggtgatgcaaaaagatgtcacgggagtcaggtgtttcaatgtttaatgc

SEQ ID NO: 2429 - DNA, 6000 bp, Homo sapiens
agtaaaagaaattgatatttttaaaccttagggttgctttctgcacttaccccattttagtgcatttaagcgttattaacctattcatatatttccactgtataaaaggaaggcattatttgctgggttctgtagtaagctttttattatatatgttttctacttgaagaacaactgaattttggaatactgggtttaagtatctctgacatagagtgttagttttagggccttccaatatttcaacttagcagtcaattccaggacccctcgtatgagagaagataaaggaatattctggaattttttttctctttcagaatgctgattgtaaaatatggtactgtatgccttagacatgataattttatatttgaaaatgaatatataggagtaaaatatatattttggttacttgacatgagaattaaactaaaattggcttgaaccaagtgagaaattttagaaccttttaattataatctctagatatttagtgtcatcaattgcaaggtcattccagtgggaataactagcaaactgttctcacacagtcatttcaggggacattgatagagtaaaggtacatccaggaaggttgcaaatttaggggaaaagaagttcatcatttaaaaacttaatattagccagcctgggcaacatagtgagactacatctgtataaaaaataaaacaaaattagccaaccatggcagtgtgtgcctgtagtcccagctatttgagaggctgaaatgggacgattgcttgagcccaggtgttgaggttgcagtgagctctaatagaaccactacactgcagcctgggccacagagtaagaccccatctctttaaaaaaaattaaaattctacacatataacgtttttgtttgaggatgtttcataaccagaaaggaaaacaattgcattaaagatgatattaacatgttacaaactagcaaacatggtgttatctttatattttcaggtgctccaaaatgatgtattagcccatcagtccacagtggaagccgttaataaagcaggaaatgatctaattgaatcaagtgcaggagaagaagcaagcaaccttcagaacaagctagaggttttaaatcaacgctggcaaaatgttttggaaaaaacagaacaaaggaagcagcagctggatggtgccttgcgccaggtgagtaagagaataaattctgaaagtttttatagcattcaagaccaaaatagcatggaattcttttattagttcacagactcctgtttaatttttataccttaaggagaggagtaaaaataagtgaaataaagaacagaacagcagaagagaacacagctttctagttcttagcataatactcttatctactagagctctcctgatgaagaaaggcaaatctaatggtacctggctgttcttaagaatgcatagagaggcttagcaggctgggattgtttgaagcttatttcctgcttgaaactgacagtgtttatggccccaacttaaaactgcctattacttcaggccaaagggttccatggcgaaattgaggatttgcagcagtggctgactgacacggagcgtcatctgttggcatctaaaccgctgggaggtttaccggaaacagccaaggagcagcttaatgtccatatggtaagcaaagtatttcctacagctttagcctcagaataacaaactgaccatgttatatgggccctggcgatacataaatcgtgggagaaggctttaaagatatagtttatggcagaaatcactgtgtatacatgttagaaacacaccatttattgattaaaattttaaagtcagaacccattctttatttctttctttttttaattttattattattatactttaagttttagggtacatgtgcacaatgtgcaggttagttacatatgtatacatgtgccatgctggtgtcctgcacccattaactcgtcatttagcattaggtgtatctcctaatgctatctgtcccccctcccctgaccccacaacagtccccagagtgtgatgttccccttcctgtgtccatgtgttctcattgttcagttcccacctatgagtgagaatatgcagtgtttgggtttttgttcttgcgatagtttactgagaatgatgatttccaatttcatccatgtccctacaaaggacatgaactcatcattttttatggctgcatagtattccatggtgtatatgtgccacattttcttaatccagtctatcattgttggacatttgggttggttccaagtctttgctattgtgaacagtgccacaaaggttagtgtgtcagtatgttttagaattctagacactttttagacacaaaccttcccccacaaaataagcctgtatgggtggtggtaatataacacagtgtaaattattaaattattgtgccttgaagtgtaaagaaaaacctccaaaataatcagaatgacttaaaattattgttataagcatgattgtctcatttggtttcatggaaggttagaaaatatactcttgttccgttaaaaaaaaaaaacttccttgtttgttttaatggtgatagagctttatcttcaacttcatacttacaccaaatacagacacaaagaggaggcttctgtttaactgtccagtctggagtgttgtacctgtgcgctgttcctacctagatcatgtgacacagttggctcctaagaaagatgaggaaaaaatgatgagacttgaaatgtgggctttctttcatagaaatggggactgtgaaattaaatttaggctactttggatttattgacattttaaattcatattccattgtaattcagcactagaagttctgagaggaaacagtgtttcagattttgaaagagtcccctaattttttacttttgtgaatttacatcagaaattttttaaaatattcaaatactgatgattattatcttgggagataaaagtagaagtacttagaaatttggcaaaagaaatagatcagtgtacatcaatatctacactctttaatagagatataatgttgttgtaagatcttaataaaactgctcttatttggaaataattttgaatttagtgatttgaggagggcgtaaccatcatgtagatgttgtaaagaaataaaacagattatgacagtaggtagcatcatatttatttcacaatcaccatcagtagtttaagtaagtcctactaattcggtgtagaattttctagaaatctttatggtatacttattgttttagaaagttatgtatgtggtttttgttgttgtcgttattggtttttagtgccacaggagacctatttgtttcactggaaaagtaatagactaaacttgtaagtgcttatcttcctttttgaaaaaaaacctgagaaacttccagatagctccttactttcctggaaagtacttgcacagctttgacagtgtccattaattataagtttaatgaactcatgaacagatagatgcttgggattattttctaataatataaatatttttaaaatgttaacttagaagaatataagaacttgaaagcaaagaacctacctttaagaatactttacttttagaaaatattccatttcagcgaactgagtttgggcggggtatttaaaatgaatcttttgtaaccctatataataaatcatagaaatctgtttaaataagtttaaatttgtgatttaaagcattctaaagagttgttgatatttgtaatatcatttcaataaagttcttttgattttgttgtgctagaaatgaagaaaagtacaaaacttacaatattagtttcctgagtttttagctatatctgaaagttttgctttaggatttaaagcttttagtagatgatattgtaaatatatttatatagggctttttttaaagcttaagaaataaatttttgaggtgatgaaaatgttctggagttagtggtgattacaaaaccttgtgaatataattttaaaaacactgaattgtatacttataatagtgtattttatattatatgagttatattgcaagttttaaaacgtataaagttgaaaatgtgagacataaaatatataatctttcagtgagaactatgatttaacccacattatagttgaataaataaaatagaactagtcttaattttttaaatgagaagtaactgttgttttgttggtcttaaactttgaatttgtttaagcaatattttatgtcctgtatagaagatacatacaacattctagttagaagctttagaaatgttctaaatgagaataatattcatagtaccacaagtttgattcttataattctgaataatcaacttaaatatattactgtgctggttatttactttctatccattgcatgttttctgagtgcagaattaaatcgtaccaatgaaatactacattcattgtatcatagtacaaggagggatctacgagagcctctcattttacagaggaaggaattgaggctcagagagatgaaattacttgcccaaactcacagaactaattagttactgtacagtgaaagctttcttgacagcatttaaactgttgcttcaaatcttagcatgccagaatgggctgataatgataacaccattttttagatttcccagtagacagggtatgactgtaggtttaattgttgtttcaatgtagtgaaaagtataaatgcgtcaaggttgccctgagagagcaaacagagatgaatatatgatgaggagcttgggactgatgacctagaaaaatagaactcttaaattttactttcttaaagtgatataacttgagggtatctcaatttaggaagtctgtgctgcctttgaagctaaagaagaaacatataagagtctgatgcagaaaggccagcagatgcttgcaagatgcccaaaatctgcagagacaaatattgaccaagacataaataacttgaaagaaaaatgggaatcggtggaaaccaaactcaatgaaaggaaagtatgtgctttgattaatataatagaatcagtgttttagttgtttcatgtcttggacttggccttatttctgagtagagctatcaggagtagaactttcaatgatttatgtttaaacattttttgtatatatttggagatttcatggggtagttgaaaataatattctgttttaacatgagaacatatttaaaggggtgggatatattcaaaaatagataaatatatagatcaaatgttacttagttatatttttaaatgttaagaactactcaaattctgggtcattaaataattaattctattttaatctaattaaacaaaagactatatatatgggtgagggagagagggaaagcaagagagtgagatgattgtgtatattcttttaagtacttacatttaaaaattcatgagaatggattaaaatgtatattaaattatgaatatgtctttgttacttttttaaaaccgcaaaactgacaatctaagaaatctcaatattgcatgaaaaaaacaataggcaagaaatacaagattatatgccatcactgatggagcataaagtatgtatttcataatattttgagtccccaaattaattgtatgaatgtcaacttttctttttacagattatatttagtaattgtgttctttggttaatttccaaaaaacatgctttagcgtatattaatttttttttagttacagtgagatgctgcttactaggcttaaagggttttggtttgccagtattttagtgaggcccattacatttataagatatttagttaatatattaatagatatgcataaataaagtggggataggaaaggaatctgccagagaatatttaaactgaaacaaacaaaataaccaaggcccttaaacatcacatactaaacaatctgtccttgcagactaaactggaagaggctctcaacttggcaatggagttccacaattctctcc

SEQ ID NO: 2430 - DNA, 6000 bp, Homo sapiens
tgcattgcaggtgtagacagctgtaatatggaggtgtgaccctgagatactgaaaagctgtttggtttgttatagcaactgcgtgagttgatagctgaacacaagcctcatatagataagatgaacaaaactgggccacagttactggaattgagccctggggaaggcttttctatccaagagaagtatgtggcagccgacaccctttacagtcaaattaaagaagatgtcaaaaagcgtgctgtggcactggatgaagccatttctcaatcaactcaggtaattgtttacactagatatagaattgggttcttgcagacaacagagcacagaaagacattttcctggatttcctgattaaattttaactaaaattatttcaccacattcactcttgagtattgatgtctgtgtccctcagaggtgatgtttgcttgcatccagcctttatctccttatctttctctgcctgcttatagatataatacaaataattttcaatgacttaagaaacgtgcagttgtcatcattgtctgaatatttaattcagtgtccatcctgagtagaatgtaatatttgccattgggggagataaaggaaagtgttataattattaataaagtactctcaagaaggcaatgagaagaaagaatgataggctaaatgaaaagaaaaagaatataaagttggatattgatggttttttcttttctgaaaatatcttttttcaagaagttgaattttgaaatacccaaagattttccattttcaagatttggttttcattattagatatggcacattagagtgggccagtgtcacaatcctgtgtgattattcctttaactttgagatagtatagaacaaagttcattcatagatgtgaatgaacaagtttttatagctttgcttaattgtctatggaacctttacaaataaaaattttacattctctcatgtgtctgattatgtgtttaaccatgaagtaaataaaaacttctgacacttgtaacttctgttatatcagaagttacaacattggggaggttttttgttaaaattttttttaacatttttcaattcaggaaatgcataacttaaggattccctggaatctaatcaaaacttcccatgaatttcacattaaataatataacttttcaggatgccataatagttcattaaaaatgaagtaaacaatccattgtaatagacaaatactcagcttattgaacttgatttttaaaattaatttgaattatgataacaggatgaagcagcaggtaaagagacattgctgccatgtcgtcctggtccaattacatattaatatataccatttcttaatggatacactcaaatattcataagaaactaagtctattgtacataggtagtgtgacagaggtgcatatacttcatgattttaggcatgtcttcacacaccaggtggatgtaacttttgaatgggtctgttgataaagaggctaagatttattcttaattctgacattaaattgtaaaaaatgttttttcatttaaatttcacacttggtattacagatcttttttccataaaagatctctttgttttgcccctagttccatgacaagatagatcagatccttgagagcctggaacgcatcgtggaacgtctgaggcagccaccctctatctctgcagaggttgagaagatcaaggaacagatcagtgaaaataagaatgtgtcagtagacatggaaaagctacagccgttgtatgaaactcttaaacagaggggagaggaaatgattgctagatctggggggactgataaagacatatctgccaaaggtaatacttttggaatagggaaacaaattttaaagcattctaaatgtttatgcggtttactcaccgtccaattggataacaaaatgccgcatcttaaaaaagatactacaaatgtgatgtgtttagggttgaagggctgtgtatgcaaatcccttgttaatgtcttcctgtgtttgtgaaattatttggttgaatacaaagcgtgccattatacatagaccatgtataaagaccatatgttcaaagaccatgtgtattcaggccttttaaatcagtaggttgaagcatattgctaataaggccatatctggggttttttcctcattactgactctgctaccttacatagcatggatcctgcatcacatagccacaaaaatgggaaccactaccacagccagccatctttgagatacgagctgagggtcaaaagggagagcatgtgcgtagtggaaattcacaatgagagtactctagaagcaagcccaaagtacataccatacattgttacattcctgggactgaacggacaattttactcttgatttggggagcataaaagtgtacctaggtgattatttcactccctttgggattaaggatagccttaatgaacttgaaacttgataaacttggttctactctgagctcacttttgtcaggaagaaccttggtttggcaagaatagcagacccagagatattatgttatttggcatagactcttggacccactgatatccactggactggggtcattcaaaacttggtccagttttagatacttagcaaattggatcactactttctgtgtgaactataacattctgctttgttggttacgtggggctaaccagtcgccttgtggatattgttttgcttcatagctgttcaggataagcttgaccaaatggttttcatttgggagaacatacacacactggtggaagagagggaagccaaactactggatgtgatggagctagcagaaaagttctggtgtgatcacatgtcattgatagttaccattaaagatactcaagatttcatccgggacctggaagatcctggaattgatccttcagtagtaaaacaacagcaagaagcagcagaggtaagcagaaaatctcatttaaagttagaaaaataagttgtggcataatgaaatccagattccttgggtaaatgttaggagttactctgttaacatttatatttggttctgaaaatggaatgtgcagtgatacagtaggagatagagtatacccacaaatttcactttgagattgtatgtttaaaacaatttctcaggcctgcgtggtggctcatgcctgtattcccagaactttgggaggccgaggtgggcggatcacttgaggccaggagtttgagaccagcttggccaacatgacgaaaccctgtctctactaaaagtacaaaaattagttaagcgtggtggtacacacctgtagtaccagctagttcgagggtgaagcatgagaatcacttgaacctgggaggtggaggttacagtcagccaagatcgtgccactatactctaacctgggcgacagagtgagcccctgtctcagaagacaaacaaaaacacaaaacaacaacaacaaaaaatttctctttatcctcactgtttttgccttatttcagggccttattatctctctctttctttttggcttccaaagtaatccaaagtgcagactgtcttttccttgctaggcctctgaccttgctgccagtcttctctctagatctgctcttactgtgttgctgcctaaaccccgtcagaggcatcccctgccatctggatcaagcccaaactccctagagcagggcatgcagctttttgcatgccagcctagctcatgcctatgtttccaaagttatgtttttctcttgctcctttaccaaactccctccctgctactgattagaaagggcgtttcccaaaacaaactgttttgctctttctagcgtcagtgcctttgcgcatcttatttcctcactctagaatgtccttcctgccactctactggcaaagtccactcagggttcagttggatcattacccccatgtaaaaccttttcttgtatacttagcagagttagtgcatctgtgttcccgtaatactttattcatgcaaaggactctgcacatagtatggtttactgttgcttatgcctctgtctttcctgctgtagtgtgggccccttgaggggaatagccatatctatttttctttgtatccccagtgcctggtttagggcttggtttatggttattcagtgtttgttgaatgaatgaatgtatttaaccaagaagatgaaagcaaaagtaggatactgcctttctgttgtggtatctttgtaccttacaggtcctacctggtcctgcctagggtaatgacataaaatgtaaatccaaagctagattattctaaatctactaacaaatatattaatttgtattgtttttggatttatattttacttgtctatgttaaatgtatattggtttggaaaccaaaatgtctttctaagccttacagtattgttgatatttttaaaaatttgttttggtatttgttaaggtatttcttatttatcatttcttaaatatctttataataaacatttgacatttgttactaaaagggtgctgtttttcttttaaaatatttcttgttgaaaaaatttattgcagaaacttagaaaacagaaaaatgattagaatgccaccttctagaaataactaccattgatattgttgtgtactttttaaagttttgatgtggttttgcttaaaattctaaggctgtcattttcttattctagaccataagggaagaaatagatggactacaggaggagctggatatagttattaacctaggttctgaactcattgcggcatgtggggagcctgataaacccattgtcaagaagagtatagatgaggtacaactggcttacttatcagaatggcttttaaaaagtttttagttaactaaaatattttgttaacagtagttgaaagtttaaaatatggcactaaaagaattctaacatacatcttgtagttaaattcagcatgggattctctaaataaagcttggaaagaccggattgacaaacttgaggaggcaatgcaggctgccgttcagtaccaggatggactgcaggtaaggggattacagtgtatgtgctggtcttagctggaaggaggaatcgtactaattgatgtctacatattggcaccacctcaagatctgccagtgcatatgcaattgtgggcaaattattcctgcagttgcctgtgtatctcatttcatgttttgtcttttagaagatatttctgacctttcagatatgtgtagatttatatacacatctaaacacatttctgtatacacattcagtgaaatttactttgaaaagaaatattttgattttttttaagtgaaagtaaatgttctcacacagtgttttttataaatggctcagcaccagacagtgaaatggaactaaatgtgaattctgttctgagtggaataagatgaaaggagtaaacactatctaaaaatatcaccaagtttaactaaagtcagaagtaaagaaatttgatttgaagccagtgttctccatgtacaaaaatagatttctattaggtcataatctggtgtgtaaaaagtgttttcttcttttccatgtatataatttcttttaatagttgtttttcacttaagggttttcattcagttcattaaccatttataaggtttttttttaatattaaaaattatcttgtcagttgaggccaactcgggtatatttctctccctacctcccttaaccttgctccgtttcctaacagactggcaggagtttaatctttcatccttcttaccatatggaaaaagcttaagtatttccataacactaagtgaatattatttttaaagcccagatgagaacatcttttccttttttattatgccattccatttctatatttgtaaaaataaatgtcacagctaggctttatgccagctgagaagttttttgaactttggaaatatatgaaagattttactacaaataacactttattatattctccctccctcttctttttttttttttcttttg

SEQ ID NO: 2431 - DNA, 6000 bp, Homo sapiens
gaatgtactctgagactaatcatggtgtgcatgtgtgtgtgtatgcgcatgagggggtgtgtgtgtgtgtgtgtgtgtgtgtgtgtgtgtatacgcctgtgcccaagagagaaggagggagagagggagagagagaaagggagggaaaagttcaattcagggtttattacatcattgtttggaatatgtgacatcttgttaatcttgtttgtttacctttttaatgaattggcattgaagactatactgaagtatttatttaaaagagagttttagagaccacactttaactttatttaatatagaacaggaatcttatggagttctatctaaatgattcagcaggagaaagacaagtatgtagaattcaatttttgtataaagatttatttgtggcagaaatctgatatctacttactgaattattttaaatgaaaaatgtttcatggatttctatgctgaggtgatttgaatagccacatttttagcatagcatcaaatagtatggaaaggctcattattgagctgaaattttaaaaattgagtttttttgcctttttgcataatctttaagctctcaaaacaaatttgtgattgtctgtataaagggaggtacaaaactttgtagccacatcttcaaattgtttaaactaaaagctttgctgttgcagaatatttgtagcctcctaggatggcatttcttttccagctctacagcatcttctccatgtattttgggggaaaatctagttcattctagccaggaatgaaaaatggctccaagggccatgttaccacatgatagatatcaagtcacaccagatagctccagcatgactggactcctatgacagcatgtgccaagaatcattttgtcacatataaggcaaaaggcatctccttttgggcccttttctgatacacacacatacctgagtagatggctggtaggtgttctcttgcctgtcatggaatggtttaagaagggtttaaaaaaggctcctcggccaggcacagtggctcatgcctgtaatcccagcactttgggaggccgaggcaggtggatcacctgaggtcgggagtttgagaccagcctgaccaacatggagaaaccctgcctctactaaaaatacaaaattagtcagatgtggtgactcacgcctgtaatcccagcagtttgggaggccgaggcaggtggaccacctgaggtcaggaattcgagaccagcctgaccaacatggagaaaccccatctctactaaaaatacaaaatcagttgggcatggtggtgcatacctataatcccagctacttggcatgctgaggcaggagaatcacttgaacctgggaggcggaggttgtggtgagccaagatcgtgccacggcactccagcctgggcaacaagagcaaaactctgtcttaaaaaaaaaaaaaaaggctcctctcactacttgccaagccaagttgccttatagtgatgctatacaggtgagatctacctagacccaaaggaactccagaaatatcagcagagatgtagcattttatttgagagtctcttgataactcttgagtgaaagcttgttttccaagcattcctgaaagaacattgacaggagaacgtatgtaacatcttcagttttccttttccatgagattatctatagctgatataccatcaccacctccattcggtaaagcagcatgaagatacctaattatgccaaataaaaataaaaacttggcctgggacgcccaggagctagattgcaaacatggccctcccacattcttatgtgcagcatgctatattagactcttccttcttttaaaattgaattcatctttatttagccctttctaaaactattttgaggcagtcttttgaaaaccttcaaaaacattttattacattggtgatagttaatgatgtaattcctcaacaggttctcaaaataatgctcataattgattttagtagacactttcaataaaaatctaggtatgtggccatcctggtgactgatagaaattagagtttgcaggaaaagattggtagcttatctctagaccatctttcctgaaagtaagattccccagagaagcttttgtgaggggctggagtttggagatacacattctggtgaggacaaagagctgctgatgagggaacctaatcaataatgtggtgcaaatgaaagacccctcaatgctgcacagaggccagcctcagaaaaacctgcaagcaaaggcagatcttccccctgggggtggctttggttttgacccatgaaaaactgctcattgaaatccatgggatccatgaggtgtatgtattctagctttattcaggcttccaacacatcttctctattaaagggaatggggatccacttgaattctacacccacgcactagtataaatatcattgtatttcttgattagctagcaaaattatgcacattcatatgacatgtgtttttccttaaatataccttacaaacaatgctcagtatatagctgtgtattgatagattgcccttgcagcctttaatattttaaaataatgaatatagattcattcatatgtgtgtctatatatcatatatatatagaatagattcatacataaatataaaatgtaatacatgttcattcattttatatcagtccgcatatataaatgcaatgccttgtgggcttacatcaccctaacattccttatcttgaggttttgtctcagcattgcatctaacttatattgagcttctttctattcttttttcttccttcccttctccctccttccccccgtcttgtctctctctctctctctttttctttcttctatttttgtatatatcatgagtgtgcagaaaggaacaccatcagatatgacttggtgtctgtaggttggggacatagcgagttcagaatacttttatataatatgaccctaggctaatgctcttgtcaaaatgtgctactcttggtatgagatgcataataaactgggattcattatttcactgaaccagcatctttgtaccctaaagggtctttggtgtgaccagactgttgtttaatctttgtgtcaggaccttctcttcctggcaaagagctgtatgagccatcatgtgttaaatgccttgtgatggggaggggtttgtttggagtttcttgccagctggatgcattgcaggtgtagacagctgtaatatggaggtgtgaccctgagatactgaaaagctgtttggtttgttatagcaactgcgtgagttgatagctgaacacaagcctcatatagataagatgaacaaaactgggccacagttactggaattgagccctggggaaggcttttctatccaagagaagtatgtggcagccgacaccctttacagtcaaattaaagaagatgtcaaaaagcgtgctgtggcactggatgaagccatttctcaatcaactcaggtaattgtttacactagatatagaattgggttcttgcagacaacagagcacagaaagacattttcctggatttcctgattaaattttaactaaaattatttcaccacattcactcttgagtattgatgtctgtgtccctcagaggtgatgtttgcttgcatccagcctttatctccttatctttctctgcctgcttatagatataatacaaataattttcaatgacttaagaaacgtgcagttgtcatcattgtctgaatatttaattcagtgtccatcctgagtagaatgtaatatttgccattgggggagataaaggaaagtgttataattattaataaagtactctcaagaaggcaatgagaagaaagaatgataggctaaatgaaaagaaaaagaatataaagttggatattgatggttttttcttttctgaaaatatcttttttcaagaagttgaattttgaaatacccaaagattttccattttcaagatttggttttcattattagatatggcacattagagtgggccagtgtcacaatcctgtgtgattattcctttaactttgagatagtatagaacaaagttcattcatagatgtgaatgaacaagtttttatagctttgcttaattgtctatggaacctttacaaataaaaattttacattctctcatgtgtctgattatgtgtttaaccatgaagtaaataaaaacttctgacacttgtaacttctgttatatcagaagttacaacattggggaggttttttgttaaaattttttttaacatttttcaattcaggaaatgcataacttaaggattccctggaatctaatcaaaacttcccatgaatttcacattaaataatataacttttcaggatgccataatagttcattaaaaatgaagtaaacaatccattgtaatagacaaatactcagcttattgaacttgatttttaaaattaatttgaattatgataacaggatgaagcagcaggtaaagagacattgctgccatgtcgtcctggtccaattacatattaatatataccatttcttaatggatacactcaaatattcataagaaactaagtctattgtacataggtagtgtgacagaggtgcatatacttcatgattttaggcatgtcttcacacaccaggtggatgtaacttttgaatgggtctgttgataaagaggctaagatttattcttaattctgacattaaattgtaaaaaatgttttttcatttaaatttcacacttggtattacagatcttttttccataaaagatctctttgttttgcccctagttccatgacaagatagatcagatccttgagagcctggaacgcatcgtggaacgtctgaggcagccaccctctatctctgcagaggttgagaagatcaaggaacagatcagtgaaaataagaatgtgtcagtagacatggaaaagctacagccgttgtatgaaactcttaaacagaggggagaggaaatgattgctagatctggggggactgataaagacatatctgccaaaggtaatacttttggaatagggaaacaaattttaaagcattctaaatgtttatgcggtttactcaccgtccaattggataacaaaatgccgcatcttaaaaaagatactacaaatgtgatgtgtttagggttgaagggctgtgtatgcaaatcccttgttaatgtcttcctgtgtttgtgaaattatttggttgaatacaaagcgtgccattatacatagaccatgtataaagaccatatgttcaaagaccatgtgtattcaggccttttaaatcagtaggttgaagcatattgctaataaggccatatctggggttttttcctcattactgactctgctaccttacatagcatggatcctgcatcacatagccacaaaaatgggaaccactaccacagccagccatctttgagatacgagctgagggtcaaaagggagagcatgtgcgtagtggaaattcacaatgagagtactctagaagcaagcccaaagtacataccatacattgttacattcctgggactgaacggacaattttactcttgatttggggagcataaaagtgtacctaggtgattatttcactccctttgggattaaggatagccttaatgaacttgaaacttgataaacttggttctactctgagctcacttttgtcaggaagaaccttggtttggcaagaatagcagacccagagatattatgttatttggcatagactcttggacccactgatatccactggactggggtcattcaaaacttggtccagttttagatacttagcaaattggatcactactttctgtgtgaactataacattctgctttgttggttacgtggggctaaccagtcgccttgtggatattgttttgcttcatagctgttcaggataagcttgaccaaatggttttcatttgggagaacatacacacactggtggaagagagggaagccaaactactggatg

SEQ ID NO: 2432 - DNA, 6000 bp, Homo sapiens
aataataatcataaatgtgaatgataaaacttttctatgatgtacattgttgcacttagtgggaagacttttcagggactttccttttaaaagatttaattaaactttaggaatataaaatgagaaaatattactgttttgcttataattcaattagtagttgtgtacttttctgaaatcatctgctttagtagatagtttagctggattatatctagtaggctacaaaaagtaagtaaagctacattttgaaaacagcattatgatttctgtattatgaaataatagtgttggctatttttcaggaaaactttacgtaccttattatgtatttctctcattgtgaaaatgtgagggggctgggcacagtgggtcatgcctgtaatcccagcactttgggagactgaggcaggaggactgcttgagcccaggtgttcaaaaccatcctgggcaacagagtgagaccccatctccacaaaaaatttttaaaattagccaggtgtagtggtgcgcatctgtacttgggaggctgagacaggaggatcacatgagcccgagaggtcaaggctgcagtgagctgtgatcatgccactgcatttcagcctgggtgacagagcaagaccctgtctcagaaaaaaagaaaatgtgatggatctagatatcatgattaatatttaacatggtttaatatatcttgattttattaacattagaggctataacatttatagtagctgtctaaaccaaatttttggggaaaaataaaccagtccggttctgctctatatatgagctcttacatgtcatccaggtaagactttggaatgtgatttcaagtaacaaagatatatgtaaattattgtgacaaattttaatagcacaaatcttaatgtgaatcaatataaaaatcagttcaataaaaaaggaatttagttattaaataagtggtgtatacttgaactcaattaactagggaatattttcccatagcactgtttacttccgaactgtgtcatggccattttctcattcacattcccattctagtgtaagtggtgtaaggacagtggtggctatgtctttacaacatcatttttccagtgcttacatgttgtttggcagacagtgagtgctatttttttgaatcatttaatttatgaatgaattatttgtgcagttttaaaaatgtactacccacctcaaatgtgaggttatatgttgctcctcttagcttttcataagcctagaataatattgtgctaatgattcagagttagagtctaaggtgaactgaattagagccattctttattatgaaaagttctgtaaggatcttagagtgtttagagaaaggcactcagagatctcaaggaaactttattattcatattgccatgaataagtagttttctaagcttacatatcaagagagcggcagctgggagtaagactcttggcctctactatttcccagtctagtgcccaatccactgttcaagcgtggtaagtatgagaccatttttctttctcttatcagtgccttattacagcctgtgtgcttgaacaccacagaatcaggtgcttgttgaaatatttcacgtcttgaacatgaaaaattggcattgatattgtgatgtggatggatatttttaaatctctttttctttatagatagtcatatatctagtcaacttaatgatggccacatactgagttgcatctaataatctaataattgttgaatggatgagttaccgatagagttttcattatgaaaagatttttttaaaaaagattcaactcttagatttatcgaatgaatattgagataacgttttctcattaaaggcacaaaagtttcctcccacatcttttctgtaaaattaacaaagaaagtataaagttgtttttactagaactgccttcttcatttggagttagcacagttttgttcatgttcaaatgattattttatgagattgaagaaagaccgcttcatttgtaactgacactctgacgatgtttcttattttgtaaaatagagaatgtttagattttatttaaataaaactattaaatttcctacaaagactaagagttggcttgctgaatttattttcaaacagtatttttagaagggtgttcagtagataaaaatctgtggaggtgattttgtttattaaatatctggagtcagtgagtaccactcttgggccttgtgttaacctcaagagtactgtatggttattagtaactactaatattcatgtcagcagtgctgagagcccctcactggtaggaatactttactctggagaacagttagatttgaacttgggcttcaaaagggaacggcaaaacactctcgacttcaaagtgatctgcactttgcatcgcagatactgctgaagcatcagattcttcagtgtaaaagtgcggtttcaactgaaggatagggacctatgtagccccccttttcccatttagtattcaaatgagtgcggtctctggaccttcacaaaataatttcttcgcggatctcccggtgccaggttctgcctccgcaagccctacggatcccctcccattttgaagtagtcggcggggtttccgcggtgtttgaacctgagctgtccctctccccagtggccggactcggcctgctttgcgctgatgtcaccacaagctgttacattgcagcctctcggcttcgaggtacctcccactgaaaccgctcgccgactcccgggaagaagcgaaagatgactgcgaagttaagtcacgggagggcgtagcaccgaagtggtagagagctgcggctccggaacgcccggcaggcccagagacgcagcagatggtgcctgaagagagagggcgttgctgcaagcgccctggctggagagcatgcctgcccggcaccgtgctgccctgaggagccgcggacagccccggagctcccttccggagttctttctgctgcctccaccgccaccgtctctctctagccccagctgaaatgaaggccataccgcggccacagaacttggttcagtttcaaaggctaatgtagtccctgggttttctgctcaatgtgaattacgctgcctgtgccttagaggaagccgcggagctcttcgttgctgcaattgcctcaggtggaataagccttcctaaggaggaccagataagaatctttggaaatggctttttttttttttttttttttttttttaaagaagcttagtagtacaccatgctttctgtttactttaaacggttgctggattgtactgccctgggtgtctaaaagtctggtgtttttttctttcttcctttgagtagttctgaatagcattgaagaagcttaaaacaggaagaaaacctgccttttcaatcaagtttatttatagctactcccccctccaaaaaaaaaaagtaaaagaaaaatgtaactttctcataacgttagacttaacttatttttctctgaagatttgttctgtgccttgatgtgaacaataccaggtccctgtgtttgtcttttaaatttctggagcatggtttatttaccagaatggtggagttctgcaagccatctttaagtggattacagttaaccagagctctgccgaaattaacattcaggctgttaaaatgcttgctcatttggaaattttaatctggaaatatcagactaaaaagggaaatggactgacaatggaatgttctgagtgtttgagccactgttaagtgtgtgtttgtttattttctgtgttttggagtgtgtgaacggggactttgggagctgggaaaggtggacaaaggagatttttgttctctgttattgatgcactttattgtttagaatcatcctaaaatcaaccaggtaaaaggatagttgcatttatactgatgcactgctgatgaccttaaacacctcatgtattatgaaatatattatttgagcatgtgtctttatgctaaagacactccatagctctgttcagaagtatacttttttggaagatgctttatcttatttcttatctgtgtcaagagctgcaatatttgttttaactatctgcaaaatggggaagccactcagcagaccagactgtttacgtcagaatcccccatgtgtagggaagggtgaagaagaggaggacctaaatatcgaagactgttacgtcccacagcggtcaatctatgatactgttagactaaatgaacagatagactctggttcaaaaggtagtctatcttccaggcattttacagatcgaactttaccctacagtcacagaacactggatgttagttctttatgctctaatggtgcccttacttcttccagtgtatttgagctgagaggtcgggaagctaacaaactagatgaaaagatgatctttgatgcactcaaactaaatagtgatatcattcgaaccacaggattacctaaagccaaatctcatgcggaaaagaaagagcatagacggtcatggcgaatgtttgtcccggccaattttatggattatgcaaacaaaagtgaaagctcttttgttgaacctgctgatatgtcagatgctgttaccaaggccagcaagtgcagatggggtactaattctctcacttcggaggaggatgactctggtttatgtagccctccagcagagagggaagaaaaacagggcattttaactggagaccagtcacgaattaaaagtttgtcttctactgaagatattcttgtaacagaccaatacagaccatttttttctgttaattccattagcgaacagaaaatcccactgctttcatgtcaaagtgcccaccctgatgaaaatttcaaaatgattttacatgatgtttctccactagaggaagcaaaacatgtaaatggtcaaagggaaatccacgatgaaaattgttgcctgcagaataatttgaaagagagccctgtgaagtgtgacccattaattatgccaagaaatagagaaaatgagcatatttttaaccttggagaagaggacgaaacatacggacctggagaatcccaaatcacagcacaaagtagggaactcttgaaggattcccctcaagatttagatctctctcacacagatctaggggagagtgatgtagattgtggtagcaccagcttagtagaaaatgtgacacttttgacacaatatgattcaggagaatgcaacattgcatctaaagaggaagtggaggctcctctttctgcccaggagagcgaaatgctctataagaagttctccctgaaattcgtatcagcaagaaagaaagcagcacccagaaaaacaggggcccaggcaggaatattggacacagtctgcaatggctttcagttggttcaggtaattcatggaaatatgaaactctgcagtgtcaaaagtttgcggttctgctaaaagtttgtggttctgtttcagagtggtcactagtgtttctaataataatgaaatccacacttttgttttggaggtttgactagcaccctgcaagatgccacatattgataaatggataattataacaaattaatagggactgttttggagaagaattgatattcccagctgttcagggtcctgttattgattgtgcagatggtggccattccccttcatttagaaggcctccactgtgaatatatgttaatgttaggcttttacacaaattgtggtaaagacactgccatttaagagccattatattggatttattaagcttgaacaggcttagtcatgaaggtacaaacagtattatattgttatggcctgcaaagtactctatccacattaaggactttttttaataggttgaaaaatttctctcaggagctctgcatgtgagagtagagttattatgctgtactttgcaggcattatagctcccaactttttgtgagtggtgaatgaggtaagaaagtaaagggtgcagccttgtaataagtagagattgcttgtcaagcct

SEQ ID NO: 2433 - DNA, 6000 bp, Homo sapiens
tggtggcacacacttgtaatcccagttactcaggaggctgaggcaggagaatcgcttgaacctgggaggtggaggttgcagtaagccgagatcgcatcactgcactccatcctgggcgagagagcaagactccgtctcaaaaaaaaaaaaaaacattacaaaaagccattacaaatatgtaaacttattaaagagtaagttgtctcatttgtatatttggttttataatagcaaagtggtctactttatttctagaagctgataatgcgaatattgccgacaaagccttaattctttggtttgtaagctttattttcatgatcaaactgggatagaaaaaactgtaataacctagggtgagctccattagagttattcattgtgctcctgcatccgtacagaatatctgtagaacagctttcattctcattgccacggggagtttgtccttggcacgaaattacttggcatctgatgatatgatactttttaagtgttctcaagctgtttgtgtgatgtttccctacatggacatgtaattttccagggcaggaaaacttttccctacaacgaccatgtggtgccatgaacagtgtttagcacacaggagtattcggtgcttaatgaccaacagacgtcctgaaacattgcattctgatttcaaaaccattttcagatttcatgttcaaatacacttatttccaaatggatttccattgtccagacccttggatgaattgtactggcttctggttagtgtagattcttagttatagaagaagtgatcagagtacttgctgatgactagaacaagacatagattaggaaagaaaatacatcatggggaaatgccagataattgcattagcagaactttgaatggaatccttcagaaatgtgtcatcctaaagatttacagggtcttgttttgtagctgcatgaattacaatgaagtaattagtacatacctattaaatatggagatacattatctacataatttttatgaaggtcccttttaataaatacactgtatttaagaggttcccaaattaatgtatacaaactagatagtaacttaattacacggttgaaacttctgtaataatagccccatcaactaatagcatctaccttcatttgttcaaaaaatctgtttaaatttgccagtgggacattgaaactaaattttagccctttctgctaagaagttttttttttttgaaggatagaaccatgcaatagaagagagtttttttattgctttctttatgggaattgcttcaaattatttttccaaagactgaaagctaaagtgcagcatttgggaagtgcatcttttaaagggtatgttttcttgtttggaggatgagagatttttagtagagcactagtaaacactgaatggtttattattatccagatccccctgtggcactaaatcatggctcacatcaataattacaccctcatcaaattttagataacccacgtcaccagctggctggaaattggtattgtctttgagtgtcggtttaacaaaggaattccactgactgcatatgatacagtacataacacttgaagtggtggcttagtgagatcatgaaaacagatcttttaagtttggtccttaatttcttgtcctttttattttaggcactttataatcagtatttacagtttaaagaaacagaaattccaccaaaggagacagaaaaatcaaaaattaaacgtctatataaattattagaggtaagctcaaatttgctttgtattgtcaagcatagtctttgttttgttttgttttcatttttgcttcacattaaagttttttgttttctcaagatttggatagaatttggacgcatcaagctccttcaaggttatcatccaaatgacatagaaaaagagtgggggaaactcattattgccatgctagagagagagaaggcccttcgtccagaagtagaaaggtaggccagaggtgttttctgccatgaatatcaagtggggagggggcctttgtgttcttgtgaaagaacttaagttaaacctctgtttacttggccttggataagtctcttaatccttttgatcctccattttcttacctagaaactcttctaagagattttaaggaggcaatcagtgaagtaatgtatataaatgaccggctaggctggattggtatgtgaagtctcatctaataaggctttacagttttaaaaccagtcaaaattacttgtaatttctcatattgaccttaagtcaccagggcctggatctaaaagcttataggacaacagctgattttatttcttattacatttttttgctatagttctctttccaaggggcattggaaaccaaaatctagcttgccttcatttaaagggtgttggatggcgtctagaacacactcagtaaatgttagttcaggttccctttctgccacgcttctacaagtggatttactccatgaaatcatcactagttctctgtcattttgtctctcactacatccagttgcccaggaaggtaccatttagtcttcaggaaatgcttgttggatgaatttgtctcccttacagtcttaacctggtacctgggaattgtgatctgtgttcctcattagccatgaagtctataggacctagaccttgcagggtgtattagtccattctcacgctgctaataaagacatatctgagactgggtaatttataaaggaaagaggtttaattgactcacagttacatatgactggagaggcctcacaatcatggtggaaggcgaatgaggagcaaagtcacatcttacatgtcagcaggcaagagcttgtgcaggggaactcccatttacaaaaccgtcagatctcttgagacttattcattaccatgagaacagtatgggggaaatcgcccccgtgattcagttatctccacctggccccacacttgacacatgaggattattacaattcaagatgagatttgggtggggacacaggcaaaccatattacagggtaaggcctgtgtggccagacacacctctccagcccccttgctctctgcacagtagccacactggctgccttacacctaaacattctcagatctcagctccaacattattttctcgagaaactttccatggttccctaggctagttcagatatcttgcttagaactctcatgtttccatgtattgttccttcatagtgcttatcttggttgtatttttatatttatttcggtgattgcttaagtcttgcctattccacagatatgagctccaagaatgtggagagaaacccttgttttttttctgtcccttgcgttgccagtgctttacacagcgcctgacacaacattagaggtgctcagtattgtcatgttctctgtgccttacacattgacttcaggattcaacgttgtgaaataatgcataaaataaatatatgagagcatgtctaacctgtcagtcctttattaaattactgattacatttatgttaaagtataataatatgtgtacataactggattattaaaaccaaaacaagccataaatatacaggatgcagcttttacggaaaaggtaatttgagtgattgaaatgagatactatgttaatcatttgaaataatggaaaagtattccagaggatacagagtagatttttagtcatcagaacagtagctgaattttaagatatgttcataaaagaaagcagagagtggttgagagttcagggcctagaagccactcaattttaaattagattattagctcagcctgcaaagttgtatgatgttagacaagttctttaaccgtctaagcctcagtttcttcatttgtaaacaggatgtaatagtgcctactacattgggtggttatgagtatgagatgagttatgtatctaaaatgattaatttcttgcacataataattacttaataaatgccaggtgccactgttattgttttgagctattctgttcactcactatatttgatgtggcactctcacacttgatcttagccaaaaggccaagaagcaattggtgtggcactctcaaatttcccctttcttgacccctgaaaagaaaaatatctattcttagagtggagaagtaacagtattattggaggtaggaaaatatttaggaggctggttggataaatgccttcatgtttcttcatgcgaattttttggcattgtctatgtattgcgagtaatagctatgtggcatggaagtgtatgaaaaacaaatgggaaagagccagtgttcttatgccatgtaatatcctatagaatggaaaaacaagcacagacaaattaaatttgtaagcattgcatcagtattctacttggcactttatagtaggtttagaagtaacattactgggagcgtgtcatataaagaaaggtaaatggatactttttccattaatttaacctaataaacaaatgacatggtggttaaaatggaagcgtactttgcttctcatcaaattcatttgtttataggtacttcataatttctagctgtttgccttccttacattattcagcacagacctggtcttttgcagaagtcagactatgattggatatttgtgttcttttagctaatgattggtattgccagaataatctttactagttgtcctggacatctgtgaggcatctgagttgttttttaggtggttgcaattggatgactcttagtgcaaatatttggcatatcctttccagtgacgcccaatctgcctgctttgttcatacttgtagggttttaatacaagctacaaaaggcaaacctcagctagcaaacgaatggctttaggctagattcttttgaatagttatcagcatattatttgctgtgtgttgcatatgcatgttgaagcatatttaaggagccactaaaagctgtaatattcagctgccacttttcaccgttagaagtagagctttttccagacctcctaccttttagtctactttgaaaggtgaaagaaagaacatcgtttcaggaataaaaatgcacagtagtagttatagttaccgtagcagtgattctgtgtttagtaacactaccagcactcgaaccagtcttgattcaaatgaaaatcttctcttggttcattgtggtccaacactgatcaactcttgcattagcttcggcagtgaatcctttgatggacacaggtattgaatcattggtgtgggattgtgttttactttttgatgggcagcacttttcaggaatggtgagctctttgacttcaaagggagaagctttattttattttgtctcatcttttaggttagaaatgttgcaacagattgccaacagagttcagagggacagtgtcatctgtgaagacaaactgattcttgctggaaatgctcttcagtctgtaagttaattttaggagccattggggttgtggtagaggagtcactgtgcgtttggatgaactaaaacttttacataatgtttggttgattcttcgtaatactctccactgaaacttaaagtttgttaaagattatgattggtgtttgctctcttgagagacaagaagagggaaaacatatttttgaaccaacaaggaaaactaaagaaagcccaagtaggcttctgttccaatatttgatgttttatatttcaggttgttttgaaacttgtttcacagaattaatactgagttcttttaaaatacaggattctaaaagattagaatcaggagtgcagtttcagaatgaagcagaaattgctgggtatatacttgaatgtgagaaccttttacgccagcatgtaattgatgtacagattcttattgatggaaaatactaccaggcagatcaattggtacagaggtaagagtgctacttattctttctctgtcctttttttgtgtaactgtttcatgggcatttgaaataggaatgtagagtatgaaaattttatgaaatatatttctt

SEQ ID NO: 2434 - DNA, 6000 bp, Homo sapiens
ttagctgagctgttaatgtcagggagagccagtaaccagaactggaagccaggaccccaaaggactgagggcattactggaatcaaagatattgaacctaagtgaaggcaataatttggcatgaagcgcagaaccagaccttgttatcagaattgggtaaagtctaggtagaactggccaaaaagttgatttcatatggagttcctcagtggctttgtcagggatcatttaagtagtcctaagtggatcagatcctagagcttttagcagagttgaaactgcaagaaccccagacgggaaagtcagaggtctattggagagaatcaatcacttcatcaccagctggtgaggtaggctgtgtctgaattttgaatgttagacgaaggatcactggggcaatggaaagcattcaggcttcggagggaggtagaattaagtttcgttcttggctcttttacttactgttgtgatgccagtcatgttactactttgagcttaaaaaaaaatgtgtttctgttcatcactttcctttttccgtccatcactttccattttctgtccataaatctttttcggtgacaggacctgtgctggagtctctctgaatccattctggtttgggggctgcctgattctcaaatcgttttttgctcaattaaattttgctaaattttaaaaaatgtgttttaggaaacaacatccattaaaatagatagaaatgagcagagtccatagtgagagagataagctgtgaagctgaggtagtgataaaggtcaggactcagttggggatgcaaaattgaatagaagaggtcacactttccaggaagaaagaaagggacttggacacagggcatagagggtgtaggaaagggatttgttaaagataacaaaactttttagcctgagagattacgaaacagtagactactgagagacacaggggtgatgctagggggaaaagcacttactttctgggtgggcttgatgggatggtgggatatcctgtgcctctgtctgctgagcagttggagacatgagtggagctgagaagccagaggtacagatataaacttggagaagttatcactacacaagtgatcactgattttatcggaaagaagggatcttcaggggacccaagagaagagcacagatggagaagagatggagcactaaggataaaaatttggagaaggcctgcgggaaaagattctgctgaggaaagagaaaaaaggagcatttggagagatggatgaagtaataggaaaatgtactgatgaaaccaagggaagagaatttcaagtagaaataatggtgagcagtatgaaatgccactagagaccacaagaaaattaagatggagtagaggtcaatagtttgttctagaaagaagacattggagacccaagctcctgggagcagagactagaaaataacaagccaaaagggttgggaggtagaagcagtgtatttagaggctgagtttgagaaaatttaaagcaaaagtcttcaaaaaggagttatatactaagagagccctttggggttcagctgcctttggaggagagaggaagactagtcacagaagtatcaaaagaagttttgcgggccgtgcacggtggctcacacctgtaatcccagcactttgggaggccgaggcaggtggatcacctgaggttgggagttcaagaccagcctgaccaacatggagaaacctggtctctactgaaaatacaaaattcgccgggcgttgtggcacatgcctgtaattccaaccacttgggaggctgaggcaggagaatcacttgaacccaggaggcagaggttgtggtgagctgagatcacgccattgcactccagtctgggcaacaggagtgaaactctgtctcaaaaaaataaaaaaagttttgcttctaatatactgtggcatagtgttctagaatccattgtattttagggctttaattataagatgatgtaacaaattatcaccaatattcataaattagaccaaaatctatttggaatggaacacatctatgttttggttaaatggaaatgttctctcttatttaaatgaaataactttttttagtatgacaataacttgagataagaattgttttttggttatgccaagatataaagatttatagcagtggtaatcatcctcactcagagtgactcagcctttttctctatactttacataaataatggaagcaatttcaaaagaccaattgttttattttaacaatatttgttatagcatcataaatggaatctgtttttcagtcaggctttctgaaggtaagcattatcattacagtaatcctatatcattagccaccacatgctagatccagagatactaaggtaatgaagtatattgttctgtttattgggagagtgtccatgaaattaactataacatagggtgatgaatattattggtgatataaatgaaaatagaaatgtatgggaaaggagcattgtagtgggatctgaatggctttagagaatgtaggaaattttcacagatactagagataggctttgaaagatgaatgccagtaaccaggcagactaagttgggccatttctgggagaggtagcagtgtatatggcctagaaatggacagctgcttagtttggcaggtgtattagttcattttgtgttgctgtaaaggcatacctgaggctgagtagtttataaagaacagaaaagaggtttatttggatcatcatggttctgcaggctgtataagagacatagtcctggcatctgcttctggtaaggtctcagaaaatttttcagtcatggtggaaggcaaaggggaagcaggattgtcacatggtaagagagagagagaaggaggaggaggggtaggaggtaccaggctgtttcaaacaactaactctttttttttttttttttttttgagagggagtctcgctctgtcgcccagactggagtgcagcggtgcaatcttggctcactgcaacctccacctcctgggttcaagtgactctcctgtctcagcctcccaagtagctgggattatgggcacgcatcaccacatctggctaatttttctatttttattagaggcagggttttaccatgttggccaggctggtcttgaacttctgacctcaggtgatccacctgcctcggcctcccaaagtgctgggattacaggcatgaactgccgttgctggcctcaaacaactaactcttaagtgggtaagaactcattactgtggggatggccgaaagccgttcatgagggagccgcccctgtgacccagacaccccccactaggcccatctccaacattgggagtcacattttcaacatggaatttggaggggacaaatatctaaacttcatcagcagagatggagggaaggattgggggagtgcagatcactggttgcccctccatcatgttagtacaaatatcagccattatacatttatagtctcttgaataatgtaccactcattacctttgaatacactgaaaatcaagttaaaaacaaaaaaaaatctgggaccttatttttaccagcttctcttctgggatgttcagtttttgctaccggagaatgtttttaaatgattaaggaaaattttacaatgcaggatctgttattgacaaacatctacagtatcattgctaacttgactaactgagtattcttacttagtaaaatataatgagttccatcttttgatcagtctaaagactacctagtgaaaggcaattattaatttttttagtagtgaaatgatttgtacttatgtgtaaatccatttcatgctattctaatttttttttttttttaccatatctatgactcagtgttagaaatatgcacaccttagataatcaagtctcatactgattcattatttttccagcaaggccctcataaaaactgtataatatttaactagggtatgattataaaagttacatataaagtttaactacatatatatatatgtatatatatatatatgaatgcacatatatttccttttgctaaatctttcatgctttaaattatataatttatctatttggtatcacattaaagtcctaataattagataaggtcatggcttggaaatttatattatttgaaaagtattataaactattttaaaagattgattttttttagaaacaattttattagagaattataagcatttagcacttatctctcctgctagctattgaatcagcttattattttttatgacttgttttgaataagagtcttaataaaatttacagagatctttgagcttttgatgtgtttgtgtgcaagtaccaaaattagttggtatttcttaagaaaaaaaaatatatggtagagggtagagagtctctgaaattcaatttgaaaggcactttgaatccaaatttgaagggcactttcctaaatctctcctgactggtgtttgctttctttttgctctcattcgttgaaccaccaaatagtttcaaaggttaagtgcaaacttcattagtgtatctgcatttcagaaaaccgaaggttaaaaacagtcataatcttctcatacagtgaagctaagggtttgccttgagagctcatcagtgttgtaatttgacagtgagcagtaatgtttgtctaagaggattggtggccagaaataagccacagtgtctaatgagacacggaccggctgggcaggatgccacggcatttcttgtgtgtgcctttctcataagcaaaatggcctcagactgaagaggatggtcataaagtctgtgtggaacagatgtcagagtggaattttcagacttaatggagaggatctaagtaagctctggattttgaaatgagtgaatctatggagctgtgatctcctacaaatcaaatggggaatgtctgtggatgtgtaagagctgagaaagaagaacaatatgtagatcctgccaaaactcctttgaaccctgaaaaatactctcctggaagaaaatatttcagaagaaaaccgatcaaaaaaactggaggtgacaaagagtcagttggggcaaacaatgaaaatgaaggcaagaagaagagcagcagtcagccttcaaaagaacagccagctcctttatccaggggactggtacagcaggaatctgttaccctaaactctgcactgggagatggtattcagcaaaagaagacagaagttgtagctgacagcgttaaacagaaacttctgccgagtgctgtaagcagttggtctgactgtgtgaacacttctcctgctaaagacagtgaaacagaagtaaaagttagtgaactggatgaaaggatttcagaaaaagacagcactccatattgcgcaaagaggaagaaacatttagatgatgtcaacacaagcgaaataacattccaggaaaaaactgatgttttttctttccgaaaggcagccagcttaagctctattccctcgggtatagaaagatcactcgaaaaaagtgggtttcctgaagacccaccaaaaagttatagcagtattcaagaaaagcaaaacactgagagattttgccctcatgcaacacagcattttcagtttaaaaaaaagagatgccattccctttatactagtatgtcctctgtttctaaggacacagatggaaatgaggtaagtgaaatgtggagtctgagttcaagtaaataagtgttccaggtgctcacatcagactgacatctaatttgtcttttataaagttattttcatattagtgtatgtaaaagccatagagtttctgttgcgttttgttagtagcctcaggtttgattgttatgattttatttttgtgctgtgcacattctttgaccacactttaatctaaaaatcctgtacattttcattattggtggaagactttaaaaagcactacagtaagagagtgcatatcttttgaatttttctggttcatgattcttgactttgcctg

SEQ ID NO: 2435 - DNA, 6000 bp, Homo sapiens
aaacatacaattgaaaattcaacttctaattttgttatatattttcatactcttcctgaaacttaccccctccctgaaattcaccctttttaggaaatgaggtgaagttcagaaatggtgtgaggatgtctatagtggtcattacttagtaataaaagagctgagagtttagtattttcatttgtttttaaggtcctaaaaatagaattgattgtgaaagtgtctattgagtcaaaaagactatgtggtctgtgggataccttaattcacccacatttagcaactacttattgagcccctgcaataaaatgaagattagcatacagttctgcctttaaaaagtcatagtttcaaaagagattggtgaatggacacaaacttacagttaaaagaaatgagtcctaatattccatagcagagtaggatatctatagttagcaataatatattgtatatttcaaaatagctagaaggaaggacttgaaatattaccaatacatagaaatgataaatgcttaaggtggtggatacctcagatactctgacttgatcgttacacattctatgcatgtaaaaaatacttgcagtatggtgccctcattaatatataaaatatcatgtatcagtaaaataaaaaagaataagctggaaaataaaggtcatagtctaatatgataaatggatgtgttgttaaacagttacaacgcggtaattattagttgttacagggattagttgagatggctataagcacctaaaattaaaagaacccagaggacagtgtaattaacctgaggggagaagggaggcatgggaggttcctgaaaggtttctgagaggaagtgccacttgaattgagatttaaagagcttgatggaattagggtgaaagggaagcccactttagagggatggaactacaagaacaaaggtagggagatgggtgtaaatgggaactgcaagtaaagtgtgttgctaagtgtgggatttggaagggaaagacagaaactgtaaagatgtttgtgtacaatcctgaggcaactggactatttatgttgtaagtgctagggaaccattgaaagatttttaagcaatggaatggcataatcaggtttacggtttggaaagtcatattagtgaaggcgtcacatgtcttaacacttcttattatttatttgtttatttaaaaatttatttatgagttgagggtttgctctgttgcccagggtggagtgcactagcatgatcacagctcactgccacctctaagtcctggactcaagggatcctcccacttcagcctcctgagtagctaggactacaggtgtgtaccaccatgcttggcttattaaaaatttttttttatagagatgggttctcattgtgttgcccaggctggactcgaactcctgggctcaagtgatcttttctgcctgggcctcccaaagtgttgggattataggagtgagccacagggcctggccaacttcacttttttttttttttttttttttttgagacagggtcttcctctctttctcaagctggattgcagtggtgtgatctcagctcactgcaacctctacctcccgggctcaagcgatcctcccaccatagcctcccaggtagctgggactaaaggtgtgtgccatcatgcctggctaatttttgtatttttgtagagacaggcttccaccatgttgtgcaggctagtttcgaactcctgggctcaagcaatctgcccaccttggcctcccaaagtactagtattacaggcgtgagccactgtgcctggcccaacttcacatttttagtctttagtgcttttgtatctgttgtggtttcatcatattaaaatctgagactatagtatgtttacttcttatctcctagggtcaatgtgagaataaaacaatgaaatataaggaaaggggcttttaaacacccattgtataaatgctttttacatatgagcaatacagatctgctgttgttagctacaggatattgtaagttgggtttttcagtcataaactacctgtaaagttacatggtttgtcagtgataatgctattttaagaaaaggatttttgtcctatccaaattcttcgaagttggaattgaaggatcaaaggagaatcagactttgaactcaggcagacttggttttaattccttctctgtccatgactagttgtgtttacttggacaatttaccaaacttatcttagcctcagtttccttatcaaagggtcatggttgtggtgattaaatataatagtgaatgcaaacaattctgctacctccttggcacatcaaatgctttataaatgatagcttacccatggccagatgttcttctaagcacttaatatggtatcctatttagacctcccaagaaccccatgaagtaggtactatgattttctccattttcagttcagaatctgctgagaaaggaagaaaaactttgccaaggttgtagtgtcaagaagtagtagagctaggatctgaattcaggcagtctttactccaaagtccaagctatttactgctacgcttttgcctcttctctatggaatacactattattattagcatattgacccaatgttacccttccaagaatgcatggggtaaaggctgtttttaaaaacaatcccaaatgttgcttctgctcattttgactggttccttaaatggatgattaaaattactgtgtgctgactatattcataaaactgggtgctactgggtgtcagtctctgatgaaggctcagacgtgccttcaatgaccttactcattgtaaaggagacatttttgagagacctatgtctatacatgtgtggtctgtaaatgaatgactttcagggacttaattgctaacccttttatttcaagaaggtgtcccatatgatgcctggttgttactttatgaactaatgtgcatacaaatgcatatcgagctgtaagaaaactctagtaaccttaaagacttactgggacagtggttcaaactcagattataaaccagtggtcaggatagaaaaaagagatgtggtcttgctttgtttggagtaacagaagtaggccaattgctgaggagtgctccagttctatctcaagtcagtttttttttcccacgagtacacaattttttctttcaagaggaactcatccctatctaagcattaatggaaaatggtccatagttcacaacacccaacgctaacaaagaaataaaaaatcatggagggcaaaaggtcagtatatgtgaaaggaggaaatagggaaggaagatttagacaagacgtgaagttgacataggtcagactgtcaacaatcagctgatttatctaataatagcagtagcaatgaggtatcatcctgtcactgtactccagcctggatgacagagtgagaccccacctcctaaataaagtagtaggtgcagcagctaatccttatataacaccagacattattctaaacttcatttactatacaactttatgagttaggcactactatcgctgttttactgatgaagagagtctcagagaggataagtaacttgcccatgtgacacagtaaggagtgaagattctatgtacagcagcctgacttcactgttttttttttttttgagacggagtcttgctctgtcgcccaggctggaatacggtggcgtgatctcggctcactgcaacctccacctcccgggttcaagcagttctctgcctcaacctcccgagtagctgggattataggtacccgccaccacgcccggctaaattttgtatttttagtagagacgggatttcaccattttggccaggctggtcttgaactcctgacctcgtgatccacccgcctcggcctcccaaagtgctgggattacaggcgtgagacaccgcgcccggccagtcattactcttaaacacatccatttacatgcctgggtatcagttggttcctccaatggacgcttaaactcacccactttagtatatgatacacatatatctaatttaagggaactgtatccattttactcagtttaatggatactagtactatgtagaatgaataataaggagagagcaggagggaggtgataaatatggggcagttgtgaacctataggcccgccgcggagcccagcagcagatgcgcctgtgggctctggggggcagaagggagggaccgcaggctggtactcggcagcctcgcggcggccgggagctcaggcgcaggcgcggcccggctgtcaggcgctgatgcgcggggccacctgcagaggcctcctcaccctgtccccgggatgtcccctagacgcggacccccgtgccctccttgccctgtgctgtcacagagtgacctgaatcctcccacgccaaaaagatgggtggaagaaagtatttccaaccctccccccgatcatcccttacccagggagagccgctggcccctcagcagggggctgcgcacagcggtggagcgatctgcggctttgtttctcaggcacctgttgtggatcccaaatagaaacgtcgcccttggggatccgggaccgggcagccagtgtccgggggtgggcgtgcttggccgcacggtccaccagggtgggcgggcctggggagggggcctggggcgcgtggctctgcctgggagggaggggccgagaggcgccggggccggagctgagccagccggggcgctgaccgccgcgctcgccccctcccttccgccctccgccctccaccctccaccctccaccctccactctccaccctccaccctccaccctcctccctccctctctccccggcgcgggcgagtgtctgcggcgcggcggccaggaaatgccgcagatgcgccgcgcagcatccccggtgaaggcagcgcgccggtcctcccgcaccgctgccgcggcctcggcccggcccgaagcacgcgcctcgtgcagggccagcagagcggtcagcgcggccgcagagggtccgggcgcccgccggcccccgcccgccctcgccgcacgccccgctcctccgcttggcgtggcgctgctcgtcgccgcccctgggctcgctgagatttgccgctgctgaaacccgagagggactcgggctcccggagccgggcggcccaccatcggcctgcccggaggcctgggcgtttcctttgccggccctggcgccggcagccccctgcgcccccgctctgcgtcttcggcttccgtgcttctccccagcgtgctgctccttcctcttttccagttcccaaggctgtgtcttgctgactgcgatactgtccgggggttacgagggggagaggggaatttgtcagtcatcgcttagataaacttcggcatggcgggttacctctcccctgctgcttacctgtacgtggaggagcaggagtatctccaggcctacgaggatgtcctggagaggtacaaaggtatgtggtccctgccctggggctgcggagcttggcactgatcagagaggcaaccgctgcctttccttaatcagagccaccactccttgggcacgagtaaacaggtgtctggaccagtcttgggaatggaccaggtctttttgcacgggatttagtacccccagcgcagggaggatggtggggtgggcgacagtccggagacgcccttagatgagcggtagagaggggggaagggggttgtttccaagaagcacattgcgttttctctcccttgtaaaagctcttaagcactacgcgtaatcataattcttcctgggagggtggataccgattattctctatgggattactaaggcattgctgctgctgcttggctagggtattggttagccctgtagaaaaggttcagcatcactagatcattttccttaaaatgatctttcttatttgataaagtttgtgactatatacttactctgatatattgtaaaaattattttatagcgtgatggataaaagactttagtgagtttgttg

SEQ ID NO: 2436 - DNA, 6000 bp, Homo sapiens
ttgtctaataaacaacccagttccatgttcagatttccccagttgccccaaaatgtctttttagcttttgaaaaagaatcaacccagaatccaaccaaggttcatgaattggttgtgtctcttttgtccttttaaatctagaacaattcctcctttttgagtgtgtatgtttcatgtcattgacctttttgaaggatctaggacaattgtcttgtagaatgcttcacaatcaggatttgtctgtttccttgtgtgctttctatttttgggttttttttggtgaatattttgaaatacacatacagaaatgtgcttaagttataaatatgtgggtatgtgggtttatgaaagtttacttttcagcctctgggattttaaacttttggctactttgcaaacccttgtctctgcacttttctccgttgcctgtagagaatgcctattgccaagacaatttcttggcactttcctacagatcagggtgctaaggctgggcggcatccaatttaggcagttccattgtacttatctcagatcccccaccggggtttcagttaaagaagttattgttcagttccccttctaaaaatgttgcattatgtaattatcctggctttaggagatttgggttgtctttataccatgcgaatgaatgggctatcaggaaagtcattttaaagcttttggtgatctaattcaattgttaaaactgctttaataactaggttgtagaagacacaatatagtaggtccttgaataatgttgttttgttcaatgtgtttttgttaataatgttgatgagaaaaaaaaatgaattcctggctggggccactgtcagtggagttcacactttctccccatgccagtgtgggttttctgtggatgctgcagtttgctcccacattccaaggaagtgcacattaggttaattggtcccattctgagtgactgtgggcatagattatgagtgtaccctgccatgggatggtgtcctgtccaggtgtggttcctgccttgtgccttgagctgctgggatgggttcacccttgatcctgaactgtaataagcaggttggaaaaggaatgcatgaataaatgcaaattattataaaataaaaatttgtaaggtctacaataatcctacaaatgcatgacaataaacaatgtggtatgaaggtactcagtgggtctgccatatttgtgattggctttgaactgcatggcagtaggaggtactccttatatttttcactttgcaaacatttattccttgatttaaccccccaccccgatgactgctgtcatttactgattcaccaaaaattgggtaaataattatcttatttgtttttattaatcttccgtaaatgtatgtatagctcacgttgattgcagtgtttaatattagaagtgttttggtctttatttagaagtttggtgatatttttatgcccagaaatattatttgttgtaggaacttaactctcatttatattaattagtctatgtaaaattggttttattatatgtcctttgacttaaagcagcagtttccaagaacctattgatgattttaagtgaggatttactgtactgggtttttggcttgtaactatctagtgcttttttgtttgcagagattcagtatcagtccagaagtggctcatggtcatttatgaaaaaggccaactgttaaaaagtattatgacgtaggccagctttatcttcactaccctaattactctgcccccttgttggtatggttactccacagctctttcatgtatctcttgttttcagcatacatgccaaatggggatgacaaatgatggtgtgaattggggtcttaacctggggtcagtgggtcagttaatcccataaaatgatatgcaaagtttgcatgtattgactcttgtactttattctggaaagaggtttcattaacttttcaggggtgcctatgagcccagaaatgttaaaaacactgacttagttacttcttcacagagttgtccatattttctctgacccttgacataaaatctttttacttttggtaatctttttatgtgcttgtattggattaaaatattataaggaataaaattaaattcattcagaatcttagtcatcacccaaagataatcgctacttacatatgggtaactattacatgtacatgcacacgcacatattttaagaaatcattctttatgaattatttcttctttactaagtgtagatcagtaacatttttgtttaattgctatagagtagactatggtatccatataactatatttaaacagtctcctattgatggacctagctaccgaatttgtattttaataggaatcaaaccttaggcaacaatagtagaatactagataggaacctggggcttttgttgattacaggagccctcttcctttgtcctacctttctaagccccacatcaaaggttaggctctggcctttgggtgagagaacatatttgcttttcttaaaacaaaagggaactgtagttccgcactcttttctagcccccaagatagtaacatgatttggcaagtcatttcaaatcaataaagaatataataggttttctttaggatcaatccactttaaagcagctccatttaaatctgtttccaattttcagggttcaaatgggcctacttttatatagtttaccttatatttttaaaaagtattcatgaaaatttttgtgggaaaaaatccgatactttaattgttaaaacacttggatcatgtagcctgggagagactttgccacatataaatatgtatgatttccctcagtttgtgtgtgtgtgtggggtccatattttcctatgatatattgttgaaagaagtgttgttgattgtcttttcctctttttctctcttatctgtttaccaatgacactaccagattagaggctgcaccagtcaacacccatgggtccatgggtggtaactgttcccatctggctatgagtgattaatggtgtttatgtcgtggcataaatcacatttcgttgttcaatcagctgagactcaggccattaaaaaaatttactctacaaaaatcaataaccagtggtttttggaaaggagcagttctttaacagttattctccaagtctgtctgtaaagataaataatcaaattactatcctcactaaaatagtacaggtaacaagaaatataatctcacagataaaggatgaccttaaataaggacagataggaagccatttttaggaagatagaaagcagccaaagaaacccaataccctcttaaaagtctttaagaatgtcacccttttatgcagagccagccaaaaacaaaatctcagaaagctcaagatggattttcagaaaagcatggaaaataaactgggttgataatagcatgctgtgactgacctaatgccactcacaactccctatggattgtagctacaatacagaaaatcaattttatttactttttgcctcaagtttgcctaatgccttattgtcattagaaaaatatacagactgtaaataaataaattagccaagatgatgaaattttatgtaaaataaaatggaagacagcttttttggggggaaagaatagagagctacgtcttacatacctcactttgtgggaaatattacgtgaacttctaaaataatggggtttacacctactatgtgcccacaaaaaagaaaaataaataaaataaaataatggtgttgaccatgcatagccacaggcctaaacagattgaggtaaggttggtagtcctgatgcaattagagtttatttcacgtacctagggtgagtgttttgggatgtggctcacacagcctgtttgtgctgcagttgccactgcttttgtgggaagcccagtgtttttgctcaaattggagcatgcctcactgatttctgcctgtaacttgcttcttaggaatccatggctgcaagttacatttcaggaattcgagttataccagttttgcatctttaccatgagtctcagcgaagtagaattctcagtaggaaagtcaagacttccttttgatatgtcgttatgtttataattttgcagcagagatagtcaacatccttgtttccttagtaagccagtggctctgtaaataatcacaaacacaacccaacaaagaaggaaggaataacatcttgtgccttttccctctatggaagatattaacacttttatgcaagacatgaccctacagatttgctccagctagatgaagggaggactaaccttcaggcaaagtgctttggcaaaagcatcctgtttctcatttcactgtgtaatgaccaggagctgagaagagctctgtttcctgtcactgcgcagcatcattctcatttacattattggcagctgttactttgctggaagtttaaattatcttgagaactctaaaccgagttcagatgtttgtttattggtgctgccataggcttctgaaaacagtcttttgtgttctcccagtcttaagaaaaggctcttctcagaatcagcccttcctccctccttgctcttttctgggaacctgcttcagtctcatgaagaaaattaaataaagaggacaggggcttaaaactggtcagaacggagtctccagtggtgaggtgacttgaagcggaaaggagttgggactcaacatcctgcatttgtgctttgttttcgaaacttcgagttagttgcattgatgaattaagcagcaggctagtaatggaaaatatttctactgtcctggtgggggagccaaatactataggtttgtaacaggaaggctgttgattctggcttcattgttgggccagtcatttgtgagctggtggccggaccacaggccacacacttcttccgtgcaaatcttcatgtattgaaactgcctgtgtattgtttttacgattggagacttggccaagaaaagatggtgagctccgggttttatttttttggtttctgcatattccctcagctccgaggatggtgcaggatatgccagacccagtttgggggcagggagggcggcggtggttggtgggggagatgtttaaatcattgagcatatgtgagtattttgctgttaatgctttttctgtgtcattctctgtagagttccgggaacgcgtcctatcgctgctctatgtcttcctctgcggatttttccgatgaggatgatttcagccagaaatctggctccgcatccccagctccgggagacaccttaccctggaatttgcctaaacatgagagatcgaaaagaaagattcaagggggctcagtgctggaccctgccgagagggcagtgcttcggatagcaggtaagagcatctggggaaggggatggagtgggggaagagagttgcggaaattcgcccatctacctcctggggggccatagcgggagctgatgcactgggcaggaatctgtgctcaaggtgggggaggatgatgaccatgtttactttatgccttgttttaccgatagagccatttgccctgcctgctggtgactaagctgtttggccctgccttctggttggacgaatcgattcctttgaaatgcaaggaaatatttacagacatttgcactaaactttcctaattactgcattagttaccataacattctgaaagtattagctccagtgattgctagtatatttgcgggaagctggaagtgagcagcctttattttcatttttgcccaggggcactgagctacgcagattgagaagatccatggtttttggtacccaggattgcaaagcatattccagcaacttggatgttgtttttctttaaatgtagcatctctgtctgcatcattgtatccatagcagctttctgtccttagtgcttttgagggtttggccatcacgccttcctgattaattaatacatgagatgtgccaatgtttctgttctgtgttacccggtgttcccttgcattggccct

SEQ ID NO: 2437 - DNA, 6000 bp, Homo sapiens
tttattttagatgaagtaggttcttccagatgatatagctcctttaccttttaatacaagcacatgtaaaacacttcacctagaagcaaggaagttaccaggccaaaatcaatatgctttatttctaataatttattgctagagccattcttacctaagcttcttgttttcaaggggtaatatttcaatgtaatgtccttgtgtgattaccaactgggtaatttactcacttccagataaattggtaataatcacagacaacctaggctacattccaagacattccttatctttccctaaaagtcatttttcaagtctgagtactagtagccagattagatggggaagaaaccatgggcatggagccatcctaactagtcaggctcaattttcactctgcagagtctaaagcaacctgagaccagaaagagctagtctgttggggggactcaaaattgctaaatcacaaatccccaggagaatgtcctcttctcccttctctttaattatttctctccctcttctggctccatctcccaaattccctagaaacttgttcaaatatccctagcctgacaaaataatcaccattggcctttattcaggatttaattgcttttctactcatcccctttagagttaaatttctgcaaagattgtagacaacaaccctctcctctttctcatcttcattcccccctcaactcattaatgtctggttttagcctctcctgccatgatgaatcagttctctgaaaggtttccggaggtctcctagtcaccagtcctcagtccttgccctccttagactcccatttgtgcatctgttccagaaagccactaaattggaacactccctacttggcttcgaccactttgctatcctccaggccagaaatggaagccgtctccaaagttctgattctgggatgctctttagcatctattccttagtcatttcctctatttccattactccaactacaatgttgatgactccctatctgtttttggttctgacctctccacatttccatgggcttgctggatattttcacaatgatgtccttctgaggcttccatctcagtgggtctaaaatgcagtttgttatcttctccttccaaattattcctctaccctagctcaaaacctgagttatcttcagttcctccctttttctcaactggttgttacacagcttagggtggaaacttttcttctttctgatgtttcttcttgatccatacattaggaacttgtgccacaactttctgcctctaagaaagtactgaggaagatgtttctgccgcctttttaaagcaccttactcactgctatcttttgggaatgaaaagacttagtgatggaaaaactcaggagggcctactacccattagtgggcaggagtgatgtataaaattcccttctcacacatgggcctgtctcttgctcacacatgctgaacgccttatggattataaagtgtcaggcttccctttgcctttggtgtttatgccggaatttgaacaggttgggttccttcctgccctaatgctggggaggcctgtcatttttcagctgtggactgggtgagcatgccaagtaagaaaaaaggaataagatgccccattttggctttgaggctaagctgtgttcttcaatctgactttatcttgaatagagttaacacaatattttaatttccttatggttccttgtgtctattcccaatttggttgagaatctaaagggaagaagggctatataatggaccatcttctacatacgtggtatcaaactctcttagctatctttcccaactattttgtcttcttttgggtgacaatgataacttactctcataaaaaaagtcaacaaattatacatacttttccattatgaattttcatttttttgtatgaaagatttgggccatggctctccccctccatccctatcctcaaacttaacaattttttttgtgtgtgacttttatacaatgtcaattattctttttttaaagcaaaaacctaccaggaaggcaaggtataatttctactaaattaacttccaaaaagcactgcttggctgatttagtatttattgaattccgcaatgcattaggcaccacataaacacacagacagaagcaattaatactatgtatgctgttatttggaaaaaatgataaattagcaacaaacaaatcagaaaataacaatggaactaaatactaaattctttcaaggatttggtttgtttattattagtatctttaagacaactgatggaaagaacagaaatgaatgcatctaaaaagaaatatctataatcctattgcatggcagttaagcatttgcctgccaagagagataaatgatgttcttgtgtgcacttgaaacttataaatggctgcagcaagacgcaggatgataacagttgtgctaaagtcatagctcagaaaaccataatagctatttagttgctttttgttgttaaaaaaatatagcgtttggggcaatttgaatactattctgtgtgtctttgacatgtttctgttcaaggatacgtaggctatttcagctcacttacaaatttcagtcaatgagaagcataaagatgaccttccaaaattctgttagttatttcccccaatgtctgcacacggttagttcagttttgttgtttaaaattactccaccatgccattgttgagtcaatgcggtggagaattcttcctttcctgatgtgccacacattgcaaactctcaggattttcttcaataacctctgcataattgttgaatagtttctcactgcagtgggctgcggtatcaagaaacctttagccatatgcacatgatgtagtgctacctgtcacccactctgagtgctagagacccatgaagcctatcctggaattcagtgcagcctacatgctgccattcaaaattcccaccttatgcagtgtctccaagcaagggcccttctgagttcaatccaaaacaactgaatgaatgagatgcaacatgtcaacaattcgaatgtttattttgtttaaggaaaccagctgtaaacaaaacgtatctgttgttttccatgcttatgaatctggcactaagagactgcattaaccaatgcctttttaggtttaatacttacacacggtaatatgttactggctttaaggacatcaatgattaagctttcatgcagagctgtacggttttgtatagttggaaaacaacactgattttgagatcactacaagcaaataaaacttttattcctcccaattatttacctgcttttcaaatttttataaatttttatgacacaatttcttcagtctattaaatattccaaaaaagaggctaatacagttgttataagaaactccgcaaatgcagtcaagtgttaccttgtcactataattaaagttttcttatgcgagtaaatgaaacaaacaatccagccccacacagggaaagccagcattgccttgggggcagcagaacgcggcacagcaccgcccgccaaggccgcaagatgccgcagaatgactgctgcagcagccgcttcctggccaggtggccgtggccgtccgcagaaaggcacactgcagcgctctcgctataccttccgtgctggcattgcatcagtgttaaatcccctggccaccaactgccatatactttttgctggttatgaagaaacgtggggaggggacaaaggggagacagagtgtgcctgcaagtgtgagagatcactattgcctcacactccctaaaaaatttctcccccaaatgtttataagccaagtaccaacttacttcatctgccaggtccctaaatctgaaatcgccttgcccttcaaatgcactaaatgagtcagggttttagggcaaacccagggatacaagaagatcgaaagtgcccaattcttagctgcgagataagcaccaagtttggggtggaagagttcacctctgccgaccagagcgtactaccccggagcgctcctagtttagagaggcttggagaggagtgggcctcccgttcctggagtatcccaattcccagggaaggcccttcccggcgctcgcgcttcagagtgcgaggaaacccccacaagcaatagctcacccggctgcattcttcaaagccccaacctcggggcggggcgcagggaggtgggaggtggagggtagcaccgccgggaggctcctgtcagcgcctctcggttttccccctggctccttggcgccccctgacgacgggctccgcagcaatttggccgagggaggctggataggcggaagctccgggtgtccgggaagctagaggcacccggccaatgcacccgcggacggcgcggactggcgggcggccccgcgggagggcgctgggctctcaggcccgggtgcagcccgcggacgccgccgaaaccgccgcagccatgtccgcgcgcccgcgctgccgcagcctggccgtgatgtcatcagccgagcccccgccgcggcgccccattcccgccccccgcaggctgccgcggctgcagcctgagcgccgcgtccccgccccgacccacgtgcgcccggcttctgggatgctgaggtcggcggcggccgcaggacgatgcgcggggcccgggcggccgcggcggcggcgctgctcctccccactcgccgcgtccccggcggggctgcgcccgggggctgcgcacggacgggggcgggggcgcctggggagggaggggagaggatcccagccgccgagtcgcagcctcgtcgctgtctgctgagtcatggcaagcgctccccgcagccctggatcactcgcgtagcgcggctggcgcggggtgcgcagccattgggctgggcgcggggccgcgagcgccaggcatgacgcgctgagccgcgctcacccgtgcccgccgtcccggcgtgcgcccagcgcgggtgcctgtgccgccgccctccagccccgccgtcgagtcgccctcgcctcgcccgcaccatgatcgccgcggctttcctcgtcttgctgagaccctacagcatccaatgtgccctcttcctcttgttgcttctgctgggcaccatcgccaccatcgtcttcttctgctgctggcaccgcaagctccagaaagggaggcatccgatgaaatcggtcttctcgggtcgttcaagaagccgaggtaagacacgccgcgacgggtttctgcgggctaccaggaacaattaagccgatttggagagtgaagcgcggctcgctcccttctcctcggctgcccctagccccatcattgcccactccccaggctgagtgcgtttctttaacgccccttgccctttttgccgtcacctccgccctccagtctcccaggtttgaataaccacggcgatgccgagggcagggaggggaggaaagaactcaaatttttagtcagtttgctaaagccttaagggtaatttgagcgtagtccggggctgcgccagcctcgccttcacgcatccttcgctggagcgtaggggtaagaaagtaaggcatggaaacttcggggctccccaactcccccagaactttcatgcaaacttctcgcggagaaatcacgtagagaccgatggccccaggactcctcctccctcccccaggatgtcccaccgaattccaggagtctgcgatgtgctttcccaaccctggtctcccaggtaagtcatgagtcactcggtaggtgaagaacaaggagttaaatgaagtctcatttatctcttttctccccagatgctgttttgagatcgcaccactttcgttctgaggtaatttatttagcgcgcacgctcaaggtcagaagaagttctctttcctgagtaccaatattaattatatgcgtgttaagaaaccagtaggacactgaatgacgaacatgctgtcccctagccgaaagtggcatgtttccttttaagtgatttcatattagtgcccagcgaacggtt

SEQ ID NO: 2438 - DNA, 6000 bp, Homo sapiens
aatttccttaaaatcaggattgtcacagcctgactttcaccacaggaatctagggtaacagtttaccattatttaaagtcacagcataaagcattataaatcctcaggaaaagtacacttcttagataacaggattctagaaaccagaatgaacgcttggtttctagactgtcttgctacatcaatgtgaaatcacttctcttcattagctgtttagcataacaagaacaaaaacactgtgtaagtgtttaatatgcatacataaaacacatatttctgtctattactgaaatgaagttacactgttcaggccttgctagctgcattaattatttcacattctcatatgctatttatgaacatttagaagactactaaaaagctagtaaagtttgcaagtatgtgaaaataaaaagggttggcagttatggttccaaaacttattataaacatctatattacttatttctagcttcatgaggaagaaactgaaaaaatgtgtttattatatacttagtgaggagaaaatagctggagctcctcagatgaggaaggtggcttttttccctactgcagaactttcccaaagcaaactgagtcctggtgcgatgattttttctctaggagtatttctctgactacctgaaaaggaaccggctaaaacttcctgtgcaattggactccttcctgggcgtgtgggtaccagaagcaatacattctgccaagtagagcatcaaagtactcactgaacttcttcatctgtacaagggctagcccaaagctttttcatggttcaaagtgagtcagcagatcctaaactcattttcctcctttgaccatggtagaaatgctgaaagtgagttaatctacttactgagaatggaaggagaaacagaaagtactaaattcttagttcaatatgactatgatttgtcagaaatcaaaatattttcttgaataattattttgcagcagctactactaaaaagcaacaagaatattcattatgctacacaaattctattttttaaaatatgtttaaaaccaagtaaattcagaggtatttctcaaagagaaaatcttgcagaaaatggcatcttgatagaaaagagaaaagaaaaatattccctatgttttccttaagggaaaatatttcatttatgtaagcaaagtagtgatgaaacatgacattcttttgcaacacagtcccataattttcacttataaatggcattctttgagtggtttatcaaaacagcttgctgatgggtagcccatcaacaaattaaactaatattgcatttaaatttttcagaaaaaaattcaaaccgaatccattttgtttcaatttgtgacttacatttttagcacaaactccagggcaatttttaaaagcctgcaaagatccagtaagagttgagatttagcaaatgttgaattctgagcgatgtcctgagaatgtgcatttttcttttctgcccaactctgagttctatttgcccagtttcaggaactagcacccactaggagattttttttttcattcattcattcaataaatatttattaataacccactgtatacaaggcactgagccaaatagtggggatacagccctaaacaagaaagatatggtcctgccctcaaggagctcacagtctagtagacaaggcaaataccacacaaagatgtcaaactgtaccaggaatcttatgaagtgagttaaggcattaaacaactacccccagctttcctaaccaaatgcaagctcagaacaaaaatattcaactgagagataattaaacaagacatagttgtatctcattttttgtttgtgctttagctgaaatatctgatggctagtataataatccaaaacaggattattattcttgttctatcatttatgtgtgtggaactgggtatctctttttaaaatcaaaatcttatattttggtgtttgcactctgtcaattatttacttctcatcacatctgaatgggctgttctattgaattaatctcatattcaaaaattgttgctttacgatagtcccggtttttgatgttttccataaactttaattaagtaatttaataaagacttggaaatttgcaaacattatcgtttatttttatacattttaaaattcaattttacaaaatataatgatagctaccaaatactgaatacttattatgaactaagtgggatttttctttacacaatttcttgtaatttcctccaccctcccataaccctgcaaggtactaatggccctatcttacagatgggtaaatcgaggcaccgagatgtatcacacagctagttaatgtaaagccaggaatggaacctctgattacctcacttatcctctcaagaatcctaaactgaatagagttctcaccttccagggctatatacagtagaattactctttgtgcaacattttaatgatattgcaataatacagttaaagtttttaagcaactagaacccaataaaacatctagggtggcataaaatatctgattaactaatgaaatgaaaggcaagataacttcaggtaaatggagggcgtttaactatgaagtctttgccaacatgagtaaactgcaccaagcagcaacctccaagcctggcggcgtgcaactttcctaaaaagaggggaaattatcttaggataagtggaggttggcctgaaaactcctaaagaaatcctaggtcaaggagcgcttgtgtttcttcagtggagctggttcctgggtgcagtgattaggagttacttgccctagagggatggtccacgttttgagagtggagactagcacaagcatttaagcacacactaccatcatcgctttgcaaaaatcatcagatggtccccaataaaacatggagagctttaggagaaaacagaaatgtaaacttgaaaatcgaaaatgaaatgcatatggatcaaattgttctgcactaacctcttcgtttatccaagtgaacaaccagagtcaactgacagcacccagaaaacacttccaccagcaaaatataaactgtaaactcaagtgacatccaccctgtggctaagttttttaaggtctgcagcacttttagggtttgccttttcccctcttgtacaacagctccactacacaagaaatttgctaaaaccgttcgctgggcactaatatgaaatcacttaaaaggaaacatgccactttcggctaggggacagcatgttcgtcattcagtgtcctactggtttcttaacacgcatataattaatattggtactcaggaaagagaacttcttctgaccttgagcgtgcgcgctaaataaattacctcagaacgaaagtggtgcgatctcaaaacagcatctggggagaaaagagataaatgagacttcatttaactccttgttcttcacctaccgagtgactcatgacttacctgggagaccagggttgggaaagcacatcgcagactcctggaattcggtgggacatcctgggggagggaggaggagtcctggggccatcggtctctacgtgatttctccgcgagaagtttgcatgaaagttctgggggagttggggagccccgaagtttccatgccttactttcttacccctacgctccagcgaaggatgcgtgaaggcgaggctggcgcagccccggactacgctcaaattacccttaaggctttagcaaactgactaaaaatttgagttctttcctcccctccctgccctcggcatcgccgtggttattcaaacctgggagactggagggcggaggtgacggcaaaaagggcaaggggcgttaaagaaacgcactcagcctggggagtgggcaatgatggggctaggggcagccgaggagaagggagcgagccgcgcttcactctccaaatcggcttaattgttcctggtagcccgcagaaacccgtcgcggcgtgtcttacctcggcttcttgaacgacccgagaagaccgatttcatcggatgcctccctttctggagcttgcggtgccagcagcagaagaagacgatggtggcgatggtgcccagcagaagcaacaagaggaagagggcacattggatgctgtagggtctcagcaagacgaggaaagccgcggcgatcatggtgcgggcgaggcgagggcgactcgacggcggggctggagggcggcggcacaggcacccgcgctgggcgcacgccgggacggcgggcacgggtgagcgcggctcagcgcgtcatgcctggcgctcgcggccccgcgcccagcccaatggctgcgcaccccgcgccagccgcgctacgcgagtgatccagggctgcggggagcgcttgccatgactcagcagacagcgacgaggctgcgactcggcggctgggatcctctcccctccctccccaggcgcccccgcccccgtccgtgcgcagcccccgggcgcagccccgccggggacgcggcgagtggggaggagcagcgccgccgccgcggccgcccgggccccgcgcatcgtcctgcggccgccgccgacctcagcatcccagaagccgggcgcacgtgggtcggggcggggacgcggcgctcaggctgcagccgcggcagcctgcggggggcgggaatggggcgccgcggcgggggctcggctgatgacatcacggccaggctgcggcagcgcgggcgcgcggacatggctgcggcggtttcggcggcgtccgcgggctgcacccgggcctgagagcccagcgccctcccgcggggccgcccgccagtccgcgccgtccgcgggtgcattggccgggtgcctctagcttcccggacacccggagcttccgcctatccagcctccctcggccaaattgctgcggagcccgtcgtcagggggcgccaaggagccagggggaaaaccgagaggcgctgacaggagcctcccggcggtgctaccctccacctcccacctccctgcgccccgccccgaggttggggctttgaagaatgcagccgggtgagctattgcttgtgggggtttcctcgcactctgaagcgcgagcgccgggaagggccttccctgggaattgggatactccaggaacgggaggcccactcctctccaagcctctctaaactaggagcgctccggggtagtacgctctggtcggcagaggtgaactcttccaccccaaacttggtgcttatctcgcagctaagaattgggcactttcgatcttcttgtatccctgggtttgccctaaaaccctgactcatttagtgcatttgaagggcaaggcgatttcagatttagggacctggcagatgaagtaagttggtacttggcttataaacatttgggggagaaattttttagggagtgtgaggcaatagtgatctctcacacttgcaggcacactctgtctcccctttgtcccctccccacgtttcttcataaccagcaaaaagtatatggcagttggtggccaggggatttaacactgatgcaatgccagcacggaaggtatagcgagagcgctgcagtgtgcctttctgcggacggccacggccacctggccaggaagcggctgctgcagcagtcattctgcggcatcttgcggccttggcgggcggtgctgtgccgcgttctgctgcccccaaggcaatgctggctttccctgtgtggggctggattgtttgtttcatttactcgcataagaaaactttaattatagtgacaaggtaacacttgactgcatttgcggagtttcttataacaactgtattagcctcttttttggaatatttaatagactgaagaaattgtgtcataaaaatttataaaaatttgaaaagcaggtaaataattgggaggaataaaagttttatttgcttgtagtgatctcaaaatcagtgttgttttccaactatacaaaaccgtacagctctgcatgaaagcttaatcattgatgtccttaaagccagtaacatatta

SEQ ID NO: 2439 - DNA, 6000 bp, Homo sapiens
tttaattcacaagcattgccagaggtatactgggtgtccactgtgttccacacactaaacatgagtaaaacaaaaggcaggtcatatcatttttgctcaacctctgcaacggtacccagtttgacccaaaggaaaaccaaaaatattgacaagaccctactaggccctaaatgtctaccactgcttactcccatccttacttctctgactgtaatctccaactcctttctctgcccactcacccacctgtagcctcccctgaaatcctccagacaaatccttctacctaaggatattggcctaccccagaagcctttctccttgatacctgcttaactaactccctcacctctttcaaacattgcttaaatcaccttcacagcctgctctgaatactcaattcaatactgtagtatggcccctgggtcacaccctgtgatttccatcctctctccctgatctttttcttctttccagggcacttgtggccttctaacattctatgcaattgattgattggttggctgattgattgattgatttttaaattgtttcttcctaactataacataagttctatgatagcaagagttttttatctattctgtttactgacataccccaaaatatcatagaactctgcccgggacagagcaggcattcattagctgcatgttgaataaatgaatacaaacaggatagaaatttttaagcatactcattgatccttgcaataaaactgtaaatttgatatcattactaacttatttttacagatggttaaattaaaaacttgagaagttaaatgatttactcgtatcataaagttagtacatgaccaagctgacactcaagctcaaaactgtaaacattttcacataacacacagcgatatcagttttatttctttaattaaataattatttctcaagtacttatgctatacaaagcatcatattgaaggaatagtaaagaggaataaaatatggaacttgttctcaaggagctcacttactgtctgtttgataggtttttaaacgagaacactcaatgagtgaactaggatcggtctggtcatgcagctaaacatgcagagtttgtgtttgtttgtttgtttttgagacagagtttctctcttgttgcccaggctggagtacaatggcgcaatctcggctcactgcaacctccgcctcgcgggttcaagtgattctcctgcctcagcttcccgagtagctgggattacaggcatgtgccaccacgctcggctaactttgtatttttagcagagaggaggtttctccatgttggtcaggctggtcctttgccttgaccaacctatctcagctccttctgtggtttctagttctaagtttttagcataaataacaccttctctaatatcttacattttattttctgagacaatgaaagactatctccatcctgttttgttttaaaatattctacagcttgtaattagggtgtagttcggtagttagaaatgctttcattgcccttatcctatttgttctgcaggtttctcgttttccttagatttatagactggacatgaggaaaataaaaaataatcagaatacttcaggcaaagatttcaggcgttcaccaaagccttactgtactagatcttagcaggatcttgtactagaaacttagcaagtgcaaatatactaagacaagacattaaacagtaagtgcactagatgaaatacctgaagagaaatatcaagtttcctccgactgcatctccctctgggtctcttaataatggacctcatcaaaaccaaaattagaaattttctatttcagcatatggcaagggtgctgaactaataagactttgaagaagacattgtaacattgacatggaaattgtctatgttagatgtgagaaaatgttcactgatttgagtctgacttaggatgttacatcgattattcacaagatcctggttgagtttgtgatattcacaaaatctcctcctaatgtgcaagctagaccagaaattccaagaaaacacacacacacacacacacacacacacacactttaaatggaatgtgtgcatgaaaggactaaaggatagaatggtgacgaaaacattgtagctagctttagaaggacagaagatctggacagatagagatgtggataaagcatagttcaagtgaaaggaataccaagagcaaaagcaggtacagaggtgagaaatgccaattgaaaacaggactttaaatagttgcattttgctgggctatggtgtcttcaaggaaaatgcacactgaattaaatgtgaaggaatgtaaatattgtgctataggcagctgtgagtcatggttgttcttgttcaggatgtgacagtatctgaactatacttcaaaaagattaatctgtatttaagaaggattaatatccatattatttgtggatatattaacagtgagaaaacatatgtgtataagatgtcactgcacaaacacaagaaaacttataaggaggcatgcacttattttggcatccaagatccaaaataggaaacacaggacaagactcgggcattggttacctaagttacttccctatcaaaaatgaccaggtgtacgctgccctgggaggcctcaactgttactaggctcttagattactcgttattctgactgaaaaattctttggagagcacatgcactgtaaagacctaaatcctccagcctggaagaatctgtccttttgtttatgatgtgagtccaatctcagagctatattcttttgcacaaataatggaaggcatagtaatctcccacccaacaaatgctacttggctattgtgaaaaatgcctagcattcttagcatatcctaatgcataattgctctggtccattccaccctggttgtcattcagaaatactgtgagagtcattagagaatgaaccacacattgaagctaattagtctacaatgctaataaaatacaaactacttttaataagctattcgccatcaacattgtattaggccattcttgcagtgctgtaaaaaatactttcctggccaacatggtgaaaccccgtctctactaaaaacataaaaattcgctgggcgcggtggcgggcgcttgtggtcccagctactcaggaggctgaggcgggagaatctcttgaacccgggaggcggaagttgcagtgaactgagatcacgtcattgcactccagcctgggcgacagagcgagacgccgtctcaaaaaaaaaaaaaaaaaagaaatacctaagactgggtaatttataaagacaagagttttaattggctcatggttcttcaggctttacaggaagcatggtgttaacatctgcttggcttctggtaaagcctcagagagcctttaatcatggcagaaggggaaggtggagaagacacatcacatggcaaaagcaggagcagatgagagagagtgggggaggaggtgccatacactttaagccaccagatctcatgtgaactcagagagctcacttattgccaagtgatttatcactcaaaccattcatgagagatctgccctatgattcaaacacctcctgccaggccccacctccaatactggagattataattcaacatgagatttggcaggaacttacactgaaactatatcaaacattataatgttacacaacactataaatgacctttattattgaagtcaacttggagtcttcttttctcctcttatctttaaaaccagttaatttcttatgtttgttttgcagtgtggcttaaagcttgaagtcctcacaccgtaagttattttatgaaaattattttaagttattttatgaaattcactgcttctgttctttatccccctggagttactcacctagagaacataggcctgtggttctcacatccctattaccactgaggccttggtggtcttctttcccttatgaactcttctgctgtgcgttccttttatttatttatttatttatttatttatttatttatttatttattttttcttccgaggcagagtttcactcttgttgcccaggctagagtgcaatggcatgatcttggctcaccacaaccttcgcctcccaggttcaagcgattctcctgcctcagcctccagagtagctgagattacaggcatgtgccaccacgccctgctaattttttgtatttttagtagacacagggtttctccatgttggtcaggctggtctcgaactcccgacctcaggtgatctgctagcctcagcctcccaaagtgctgggattacaggagtgagccaccgcgcccggcctcttctgtgcatttctaggcctgtggtagtaactaatgatgctttaaaaaataggtcactagtgtatattttgtaaaaagggatagttgtagtatgaattgcaagtcttggaggtattgtgtgttgggagtcatactaagaaaggaggaaattctgttatacagtcatgtgccatataaaggcaattctggcaatggtcccataagattataatatcttatttttactgtacttttttttttgtttagatacacaaatacttaccagcacattaaaattggcaacagtattcagtacggtaacaaagtgtatggctttgccacatagctatattggtatatacacccaaccatatattcacaagatcctggttgaataccaactatattggtatataccccctaggtgtgtagtaggctatatgacctaggtttatgtaaatacttacacaatgataaaatcacctaacaaataatttctccaactgtattcccatcattaagtgatacgtctgcagtagcataccttccttgctctttctctctttctctatccctctctttcctctatctgaaactaggcaatgaagatagtagatgagattattttctattgacagatcaggagatattttaagtctttttgctgtttataatcatagaaatacagccagtctgctgttcacatggactgttcagagacctaaatatattaaaattgacgtatcatgtcaaataaataccatagttaatacatatcagagtcaaatttcacttattttcctataatttgagagatgtatagggttttggaaaacagaaagtaaaatacagtataattaagccaaaattgatattttgggctatttttgcatatctaagatggaaaaataataattctgtggatgattataatactggtgataatcgcaaaggtttttagataattagatagaagacgctagtgattttttaaagaaaatatttcaaaataaaattgcatttttgagaccaactacatttttaaaacaatgtaataaaaacactaaaattaaaaacaatcttgaaatttttgtttttctttattggatgacaaggtttacgattattccagggttggtatacttctgcctaattttccttctctccttataatcctctctatatgtattatcagtcaatgtataatacatatatacacatttatacatatatatttttataatatgtatattatgaaaataatggctgcctcttactatcagccacatgaagattgtactaggaacattccatatgttatctcacaacaaccccagagaagaggtggtgctatatccatttcatagctagaaacacagatctctcaagtttacatattggtaactggcatctctgggatgcaaatccagctctttctgcaacattagaaagttactggattgatttctacataagtcaaaagataggtttattactaaatagtactgaatttacacaaaaattttctcttccttttttatattccccctattcttcttcactcttggaaggtattttccagcataacttccactttcctgcacactctcctccccgttatcagctatgagtagtactaacaactgaagttcctatgagtgcaacagacataaaccagtagaaattaattt

SEQ ID NO: 2440 - DNA, 6000 bp, Homo sapiens
ctttgagaatttgaaatcattacctgggcatttttaaaattttgacagtttatagtttacctagatgttttggattatagacccccaaatctaacgtattaaaattttttctgaaacagagcttattattttatggttttgaattgtccctcagaatcaaaattggaaaatatttttactgtgtaatttttcttatgcttcttactgagaaaatgactctccaaatctgaagatgatgaaaaatacacattgggatttgttactacttatgtgtacacatttgaaagacagtttaaatccacatactatttatgatgttcttggctgcaagtaattaaaaaaattaataattccctagcaagcagatgcagattgaaaaaattaaaagtggtgaaactgtaaggatacttattttactatatggcaagaagtatggaggtagttctgctcctggactggctcagtcgtcattaaggactcaagttctttccttcgctccatgttctttttttttttctttttgagacaaagtcttgctctgttgcccaggctggagtgcagtggtgtgatctcggctcaccgcaacctctgcctcctgggttcaagcgattctcctgcctcagcctcccgagtagctgggattacaggcatgtgccacagctgccagctagtttttgtatttttattagaggcagggttttgccatgttgaccaggctggtctggaactcctggccttaagtgatctacctgcctcggcctcccaaagtgctgggattacaggcatgagccatggagccagcctcatgctctcattctttgcgtggtggcttagtcctcaagccttatccttcattgctgcaaagtggctggggcatatcttgacatcacatgaagacctagaatcattatcttccatgccccactttttatttaatggggaatatttttcctgaagtccccacagaattagctccgttggccacagttgcctctcatacccaggcataagtcattcattgtgcaaagggtatgagactaccatgattagcttagatcaattaagataggcttttatgagactgcagaggggtctatcttccctcagataacatgttgaaggataaacatatctgagattttgttagtatggaaaaagcagtgtaaggcaaatagtttcagggaaattatactcaaactaaaaattcagtgtaaaataaatacaacaactttactacccacaagttttggtatgatgcttagaatctgatctaaaatccactcactctattctttcagcaaacattctttgatcacttattacacgttgggcactgttctccgtactaaagcagagaacaagacagatacgtatttgtattgggaatgctttcagcagcaactgacagaataggaaattaaaagtggccaaaccatagggacattcagtgtttgcccagagaaatttagagggaggcaatccctagtccatctcctctgaaatataaccaagagtccaggttctttcttctctgggtccttaacgtgctgacttttgtctttattcttttcacttcattgttccatagctgtcatagttctaaatacctcatctactttcaaacgagaaagaaatggtaaaggacacttttttcttattattgtcccttttgcaaagatttaaaaacctccagaagcctcctatgcagattgccatgaaatctcattggcaggattgtgtgccacactggtcttctcaaaagcaaaggagtctaggaaggtaattatccaacaaagtgttatggagccacacacactgctgccccagataaaatggggatttttttttttataaggggagccatggataatggttacccaattacaatgtttgccgtagtccccttttcctggaattaattctctggccacttcttggaaaagtaataataaattaggagtacttttcatactctagttttaaaattatgtgtgaggaatttgtagtggttcttaatgttgtttttgcacattcaactagaaaagcaattggccaggtgtggtagctcacacctgtaatcccagcactttgagaggccaaggcaggtggatcatctgaggtcaggaattggagaccagcctgaccaagatggtgaaaccccgtctctactaaaaatacaaaaattagctgggtgtggaggcgggtgcctgtaatcccagctgctcgcggggctgaggcaggagaattgcttaaacctaggaggcagaggtgtccgtgagctgagatcctaccattgcactccagcctgggcaacagagcgagacttcatctcaaaaaaaaaaaaaaaaaaaaaaaaaacactggaaaacagacattttgcctttattccaatgtggctttagaatttttcataaggaatatgtattaagatattacttatataaatacaaatgaataatatataaaataattagcgaaaaatctgttaaagactaataatctgtgttcttctgcccacatcatttggtccctggtcctgttcttgctcaatgtttgcaaagaaccaaaggcacactacaaataagtagaaatctctgttgtgctctgacccttgatctgttctgtgatcactgttccctttggcttttttttgttttgttttgttttgaaacacagactcactttgtcactcaggctggaatacagtggcacaatctcggctcactgcaacctctgcctcccgggttcaagtgatcctcctgcctcagatccctgaacagctgggactacagccatgcaccaccatgccaagctaatttttgtatttttagtggagatggggtttcaccatgttggtcaggctggtcttgaactcctgaccccaagtgtccgcccacctcggcctcccgaagtgctggaattacgggcatgagccaccgcacccagccctctttgacgttttatcatatattttttcatttggaagtgacttttctgtaagttgtcacaacaatgaaatgtctattgacttctaagcaaaccctcaaatcattaaaccttgtcattaaccactctatgtccccagtgttgttgtggtttgttaagtaaagaacttctgttgaacaagtgctttttgtttgtttgtttgtctgggtcttgctcagtcacctagagtacagtggtgcaatcacagctcactacagcctcaacctcctgggctccagtgatcctcccacttcagccttcctagtagctgggaccccaggcaccaggcaccacaccaagctaattttttttttattttatgtagtgacagggtctcaccatgttgcccaggctggtctcaaactcctggatgaaagggtacctcctaccttgacctcccaaagtgctagaattacaggcatgagccactgtgccgagccttgcttgtttgttttttgagacaaggtattactctgtcaccaaggctggagtacagtggcatgatcatagcttactgcaaccttgaactcctgccctcaaaccatcctcctgcctcagcctcctgagtagccaggactacaggcaagcatcaccatgcctggcttgagcaactgatatatatcatttatcttaatcacctttctaaaaagtttttttgtttgtttgtttgtttgtttgtttgttttgagacagaatttcgctttgtcacccaggctagcgtgcaatggtgagatctcagctcactgcaacctccgcctcccaggctcaagcaattctcctgcctcagcttcccgtgtagctgggattacaggcacccaccaccatgtccaactaattttgtatttttagtagggatggggtttcaccatgttggccagattggtctcaaacttctgacctcaggagacctgcctgcctcagcctcccaaagtgctgagattataggcgtgagccaccccacctggcctctaaaaaatattgataaatttacagaagttatttaaaatgttgaaaattgtaagcaacatagcaatcttgagttgacatgtataaagcatggtatttacttttttattgatttattaattcatattctcattttctccctcggtgctagaaagcaaagagctagtcaggcatgagaatgattaaaaacccttgtgagctaggaagagagaagaatctaaacaaaaacgaacctaaggaaaagaacaacaaattaggctttgtgaaatggaaggaagaaaggaaagggaaaggaagggaggcctagttcataatgtgttatatgatttagatttttacacaagtaagatattaaagaattacaagttaaccatctaaatgtaatactttccaaataacttagaagtaacatagtctgatttattctaagatgtgctatcatttatcttgaaaaattttcagtagaaaaatgatcataatttactggatttttcctacagtaaatcatttatttttatttattcttattggctctattgaaaactgtgtccctttattaccttgttgaaaatctaaaccatcaatagaacagcaaagcatattttaatgaagttaaaacctgttgcaaccctaagcaagtagaagattgaaaataagactttaatctgtacaccaggcaattctctaaacctgtcactaaattttttgaatccacctatccaaaaggtcagcaaaagtaaaggcttcattgcacaagttgataccagtactgtgccctttgccaagaatgcttgggaaaataaaggattccattgtttcaacagattgacctggcaacttagtccagaaatgttttctttagactaatttagcagaagagatgaataaagtcaaacaactgttttacggtagaagcacttcaaagtagtgcttgagagctctgaagtttgaatgatctagctttgaatcttgactccaccagctgtgagctcttagtaagtccatttaacttcttatgactcaatttttccatttgtaagttgggcatgagggcactcaaacatggcatactgctggctgtctcttaatactcattcttctcatctttcaaagcaacagaatcttagttcttagcaggacacacaggtgagtggaaaaaaatctcttttacaactaggtgtggccatctgagttttgggatatatgtggcaatggcatgtgctacttctgggaagtattcttaaagaaaggggtaggacttcctcttccttcttcctacagctagaatatggacatgaaggcagaagctccaacagtttcctctgtggatgaggtgaccttggaattggaagctatatgtgccagaggtattagacagaaagagattgagtctctgccaccgtatcatatcaaccccaaactgactcttctggatttcttgaataggcaagagaaataaaccattgaccgaagccattgttttgggatatttatttctctgtctgccaaacctaattctaattaataatactaccacaaagaaaggttttaagaattaaatgagattatgtgctagctacatagtaagtgtgcaatacatcatgcttattattactattatattattattaaacaaggataatattatggtctaactattcagaaaaataaaatatatctggaaagtcttacctttcagaccagtggcattaaagaactataagggtgcctatcaaagaatagagtttctcctgagaagcaatttttgatgtattagaataaattacctgcaataaagaaaagaggtcaaacagacctggaatagctcctaatccccatggtaaccacatattttcttacaccaagtgttgcctaatgttcttagtctgaaggactctgaattttaaaaagaaatttaaaatggaaaataaaggtatgcacacatgatgccccgtaaagtgaaaccatttaaatggtgaaagatctcctgatgataacctcaattaacaacaatagcactatgaacaaaagaaacaattttgtaaaggg

SEQ ID NO: 2441 - DNA, 6000 bp, Homo sapiens
gctacttctgggaagtattcttaaagaaaggggtaggacttcctcttccttcttcctacagctagaatatggacatgaaggcagaagctccaacagtttcctctgtggatgaggtgaccttggaattggaagctatatgtgccagaggtattagacagaaagagattgagtctctgccaccgtatcatatcaaccccaaactgactcttctggatttcttgaataggcaagagaaataaaccattgaccgaagccattgttttgggatatttatttctctgtctgccaaacctaattctaattaataatactaccacaaagaaaggttttaagaattaaatgagattatgtgctagctacatagtaagtgtgcaatacatcatgcttattattactattatattattattaaacaaggataatattatggtctaactattcagaaaaataaaatatatctggaaagtcttacctttcagaccagtggcattaaagaactataagggtgcctatcaaagaatagagtttctcctgagaagcaatttttgatgtattagaataaattacctgcaataaagaaaagaggtcaaacagacctggaatagctcctaatccccatggtaaccacatattttcttacaccaagtgttgcctaatgttcttagtctgaaggactctgaattttaaaaagaaatttaaaatggaaaataaaggtatgcacacatgatgccccgtaaagtgaaaccatttaaatggtgaaagatctcctgatgataacctcaattaacaacaatagcactatgaacaaaagaaacaattttgtaaagggaaatacactctaaaaactcaaaacaaggaccttcactatctatcaacacacacacacatgcacacacacaatcacatacacacacatatatatgacttttatatcagaaattgtcaataatgatctataattccacaatatgtatcacagacactgatggagaattaaaaattaaggagcagccttcctctgcttccaaacacagactatgtccaaaatcatgtcaaaaatgtctctactagcgcaacccaatagtttttaaaagaatccattgacacataaaatctcagtagggccaagcttggtggctcacgcctgcaatcccaacactttgggagtccaggcaagtggatcacctgaggtcaggagttcaagacgagcctggccagcatggtgaaaccccatctctactaaaaatacaaaattagccaggtgtggtggcaggcgcctgtaatcccagctactcaggaagctaaggcaagagaattgcttaaacccgggaggcggaggttgctgtgagcccagatagtaccatatcgcactccagcctgggcaacacagtgagactccgtctccaaaaaaaaaaaaaaaaaaaatctcagtaggtttctagactatccctttactatggaaaatatttgtgccaccttttccataactttattgctgccagagcacatcttagattgctattttgctttccctaataagcataacatcaattctcttgcttgtatttacttttcttgttacttgtacctaaactaacagcttaggtatcttgaggtcctggcagaaaaggcaagaataaattttataattgattaactaaaaaattatcattttggacatccccagggcaaacaaaggagtagcaatggaatccaacagaggtaaaggataacaaccatagtccacctaatcagaattccttctttgaggttgagactgaaaaagagggtgggggcaatgtaggtatcagtcagtattttacagaaaaagaaatgtaatgctcagtgatgttaaataggttgtccaaggtcacacagcccaaccaggatttaactctaggtctctttacagctaaggttctttctagcaagccattcagccttcacagtgtactaacaacagagaggacaaaagcagaattttgcctttaatacttgcaataataatgcaataatcataaatgtacctgggaagttgctgaaaagatagaaaataactcagtattgaaaaatgcacattaggagatttatattcaaagaaaaggtaactcttgaagactgttttggaagtcagtatctttcagattttagaaaaaaaagcaggatacatatgccatatattatactttcagcaggatctgggtagcaccctcttaaccatattaatatcactgtagtaaagcatgtgcatattcacactaagtgagataaataaagactacaggccgggcacagtggctcacgcctgtaatcccaacactttgagaggccaaggcgggcagatcgcctgaagttcaagaccagcctggccaacatggtgaaaccccatctctactaaaatacaaaaattagctgggcatgatggtgggtgcctgtaatcccagctactcagaaggctgtggcgggagaatcactgaaacctgggaggcagaggttgcagtgagccgagatcacaccattgcactccagcctgggtgacaaaggcgaaactctgtctcaaaaaaaaaaagactacaaaggtgcatatcagttcagtacagtttcagtgctaaatgagttcaggtcaagtcaggtcaggttttgaattttgaaaacacttcctcttttcatagctttttggatttcataatttcaggtaagggatgtgaaactgtactatgtcctgtcttaccaggtgagggaaatactaatgataaactgactgattgatttaccagaactgactttccactaataagggtaaagacaccacatatgccaagtttgttccatatacttggcacaagcttatttcctgttttgtgactcaattacagcccattatgtgactcaattgaattaaaaagtaggacatgaaaatgaaatacaggtcagtctactaaaatccagaaaaggtattaagcaattcatgtgtgacagttctaattcaatgttaaaactatagttaacttcctactattacacttgacttgcaaataaaccaataagaaaattagaaagcaatatagaattttagctcctgaaattcaatcatcaatttatcaataaaaaccattctgttcagattaaagacatttgctaccaccatactttattttgacaaatggacttgaaatagacattcaacacattaaaattcagtagataataatttttaccctgtaactgtataaacctgtagactgatttaatgtatcatctacctataatttttcgaggagcctcaatgcctgaatccaacatattttaaaactacacataaatttgcgagaacataattatcaaacaaaaactaaccactggatctcttgcatattacacactgctgttgcattgatacttttctctcctctgtatgcatcctttttttaacttcagtcttcattgattctacaattgggaatattttcccattagacatttatgtgattcttatctttaaatgttgtgatatattgtccttggccttcaggagatctatcaattaacattgctaatgaataggaaaaatagtaaaacactaaaaatgaaaatagactgggtgtggtggctcatgcctgtaatcccagcactttgggagactgaggcgggcggatcacttgaggccaggagttcaagaccagcctggccaatgtggcaaaaccccatctgtatcaaaaatacaaaaattagccaggtgtgatggcacatgcctgtaatcccagctactcgggaggctgaggtaggagaatcacttgaaccagggaggcagacagaggttgcagtgagccaagatcatgccacttcactccagcctgggtgacagagtgagactctgtctcaaataaataaataaataaataaataaataaataaataaataaaatgaaaatagatatctgaaaaaaaagactttggcacaattgttcaccttataaatctgtggtttgtgtttattatttccttgtcaatatgattagtgtcagagttactgttctttttaattttttgccttgtaaacaggtggtaaagagatcatttattagaccatgtgctataggtagtgcactacatgaacaatcagtttatatacaccatggaatactatgcagccataaaaaagaatgagttcatgtcctttgcagggacatggatgaagctagaaaccatcatcctcagcaaactaacacaggaacaggaaaccaaacaccgcatggtctcactcataagtgggagttgaacaatgagaacacatggacacagggaggtgaacatcatatactggggcctgtcacggggtgggggaaaaggggagggagagcatgcggggcttaaaacctagatgaggggttgataggtgcaacaaaccaccatggtacatgtatacctatgtaacaaacctgagcattcagcacatgtagcccaaaacttaaagtaaaataaaagaaaaaaaaataaaactgagcaagaaaagaaaaaaacggcaaataattttttagtgttgcacagaaaataatatctggcttgtcgtattctagcataaagtgagtcaacatcattgtttaaaagtcagacagatttcaattcagcatttttctccccaatctaattatttcagaagctcaggtaggatcagaaagaggcagtatccttccatgtaggaacacaccaaaggagctaattacataaaaacagaaaatacataaacaacacatgtaaagagggtaaatgacagatggctaaatgccataactaagttttattatactaccattaaccaccaaaattatgcatttcctaaagtagcatagtttggaaacaaatagcatatattttagaaactgtccccttgaactgtataaattgcaaaataaacagatatattaccctttctctgcctcccctacagtaactcattaacagatagacttaagctcctgcactttctgaccctcccaggacttgagttgccttgtctggtatccttatgcagaatgaactgaaataatcatcaatctgaaaagctactcttaaacaggtaattctaacttaatctacttgtatattttatggaacacctagggacagactgttagaacaatgggaatcttataaaaatatattaatctaattctcttattttacaaatggaataattcatagagagttctgatctgttcaagggcacacactcatttagtggcagagcccagactagaacccaagtaatctgtctccctctccagtgctttttcccacaggctttgccagatactgtttcatgtcttggattacattggtagaaccttttgttaatacataggtgaatccttgtcttccagattaggctcttgaatttccttatcccaactctatatttatgttttctgattttatggaatgtcatattcctttttctccaaagtattttaagggctacaatatatggcaaattttaactgttgtttctgttacttatttgaatttagatgaattatttgtatagttataaagataagatgtccagaaaccatattcatgatgtaaatgagatcaccttgtatctgctaaaaacattctagttaaacagaagataaacaataaataagtagtccctgcaggagataatttcatcaggggaccctagttacaattcaggtgaaacagaccaaatgccagagctctttatcaccctcgccaagactgtatccatgacaagctttagtaagcaaagagagcaataggaagcactttctttttgaggtagaaaagggctctataagttgaatattccccaaattacattatttgtattagttaaaagaacacaatagtgtagcagccagaaaacaaatatttgctcataagtttttatcatttttttccaactggacctggggattcctattgctcatatgtttactcacagctgatactctttcaacaataggggagatacca

SEQ ID NO: 2442 - DNA, 6000 bp, Homo sapiens
cgctgatctaatttttgtatttttagcagacatggggtttcaccttttttggccaggctggtctcaaactcctgacctcaagtgacctgcccacctcagcctcctaaagtgttgaaattacaggcacgagccatagtacccagccgaatcactcttttatttttttttacatcactcttacgagtcatcaaaaacaactataaagtaagtgtctaggatgtttatttcactattatgtactttctcaggcattatacacaatatgatgtctataaatgaaggcgggcagatcacttgaggtcaggagttcgagactagcctggccaacatggcaaaaccctgtctctactagaaaacacaaaaattagccaggcatgatggggcatgcctgtagtcccagctactcgggaggtttgaacccgggaggttgcagtgagccatgatcgtgccactgcactctagcctgggcaacagagtgagactccatctcaaaaataaataaataaataaataaataaaagaaattctgcaaggtggtaagttattgcagaaaaataaaaccagttccatgtcaatctactataagcccactcagatctaagacatcttatttgcctagagcaagcttatccatgcatgtggcccaggacactttcaatatggcccaacacaaattcataaactcttttaaaattataagactttttttgcgatttttttaagctcatcagctatcgttagtgttagtgtatttcatgtgtggcccagacaattcttctttcagtggggcccggagaagccaaaagattggacacccctggcctatagcactctgtgtctgaatttttaacagattgcctactcctagcataataatgttttattgtcattctcaagtttctaaggtatgactatataaacagtagaaataaattaaatattaaaaaggtagaattgtatcaataggcttttttttttctggagacagtcttgctctgtcgcccaggctggaatgcaatggtgccatcttggctcactgcaacctttgcctcccaggttcaagtgattctccccatgtctcagctttctaagtagctgggactacaggcccgcaccaccacacccagttaatttttgtgttttgagtagagatggagttttaccctcttgtccaggctggtctcaaactcctggcctcaaataatctgactgccttggcctcccaaattgctgggattacagacgtgagcccccatgcccagcactcaataggcttttaatctagcttataaagtgtaaagaatcctagaggatatattaatgacacatatttgtatgaaaaaattatttcatattgaagaccagtaccttctcaaaactgccacagcagatgaatttcttctaagaggacatcaatttgggcctttattataccttgagtttaataagtgagaacttcaaggtagtatatgtaaaagcattttgaaaaatatgtataattttaattcctatatgaatttattgttcaatatgtttcaagaaaaaagatgaagcaattcacagtttttaaaaatgtaaaaataaaattatccaaacagaagccttggatgagattctactgaatgactctgagcttcctggcagccaaagcaaaagagaaatgcaaagtgttatttcttttcttttcttttgactgacaagaaaaaacatacaagttcatgtgaaaaacctatcttctcacatgaaattgtatatattatctcattcaaagtttctattttaatcatttcctttttatatgttttagaattataaacattatatgtgaatgcgagatgtggcataccacaatggacaaatttttaaattgcagtttttgaagatacctcagaggcattcttcatataagcattttttatgaaaaaacttaagaaagtaaaattaattattgagtttaactcctaaattagtggagttgagcatgtcaccaagccttgttctaacttgattcagggatttagcttagacagactagagcagcatttctgaaagggtgtttagaagatgtcctgcatcaaattattcaaggctgtttcaaaggtgaagatttctaagccccactctacaactactgaatcagaactctggtacagatttcaaaattctcaattgtaaataagttatcctggtgaattgtgtgtctgcagtgctagttattagtactctttcaggatcaaacccgctcttccatatttggccttgtgatgctgaagccggttgtgggtaacctccagtgtcatttttgccacctggcttccggttagattctgccaatgggggagctagagagagaacagacgggaggaaggaggtggaacacactccttcccgtttgcttgctattcttgtcagtatcacctagctgtggttcttcacgccagcagttctagctttttctagtagcagttggttccagtttccactatttccccatctcccagaacctagttcatgccactctctcagagcatcttctgaaatctgggttccagctccactggactctcctctgcgttctgaagcaccagtgccatccaggcagcttcctcacctcagaggtctggattccagcttccaccttctccaagcttgtagtttccaacaaccccaacctttcacctttccccccaggcctagtggtagcagctgctttctgcaattactttccctgtgtatttgttcctttttcccctgtcagtcctccaatatctatataactaaatttccctgtgtaaattatctcttaaaatagttggtgtggtttcttttttcctgactaaaccctgactgatacaaatgttaatatttgagttctagtgagttgggacattaaggagacaacgtatctctaagacagtctcttccaattgtcaattgtttaaaccttctttcggtaccagtatacaaaagagtggtgccaggagtttcaaccactatattttattgccttaagaaatttctaggccaggcgcagtggctcatgcctgtaatcccaacattttaggaggccaaggcgggcagatcacctgaagtcaggagttcaagaccagcctggccaacatggtgaaatcccgtctccactaaaaatacaaaaattagctgggcatggtggtggatgcctgtagtcccagctactcaggaggctgagtcaggggaatcacttgaaccagggaggcggaggttgcagtgaaccaagatctcaccactgcactccagcctgggtaacagagcaagactccacctcaaaataaataaataaataaaagaaatttccagaagctttgggttctagaatagctgataacaaagttgaaattctattatcaaaaatgaagaattcttacataatctttcccagaatcagagccaatccagttcaacagagaggaagaccacgtatgataaatccgcaagcagaacaaaaatatttttttaaaaagatttttaggccaggcgcagtggctcatgcctgtaatcccagtactttgggagaccgaggcaggcggatcgcaaggtaaggagatcgagaccatcctggccaccatggtgaaaccctgtctctactaaaaatacaaaaattagctggacgtggtggcgtgtgcctgtagtctcagctactccggaggctgcatttcttgaatctgggaggcagaggctgcagtgagtcgagatcacaccactgcactccaacctgcgacagagcaagactctatctcaaaaatgtatatatatatatatatatatatatatatatatttatttatttattcttcttaagggcttccataggatgcattacttgcactatctacaggacaaaagaccaaatgttggatttatatgtaagggcatccatgatgttatgcacttcttcaaaatgatttcaagtttatctttctttattagggcactgcttccacatgagctcattgttgttccctgctgcaccttatatatgtatttctaccttcatgtcttgactcaggcagtttcttttatctgagagtccttattgaatatacaaatacctgagcagtcctcataatggatactcaacacatgttggaactggcttggattgcctttcttctacagtgagtcttcctcagaattagtctgctttgaagtgctatagcagttactttatgtgcacattttaaacagagcacatgttctcttctgaattgcttgtgtctatgttcaatctttcctcctagatttataaactctttaaagacatgccatatatcttacagattctcgtatcaccacagtaacccacagaccttgcatagaatattgaccaataagtgccgagtgaataaggacctaacaaatagtcatctactatttgatgggtctttcctttctcctcttcttatgttgtagatatctcaaaagcttttcaaaatgtagagggtataaataatatctaatgtgctttatactgtgtccacagtattataaaataatattttcacttttctagatctgcatgatacttcccatacattaactatttaagtttcggtgacaactcttccattttaaccaagaaaactgagactctgagaacttaagtaaccatgtccaaggtcacgtaatgagacagtgatgtttctggaattcgaaaagggctctttcacatacattgcatggtctcttgggaagttagagcttagacagtgacgataacagtgatgagctcacctgacagattgctctttttcctctgcagagacttgcttcaacaccaggaagaacatgaaagggtgactcataattcccagcagcagtgccagttcatgtgctgggattctgaccacaagcctaacaatcaggtcagggagtcagatttctgttggatttagaaaagcatctatgtgtttatgaaagaaacccactggatttttaatagttctgcagctcttggaggctctacatctaccctttctccccagccaagagcatggctatgggagaaggaaggcaggcagcaggcaggtaagtgtgacttcctcacttcccctaccttctcatcttaaagccatagagtggttgctgggtaacccactcctacatatattggttcataaagcctagtgagccactgaaattcttactgatctgtaaaatttcaaacacactagtaacacagacagccatggtgtagatgacttgagcacacatagtatattttctgctcccattgggctgtttgaagaatagcattggctgggcacagtggtgtgaacctgcagtcccagctactctggaggctgaggtgggagaatcgcttgagcccagcaattagaaatcagcctgggagacacagtgaatctctgtctttttttttttttaaggccgggtacagtggttcatgcctataatcctaatactttgggaggccaaggtggacagatcgcctgagcccaggtgttcaaggccagcctgggcaacatggtgaaacctcatctctacaaaaaatataacaaaacaaattagccagccatgaaaaactagccaggcatggcggcatgcatggtggtgtgcgcctgtcatcccagctactcaggaggctgaagtgggaggattacctgagcacgggggaggtcaaggctgcagtgagccaagattgcaccactgtactccagcctgggggacagagtgagaccctgtctcaaaaaaaagcaaggtttaatatcaactttggtggcaccctccacagagtatttatactatagaatatgttttataaaaatatttgggaggccgaggccggtggattacctgaggtcaggagttcaagaccagcctgactaacatggtgaaaccccatctctgctaaaaatacaaaaattagctgggcgtggtggcacatgcctgtaatcccagctacttgggaggctgaggcaagagaatcacttgaatctgggaggc

SEQ ID NO: 2443 - DNA, 6000 bp, Homo sapiens
cgatttagtcaactcttcagactctgtttctaactccaattgtcttgctattttcaccatatttgtagtgatttcctccactgaagtcttgaacgccctcaaggtcatccatgagagttggagttaacttctttcaaactcctgttcatgctgatacttttacctcctctcatgaatgttcttaatggcatctagaatcctttccagaatgtttttggtttactttgcttagatccatcagaggaatcaccatctacagcaatttataaccttatgaaatgtacttgttaaatattaaaacctgaaagtcaaaattattccttgatccatgggttgcagaatggatgctgtgttagaaggcatgaaaacaatattactctccttgtacatctccatcagagcatttcagtgaccatgtgcattgtcaaggagcaatagtatttttaaataaatcacgttttatcagtaggtctcaacagtggacttaaaatatttagtgagccatgctaaacagatgtgctgtcaaccaggttttgttcttccacttatagagcacagcagagtagatttagcataatttttaagggtcctaggattttcagaatggtaaatgaacatctgcttcaacttaaagtcaccagccacatcagcccctaacaagagaactgcctgtccttcgaagctttgaagccaagcattgacttctatagctatgaaagtcttggacagcatcttcttccagtataagactgttttgtctacattgaaaatctgttatttagtgtagccaccttcatcaatgttcttggctaaatcttctcaataacttgctgcagcttctccatcagcacttactgcttcacctttcatttttatgttagggagagggcttctactcttaaacctcatgaatccacctctgctatcttcagacttttcttctacaacttcctcacctctctcagccttcataaaaatgaagagagttaaggccttgctctgaattaggctttgacttaagagaatgctgtggctggttttctatccagaactctaaaactttctccttatcaacaatgaggctgtttcactttcttatcattcctgtgttcactggagtggcacttttaacttccttcaagagcttttccttggcattcacaacttgactgttttgggtatgaggcctagttttcggcctatctctgctttcaacttgccttactcagcttaatcatttttagctttgatttaaagtgagagatgaatgactcttcctttcacttgaacactcagaggccactgtagggttattaattggcctaatttcagtattgctgtgtctcactgagggactggcccatcagcggagcagtcagaatatattcaacatttatcaaataagtttgccatcttaaatgggtacagtttgtggtggcccaaaacaattccaataacaatatcaaagatcactgttcacaaattgccataacaaatgcaataataatttaaaagtttgaaatattgggagaattaccaagatgtaacacagagacatgaaatgagcacatgctattggaaaaatggctctgatagacttgctcgacaaaaagctgtcacaaaccatcattttgttaaaaaaaaaaaacaatatttgcaaagcacaataaatgaaggtatgcctgtatactacatatttatttttaataatcatataagaaaattaattggatataaaataggctgttctaaaacagcaagagggaaataaactttaacaatgctgacagcagccatggcatacttgaatttttaggactcttgttaaatatgggtatgggaacttaccctctgcactagtatccagacacttactagattatggcccattggggtatttgcctctattacatatatttgctagactgtcattataccttgcaatctagtgtctttttctaggttgatattgtcacgtttaatctattatggcaatgatattactcttgctatgttaaatgtttttatcagacttccttgtagccccaaccaatctgagaagattgaaaatcaaggaatccttcactccttttgtaaacttggtaaaatggaatcaatgtttactagatctgctgttcttgtgaagatttctctgttcttcttcatcaagatttgccaatcttcctctgcactcttgccttctgcagtctttcctcttccataaaaatatcgcttataatattctttttttgaaatgaagtctcactctgtctcccaggctagagtgcagtgccatgatctcggctcactgcagcctctgcctcccagctttccagtgattctccttcttcagcctcccaagtaactgggattagaggtgcctgccaccatgcccagctaattttttgtatttttagtagagatgggtttcaccatgttgaccaggctggtcttgaactcctaactcctaatctcaggtgatccacccaccttggtctcccaaagtactgggattacaggcatgagcctgtatgccaccatgctcaacttccttataatattcttctagtcttatttcccaactgctggcttttatattttgaattgtcaatagaaagccctgcctatcgtgatgaggttaaggacacatgttttgctgagagaagtaacttccagctgagaatcttgtttagcaggagagaaaatcctctattttagagcctctcctggagcttagagtaagcattggcttttagaggtgttttctccctttttgatgtctggaagcactattttcaagtctgttagagacccactttaaataagtacaggtgctaatgctctgagtgcaagtctgtaagggttagtgagtcctcaaatcacagaagtctcctgaccaatgctgggatgttctactgttctccaagaatctgcagcttaaaagtattaaactaaatacagcagacaccctcagcatagcagtgaaccacaatggcagctgacaagcaggaacatttaatggattggtcagcaagaccacacttatatcttgtttaaaatgtgtcctttcctttgggagactgaggcaggcagatctcttgaggtcaggagttcaaaactagcctagtcaacatggagttttctaaaagtacaaacaaattagccaggtgtggtggcaggtggctgtaatcccagctacttgggaggctgaggcaggagaattgctggaacccaggaggctgaggttgcagtgagcaaagattgcaccactgtgctccaacctgggcaaaagagcaagactccatctcaaataaatacataaaataaaatgcatcgtttctctcaacagcaaaagccttattttttcatcctttaaatatgttactttcatagtaggataagatggtaccttgtctgagaggctaagacccccaggccacttgagaatttgagagcttttagaacttgatgagcatagctgactggatacttcgtgtcagcactgcttgtggtaattacaggatctgtggatcacaaggctcacaacttgtatcacaagttctacaagaaaattggctaacacatatttggctctgttaatcatttgctgagtttatatcttgtcccaccaaatgtattttttgaaatgccattacatgaaaaagtttcactattccaattatctgtgtttaccaacttgtggagtaagagtggctgactgaatatgtgctttttaactacactattatatacattggccaagctttttatattaaccctacccatgaagtatcaccaatatttcccccagtgtgaaattgacatttgtcaaaagccttttgccatataaaagtttttagttcttatatatgaaatctgtccctttttttcgacatgagttccccagcctgcttagctttgcccctaccacccaagatttttaagctttctatattttcttagaatttaagattttaaagtctttacttttttaaatcatttatttgtaaagggacatatttctcaagtgtgctagttttccttgattttaatggattaaaatgtgtcgtaggtgagccattttcttccaaatgacgaagagtttttgttcctttgaaagtctggcccaggattttgtttgtttttgtttttttaaagttcttattttacttacagagttaagaaagttgaataactatacaaccagtctctaaatagaagttctaataaatcctaagatgttgcagggcactgaaagaggacaaaatttgatccctaaagccctctccaatctcatactcggtgaaaataacaaacaaaaggcttcagtgttagtggaaaactgagttcttaaaaagcaggtaaaggtcctgtttggtccttctccagagctgaggagaaagggttttcagattataaataacagaggtgcccttgtatggcacagaattgcgataagactttacttcttaggggcttaaataatgaagtcagtaaaagaggactgaaaacgaacataaagaagagctttagctttgacgcaaagaattacatcagtgcttgacaaaaccgaggattcttaatttctaaaaacgctttctttaagcacttcctaacctttcattatctgagacaacatatcaagtgagcagcagtacaaaggatgcatgtgatttcgaaatgccacaattgagccaactgcagttgcacgcgtacgtagtatagagaggtgtgatcaaaaaaagaatatagggagcatagggcttcgtctgcatcaaaagatactctccccatcttctatagccttaagttttgcgaaggtaagtttctccccgcttgaaagcgcccccagggacaagaattcatcttgaccaagcctaaggccgtggcatgcaaggtgttgagtcaccgggtacagcggtcttgcgacataaatattatttgatgacgaaggtactcggggcccaggtgccaaggtaaaccactggcaaagatgaccgtggttaaggcagtagaaagcaggctcgacactgagacgcggttccagccctagaaggattgcattttacgattcaggcaaacttcgagtctcctcatgtgacatgtgtgcactcctggaccgttttaattatgagaaacgtggtttgcagcatgattccttccagtcgataaatcggaatctctctcgctcccaccccttcttaacttcaggcttcctgcatcccggagcactcccggcagccccttccctcccccgccccggggatgctccgactcggcgcttagccattcatcaaccggttcacaccggcggcggccgccgcggagtgacgtccggagggggcgggcctccgcccccgcctgtcggctcctggcccgcggttccaggccgcgattggtggctggagggttgcacgtcgcgccggctataaaggggagggcttgtgacgcaagggcgcctcggcgcgtgtattggctccttcggctgcgggccggctcggctacgcgctctgctccgagccgctcactgcatggtagagtctggtgcccccgccgccgcctgcatcgccgccaccgccgctccgccacgaccaccgccgcctcctgccctgcagccaccgccaccgcctgtgtcgccgccgcctcgggaccggctgtatgattaggccacaatcttcaatgagtaaacatattcctgtgagtagccgtcgcatcgtcgcctctcgggctgggaatccacgaccggccccccatccccgctgtcgcctttgttcggagcccggcgtctcctccaggttgccccgggttgcggttccggtgggtcccgggtgggagcgggcgggttatggccctgtggccggccgattgcggccggctgtgcggaggcagatgccgggcccctcggggctgcggggtggcggttggccgccggaggcaccggcttttgagtccctcccgagcccggagcgacgggggcggcgcggtccggcttctgcggcg

SEQ ID NO: 2444 - DNA, 6000 bp, Homo sapiens
caacctttcccatgtaaatttcttacaagataagtaagagctatactgttttactgtccacataccaattcaagcaaactcaggtacaataactattaactcaagcacatgcccttctcaaaatgtacaaatatacctctaacctatagaagacattgacatttatttctgggaactggaattgtaggtatatcatctcattttttccaaagtagtttttattttgttagctataagtcccactattatattgcaatcaatttaagctactaaaacatatcaaatcttacctctataaatttgtttaaggtcgcattggttggattgtgtgtaataagaaatctcatgttcttgtatgtgacttccacaggagctgggcggttcattcgagccatgttaatttagttaaaaaacactcaatagggttatgaaataattaaaaaaattgaatacagaaatgatgcaaagaaactgaagtctacttcaatatactccacttgaaattctcagtgctttgagtatgaagttgtaagtaatgataagtgaaatgaacctcctaacaagaagcagcaattcttcaatccagtaatactgaggccaacagaaaagaagtgcactgaggtttaccccatccaggtcagaactcttgtaaaatgctctgtggatttcaattcaacacttctgtgtccaggataaccactcttatgggggcttcttggtggagcagtaatcagtttctacagttcacttgtctgcatagaggtcgtgctgtgcctggcagtaatctccactgcccttcagaaactccataaatgtgtgaccaagaacaccacagaattgctgtttaaaagaaaaagacagaaagagagaataagttattttccaattcaaaagaaatacattagggttttacactatttaagtacacaactatttttctaaagcagggcctgagccgcttcatcgacttttacttgaattgcaaaactcaaggggtgagtacagattaaatcaatcagcataaaacaagcagtcagatagattaaactgaaatccatgatctattaccaagattcctcagaaaaaaaaaccaaacccattgttacatttttgtgaaattcatatatatattcatatatattctatctagttatattctctgtatatatactatctatatataatatataattatatgattctaataattatccctttcgatagttgttttctttacattgtaattacatacactttatgttgatttttccaactaacaaaaacatttttacacattaatacaaactccagataactctgaagttattagtcttgcataatttacttaactcataaactgaaacatctaagttcttttccaactttatgcttttatatccttttcttagactgatttaagtcctatatttagaatctcactttatccttaacaatctgttatcattcccattaaactgaagacgaggaaaatgagtctctgaaaatcaacttgttatgtgaaatatcataagaatgtatgcttatgaatctaaaaaggaaacaactctcatttataactgtaaagaaaatattcataattttaataatgttcttttgtattttaaaaccaaaatttcacatatacaactcaaaactgaaatccaactcagagaaggcggacaaagggatgttgaaggtggaagtggcaggtctcaaaagcaaggtaactactgtaaccaataaatataaacaaatatgaatgtatttatattttctctaagttcccccttaagaactaaaccatttttatgccaatatcaaacattaaaccaatagtcacagcatatttttaaaatatgtacatggaagacactgatgttaataatcagtcttcttccaaatagtttataaggtacttgtgtactcgggagtaaagagggcactaaggaaagtattaataacaggttaacaagagcagtaattcatagtcactgcctcaagcacttcatgtgtactctcattaccaaagtgttttaacaaaaggttccattagtttccatgcttaaatttaagcatttgaagtcttaaaattaaaattcaaacgatctgctcccatttccattttacacctttaaatagtcccatgctagttatagtttctagaactttgctaaattttgaagaataattcttatgatgattactgcagaaaacatcaagtcaaaaacccagtctacttttctggtaaaacatacaactagcattaacaatcatttatcaaaaggtcccataaaaaaggtaactttcattatcacaagtttgttcaaacaagccctcagaggttacttcacctagttggtcagctgggttaaaaaattaagtgtctaaattacaaagccatcacagttacagtgaatacagattgtagtaatctgaaaataatttcattatactttcaccccaaattctaaatacaacctccgtagaataaaaagtgtattctgacactttcccaatgacatacaatgatctttaaaagctttataatgactcatcacagtattctaatttctaggtattacctttttttcaattaaaagctaatttgaggcagtatttcacaccactatttccatatttaatagctaaaactcctgtcggctacaacctagtctggccatatcccttcatgtaagtaagcactttcatcaggaagcagagaaagaactatattaagaattcccttcctgaaatggttatttttactgagtggagccacctagtggatggggggactcgtctgttaaagcagtggtggccaccgatagatttctgttccgcccaagacactcctccattcccaatctcctacccacaggaaaaactatccataatggggattttttccctcccacctatcagttgcattataatcacaatcatatacaagaagggagaggaggaaagagtaatctctgtgcagaagcttaaatcattattatactgcagagtcaagccaattaatgtgtgtaactcctttgtcacaaacaattcgttgtatagtctgttccacatctatttaggtcttagggcacctaagaaagcatgtgtaaaatgctgctcactcttgggaatgatttagttttctagttttcaactgactgagtaacaggaagcactgcctcaggatctagatgtcgggcaggtcaacagttccaatcgtagtgtaaataacttaatactcgtggactggtagggggctccgcggacagaagataaaaaaccctcagaattccgtctctggttggctactgctgccacaaaccaacaggaggcaacaacatattacaccacagagctcagggatagttctaaacagtccccgattaaaaggcgccatccagggcccttccaaaattggcaggggaaatgtatgctggtgcccggacgggaagtccttcgcgtcagtgtaactaacagtagccctgtcagtttccaagacgctccgaaccaggccatttctcgacgactggcccagagaaaggacaagactagacttgttcccattatcacgagcccgaggtggggcgataaatccggaacagctcgaattaccaggtggagcctgggaggagggcggggcggacggccgaagttctcacctagcagaaccccactctggcccgggcaggggtgcagctcgcggaatgccccagagggccgccgccccgcgcacgcggctgtgtgcgcccgagcacgcccgctgcgccccctctccgcgccgcaatcacgggttcgcgccgcgccttcagtcaggcgcgggcgccgaggccattttgtctgaggctcgggtcccggccgtcgagcacaagagtgtagctgcacccagtggctgtcccgcgcccaccccggagctccgagaagctctggaaccagatcgttaccacccgtgcctggctgtccggcctaccccacgcccgcccggatctggaggcgaacccgccaccgccgcgccctccccgtatccggctccgcagtgacacgcgcagccctcgccccaccccgggccacgtctcccgctcccagtgcagccactctcctccggccgaacaaagaggccccgggacgccgcggagcctgccatgcccggacgggtcgcgccagaccaaagggccaagggcggaggcggcggtcacaaagcggcttttgtgccacccacccggcccgctgcggaagccgaaactgcccccggccgccgcagaagccggaccgcgccgcccccgtcgctccgggctcgggagggactcaaaagccggtgcctccggcggccaaccgccaccccgcagccccgaggggcccggcatctgcctccgcacagccggccgcaatcggccggccacagggccataacccgcccgctcccacccgggacccaccggaaccgcaacccggggcaacctggaggagacgccgggctccgaacaaaggcgacagcggggatggggggccggtcgtggattcccagcccgagaggcgacgatgcgacggctactcacaggaatatgtttactcattgaagattgtggcctaatcatacagccggtcccgaggcggcggcgacacaggcggtggcggtggctgcagggcaggaggcggcggtggtcgtggcggagcggcggtggcggcgatgcaggcggcggcgggggcaccagactctaccatgcagtgagcggctcggagcagagcgcgtagccgagccggcccgcagccgaaggagccaatacacgcgccgaggcgcccttgcgtcacaagccctcccctttatagccggcgcgacgtgcaaccctccagccaccaatcgcggcctggaaccgcgggccaggagccgacaggcgggggcggaggcccgccccctccggacgtcactccgcggcggccgccgccggtgtgaaccggttgatgaatggctaagcgccgagtcggagcatccccggggcgggggagggaaggggctgccgggagtgctccgggatgcaggaagcctgaagttaagaaggggtgggagcgagagagattccgatttatcgactggaaggaatcatgctgcaaaccacgtttctcataattaaaacggtccaggagtgcacacatgtcacatgaggagactcgaagtttgcctgaatcgtaaaatgcaatccttctagggctggaaccgcgtctcagtgtcgagcctgctttctactgccttaaccacggtcatctttgccagtggtttaccttggcacctgggccccgagtaccttcgtcatcaaataatatttatgtcgcaagaccgctgtacccggtgactcaacaccttgcatgccacggccttaggcttggtcaagatgaattcttgtccctgggggcgctttcaagcggggagaaacttaccttcgcaaaacttaaggctatagaagatggggagagtatcttttgatgcagacgaagccctatgctccctatattctttttttgatcacacctctctatactacgtacgcgtgcaactgcagttggctcaattgtggcatttcgaaatcacatgcatcctttgtactgctgctcacttgatatgttgtctcagataatgaaaggttaggaagtgcttaaagaaagcgtttttagaaattaagaatcctcggttttgtcaagcactgatgtaattctttgcgtcaaagctaaagctcttctttatgttcgttttcagtcctcttttactgacttcattatttaagcccctaagaagtaaagtcttatcgcaattctgtgccatacaagggcacctctgttatttataatctgaaaaccctttctcctcagctctggagaaggaccaaacaggacctttacctgctttttaagaactcagttttccactaacactgaagccttttgtttgttattttcaccgagtatgagattggagagggctttagggatcaaattttgtcctctttc

SEQ ID NO: 2445 - DNA, 6000 bp, Homo sapiens
ggattttcagaatggtaaatgaacatctgcttcaacttaaagtcaccagccacatcagcccctaacaagagaactgcctgtccttcgaagctttgaagccaagcattgacttctatagctatgaaagtcttggacagcatcttcttccagtataagactgttttgtctacattgaaaatctgttatttagtgtagccaccttcatcaatgttcttggctaaatcttctcaataacttgctgcagcttctccatcagcacttactgcttcacctttcatttttatgttagggagagggcttctactcttaaacctcatgaatccacctctgctatcttcagacttttcttctacaacttcctcacctctctcagccttcataaaaatgaagagagttaaggccttgctctgaattaggctttgacttaagagaatgctgtggctggttttctatccagaactctaaaactttctccttatcaacaatgaggctgtttcactttcttatcattcctgtgttcactggagtggcacttttaacttccttcaagagcttttccttggcattcacaacttgactgttttgggtatgaggcctagttttcggcctatctctgctttcaacttgccttactcagcttaatcatttttagctttgatttaaagtgagagatgaatgactcttcctttcacttgaacactcagaggccactgtagggttattaattggcctaatttcagtattgctgtgtctcactgagggactggcccatcagcggagcagtcagaatatattcaacatttatcaaataagtttgccatcttaaatgggtacagtttgtggtggcccaaaacaattccaataacaatatcaaagatcactgttcacaaattgccataacaaatgcaataataatttaaaagtttgaaatattgggagaattaccaagatgtaacacagagacatgaaatgagcacatgctattggaaaaatggctctgatagacttgctcgacaaaaagctgtcacaaaccatcattttgttaaaaaaaaaaaacaatatttgcaaagcacaataaatgaaggtatgcctgtatactacatatttatttttaataatcatataagaaaattaattggatataaaataggctgttctaaaacagcaagagggaaataaactttaacaatgctgacagcagccatggcatacttgaatttttaggactcttgttaaatatgggtatgggaacttaccctctgcactagtatccagacacttactagattatggcccattggggtatttgcctctattacatatatttgctagactgtcattataccttgcaatctagtgtctttttctaggttgatattgtcacgtttaatctattatggcaatgatattactcttgctatgttaaatgtttttatcagacttccttgtagccccaaccaatctgagaagattgaaaatcaaggaatccttcactccttttgtaaacttggtaaaatggaatcaatgtttactagatctgctgttcttgtgaagatttctctgttcttcttcatcaagatttgccaatcttcctctgcactcttgccttctgcagtctttcctcttccataaaaatatcgcttataatattctttttttgaaatgaagtctcactctgtctcccaggctagagtgcagtgccatgatctcggctcactgcagcctctgcctcccagctttccagtgattctccttcttcagcctcccaagtaactgggattagaggtgcctgccaccatgcccagctaattttttgtatttttagtagagatgggtttcaccatgttgaccaggctggtcttgaactcctaactcctaatctcaggtgatccacccaccttggtctcccaaagtactgggattacaggcatgagcctgtatgccaccatgctcaacttccttataatattcttctagtcttatttcccaactgctggcttttatattttgaattgtcaatagaaagccctgcctatcgtgatgaggttaaggacacatgttttgctgagagaagtaacttccagctgagaatcttgtttagcaggagagaaaatcctctattttagagcctctcctggagcttagagtaagcattggcttttagaggtgttttctccctttttgatgtctggaagcactattttcaagtctgttagagacccactttaaataagtacaggtgctaatgctctgagtgcaagtctgtaagggttagtgagtcctcaaatcacagaagtctcctgaccaatgctgggatgttctactgttctccaagaatctgcagcttaaaagtattaaactaaatacagcagacaccctcagcatagcagtgaaccacaatggcagctgacaagcaggaacatttaatggattggtcagcaagaccacacttatatcttgtttaaaatgtgtcctttcctttgggagactgaggcaggcagatctcttgaggtcaggagttcaaaactagcctagtcaacatggagttttctaaaagtacaaacaaattagccaggtgtggtggcaggtggctgtaatcccagctacttgggaggctgaggcaggagaattgctggaacccaggaggctgaggttgcagtgagcaaagattgcaccactgtgctccaacctgggcaaaagagcaagactccatctcaaataaatacataaaataaaatgcatcgtttctctcaacagcaaaagccttattttttcatcctttaaatatgttactttcatagtaggataagatggtaccttgtctgagaggctaagacccccaggccacttgagaatttgagagcttttagaacttgatgagcatagctgactggatacttcgtgtcagcactgcttgtggtaattacaggatctgtggatcacaaggctcacaacttgtatcacaagttctacaagaaaattggctaacacatatttggctctgttaatcatttgctgagtttatatcttgtcccaccaaatgtattttttgaaatgccattacatgaaaaagtttcactattccaattatctgtgtttaccaacttgtggagtaagagtggctgactgaatatgtgctttttaactacactattatatacattggccaagctttttatattaaccctacccatgaagtatcaccaatatttcccccagtgtgaaattgacatttgtcaaaagccttttgccatataaaagtttttagttcttatatatgaaatctgtccctttttttcgacatgagttccccagcctgcttagctttgcccctaccacccaagatttttaagctttctatattttcttagaatttaagattttaaagtctttacttttttaaatcatttatttgtaaagggacatatttctcaagtgtgctagttttccttgattttaatggattaaaatgtgtcgtaggtgagccattttcttccaaatgacgaagagtttttgttcctttgaaagtctggcccaggattttgtttgtttttgtttttttaaagttcttattttacttacagagttaagaaagttgaataactatacaaccagtctctaaatagaagttctaataaatcctaagatgttgcagggcactgaaagaggacaaaatttgatccctaaagccctctccaatctcatactcggtgaaaataacaaacaaaaggcttcagtgttagtggaaaactgagttcttaaaaagcaggtaaaggtcctgtttggtccttctccagagctgaggagaaagggttttcagattataaataacagaggtgcccttgtatggcacagaattgcgataagactttacttcttaggggcttaaataatgaagtcagtaaaagaggactgaaaacgaacataaagaagagctttagctttgacgcaaagaattacatcagtgcttgacaaaaccgaggattcttaatttctaaaaacgctttctttaagcacttcctaacctttcattatctgagacaacatatcaagtgagcagcagtacaaaggatgcatgtgatttcgaaatgccacaattgagccaactgcagttgcacgcgtacgtagtatagagaggtgtgatcaaaaaaagaatatagggagcatagggcttcgtctgcatcaaaagatactctccccatcttctatagccttaagttttgcgaaggtaagtttctccccgcttgaaagcgcccccagggacaagaattcatcttgaccaagcctaaggccgtggcatgcaaggtgttgagtcaccgggtacagcggtcttgcgacataaatattatttgatgacgaaggtactcggggcccaggtgccaaggtaaaccactggcaaagatgaccgtggttaaggcagtagaaagcaggctcgacactgagacgcggttccagccctagaaggattgcattttacgattcaggcaaacttcgagtctcctcatgtgacatgtgtgcactcctggaccgttttaattatgagaaacgtggtttgcagcatgattccttccagtcgataaatcggaatctctctcgctcccaccccttcttaacttcaggcttcctgcatcccggagcactcccggcagccccttccctcccccgccccggggatgctccgactcggcgcttagccattcatcaaccggttcacaccggcggcggccgccgcggagtgacgtccggagggggcgggcctccgcccccgcctgtcggctcctggcccgcggttccaggccgcgattggtggctggagggttgcacgtcgcgccggctataaaggggagggcttgtgacgcaagggcgcctcggcgcgtgtattggctccttcggctgcgggccggctcggctacgcgctctgctccgagccgctcactgcatggtagagtctggtgcccccgccgccgcctgcatcgccgccaccgccgctccgccacgaccaccgccgcctcctgccctgcagccaccgccaccgcctgtgtcgccgccgcctcgggaccggctgtatgattaggccacaatcttcaatgagtaaacatattcctgtgagtagccgtcgcatcgtcgcctctcgggctgggaatccacgaccggccccccatccccgctgtcgcctttgttcggagcccggcgtctcctccaggttgccccgggttgcggttccggtgggtcccgggtgggagcgggcgggttatggccctgtggccggccgattgcggccggctgtgcggaggcagatgccgggcccctcggggctgcggggtggcggttggccgccggaggcaccggcttttgagtccctcccgagcccggagcgacgggggcggcgcggtccggcttctgcggcggccgggggcagtttcggcttccgcagcgggccgggtgggtggcacaaaagccgctttgtgaccgccgcctccgcccttggccctttggtctggcgcgacccgtccgggcatggcaggctccgcggcgtcccggggcctctttgttcggccggaggagagtggctgcactgggagcgggagacgtggcccggggtggggcgagggctgcgcgtgtcactgcggagccggatacggggagggcgcggcggtggcgggttcgcctccagatccgggcgggcgtggggtaggccggacagccaggcacgggtggtaacgatctggttccagagcttctcggagctccggggtgggcgcgggacagccactgggtgcagctacactcttgtgctcgacggccgggacccgagcctcagacaaaatggcctcggcgcccgcgcctgactgaaggcgcggcgcgaacccgtgattgcggcgcggagagggggcgcagcgggcgtgctcgggcgcacacagccgcgtgcgcggggcggcggccctctggggcattccgcgagctgcacccctgcccgggccagagtggggttctgctagg

SEQ ID NO: 2446 - DNA, 6000 bp, Homo sapiens
gctctgatagacttgctcgacaaaaagctgtcacaaaccatcattttgttaaaaaaaaaaaacaatatttgcaaagcacaataaatgaaggtatgcctgtatactacatatttatttttaataatcatataagaaaattaattggatataaaataggctgttctaaaacagcaagagggaaataaactttaacaatgctgacagcagccatggcatacttgaatttttaggactcttgttaaatatgggtatgggaacttaccctctgcactagtatccagacacttactagattatggcccattggggtatttgcctctattacatatatttgctagactgtcattataccttgcaatctagtgtctttttctaggttgatattgtcacgtttaatctattatggcaatgatattactcttgctatgttaaatgtttttatcagacttccttgtagccccaaccaatctgagaagattgaaaatcaaggaatccttcactccttttgtaaacttggtaaaatggaatcaatgtttactagatctgctgttcttgtgaagatttctctgttcttcttcatcaagatttgccaatcttcctctgcactcttgccttctgcagtctttcctcttccataaaaatatcgcttataatattctttttttgaaatgaagtctcactctgtctcccaggctagagtgcagtgccatgatctcggctcactgcagcctctgcctcccagctttccagtgattctccttcttcagcctcccaagtaactgggattagaggtgcctgccaccatgcccagctaattttttgtatttttagtagagatgggtttcaccatgttgaccaggctggtcttgaactcctaactcctaatctcaggtgatccacccaccttggtctcccaaagtactgggattacaggcatgagcctgtatgccaccatgctcaacttccttataatattcttctagtcttatttcccaactgctggcttttatattttgaattgtcaatagaaagccctgcctatcgtgatgaggttaaggacacatgttttgctgagagaagtaacttccagctgagaatcttgtttagcaggagagaaaatcctctattttagagcctctcctggagcttagagtaagcattggcttttagaggtgttttctccctttttgatgtctggaagcactattttcaagtctgttagagacccactttaaataagtacaggtgctaatgctctgagtgcaagtctgtaagggttagtgagtcctcaaatcacagaagtctcctgaccaatgctgggatgttctactgttctccaagaatctgcagcttaaaagtattaaactaaatacagcagacaccctcagcatagcagtgaaccacaatggcagctgacaagcaggaacatttaatggattggtcagcaagaccacacttatatcttgtttaaaatgtgtcctttcctttgggagactgaggcaggcagatctcttgaggtcaggagttcaaaactagcctagtcaacatggagttttctaaaagtacaaacaaattagccaggtgtggtggcaggtggctgtaatcccagctacttgggaggctgaggcaggagaattgctggaacccaggaggctgaggttgcagtgagcaaagattgcaccactgtgctccaacctgggcaaaagagcaagactccatctcaaataaatacataaaataaaatgcatcgtttctctcaacagcaaaagccttattttttcatcctttaaatatgttactttcatagtaggataagatggtaccttgtctgagaggctaagacccccaggccacttgagaatttgagagcttttagaacttgatgagcatagctgactggatacttcgtgtcagcactgcttgtggtaattacaggatctgtggatcacaaggctcacaacttgtatcacaagttctacaagaaaattggctaacacatatttggctctgttaatcatttgctgagtttatatcttgtcccaccaaatgtattttttgaaatgccattacatgaaaaagtttcactattccaattatctgtgtttaccaacttgtggagtaagagtggctgactgaatatgtgctttttaactacactattatatacattggccaagctttttatattaaccctacccatgaagtatcaccaatatttcccccagtgtgaaattgacatttgtcaaaagccttttgccatataaaagtttttagttcttatatatgaaatctgtccctttttttcgacatgagttccccagcctgcttagctttgcccctaccacccaagatttttaagctttctatattttcttagaatttaagattttaaagtctttacttttttaaatcatttatttgtaaagggacatatttctcaagtgtgctagttttccttgattttaatggattaaaatgtgtcgtaggtgagccattttcttccaaatgacgaagagtttttgttcctttgaaagtctggcccaggattttgtttgtttttgtttttttaaagttcttattttacttacagagttaagaaagttgaataactatacaaccagtctctaaatagaagttctaataaatcctaagatgttgcagggcactgaaagaggacaaaatttgatccctaaagccctctccaatctcatactcggtgaaaataacaaacaaaaggcttcagtgttagtggaaaactgagttcttaaaaagcaggtaaaggtcctgtttggtccttctccagagctgaggagaaagggttttcagattataaataacagaggtgcccttgtatggcacagaattgcgataagactttacttcttaggggcttaaataatgaagtcagtaaaagaggactgaaaacgaacataaagaagagctttagctttgacgcaaagaattacatcagtgcttgacaaaaccgaggattcttaatttctaaaaacgctttctttaagcacttcctaacctttcattatctgagacaacatatcaagtgagcagcagtacaaaggatgcatgtgatttcgaaatgccacaattgagccaactgcagttgcacgcgtacgtagtatagagaggtgtgatcaaaaaaagaatatagggagcatagggcttcgtctgcatcaaaagatactctccccatcttctatagccttaagttttgcgaaggtaagtttctccccgcttgaaagcgcccccagggacaagaattcatcttgaccaagcctaaggccgtggcatgcaaggtgttgagtcaccgggtacagcggtcttgcgacataaatattatttgatgacgaaggtactcggggcccaggtgccaaggtaaaccactggcaaagatgaccgtggttaaggcagtagaaagcaggctcgacactgagacgcggttccagccctagaaggattgcattttacgattcaggcaaacttcgagtctcctcatgtgacatgtgtgcactcctggaccgttttaattatgagaaacgtggtttgcagcatgattccttccagtcgataaatcggaatctctctcgctcccaccccttcttaacttcaggcttcctgcatcccggagcactcccggcagccccttccctcccccgccccggggatgctccgactcggcgcttagccattcatcaaccggttcacaccggcggcggccgccgcggagtgacgtccggagggggcgggcctccgcccccgcctgtcggctcctggcccgcggttccaggccgcgattggtggctggagggttgcacgtcgcgccggctataaaggggagggcttgtgacgcaagggcgcctcggcgcgtgtattggctccttcggctgcgggccggctcggctacgcgctctgctccgagccgctcactgcatggtagagtctggtgcccccgccgccgcctgcatcgccgccaccgccgctccgccacgaccaccgccgcctcctgccctgcagccaccgccaccgcctgtgtcgccgccgcctcgggaccggctgtatgattaggccacaatcttcaatgagtaaacatattcctgtgagtagccgtcgcatcgtcgcctctcgggctgggaatccacgaccggccccccatccccgctgtcgcctttgttcggagcccggcgtctcctccaggttgccccgggttgcggttccggtgggtcccgggtgggagcgggcgggttatggccctgtggccggccgattgcggccggctgtgcggaggcagatgccgggcccctcggggctgcggggtggcggttggccgccggaggcaccggcttttgagtccctcccgagcccggagcgacgggggcggcgcggtccggcttctgcggcggccgggggcagtttcggcttccgcagcgggccgggtgggtggcacaaaagccgctttgtgaccgccgcctccgcccttggccctttggtctggcgcgacccgtccgggcatggcaggctccgcggcgtcccggggcctctttgttcggccggaggagagtggctgcactgggagcgggagacgtggcccggggtggggcgagggctgcgcgtgtcactgcggagccggatacggggagggcgcggcggtggcgggttcgcctccagatccgggcgggcgtggggtaggccggacagccaggcacgggtggtaacgatctggttccagagcttctcggagctccggggtgggcgcgggacagccactgggtgcagctacactcttgtgctcgacggccgggacccgagcctcagacaaaatggcctcggcgcccgcgcctgactgaaggcgcggcgcgaacccgtgattgcggcgcggagagggggcgcagcgggcgtgctcgggcgcacacagccgcgtgcgcggggcggcggccctctggggcattccgcgagctgcacccctgcccgggccagagtggggttctgctaggtgagaacttcggccgtccgccccgccctcctcccaggctccacctggtaattcgagctgttccggatttatcgccccacctcgggctcgtgataatgggaacaagtctagtcttgtcctttctctgggccagtcgtcgagaaatggcctggttcggagcgtcttggaaactgacagggctactgttagttacactgacgcgaaggacttcccgtccgggcaccagcatacatttcccctgccaattttggaagggccctggatggcgccttttaatcggggactgtttagaactatccctgagctctgtggtgtaatatgttgttgcctcctgttggtttgtggcagcagtagccaaccagagacggaattctgagggttttttatcttctgtccgcggagccccctaccagtccacgagtattaagttatttacactacgattggaactgttgacctgcccgacatctagatcctgaggcagtgcttcctgttactcagtcagttgaaaactagaaaactaaatcattcccaagagtgagcagcattttacacatgctttcttaggtgccctaagacctaaatagatgtggaacagactatacaacgaattgtttgtgacaaaggagttacacacattaattggcttgactctgcagtataataatgatttaagcttctgcacagagattactctttcctcctctcccttcttgtatatgattgtgattataatgcaactgataggtgggagggaaaaaatccccattatggatagtttttcctgtgggtaggagattgggaatggaggagtgtcttgggcggaacagaaatctatcggtggccaccactgctttaacagacgagtccccccatccactaggtggctccactcagtaaaaataaccatttcaggaagggaattcttaatatagttctttctctgcttcctgatgaaagtgcttacttacatgaagggatatggccagactagg

SEQ ID NO: 2447 - DNA, 6000 bp, Homo sapiens
cctggataaaacgtacattaaaaaaatcttaatgtttaaccacatcactataactcaacattttatattctgatcatctctgatcagtaagtatgctggttaacagaagatcatttaaagaatgctagaatccatttatgtttaacacaaaagcaaattttgttttaagtgacaatgctagaatataaaaagaaaagtgaatattaaataccatacatatttttaataaactggaaaagttttccttcttttgtttaaattgtgtgcccccttcatacactgaagttgtttacagtcatggtaataccggattgggatgaaacattaaccaaaaggggctagcagcaatgcagacaaaggtaaatgtaactaaaggcattatttataactaatcgggtaatctgacttcactcaattatactcactccttaaactttactgatttacattgaatgaagtcttaactacagtaaaaaagcccacataccatttaaaactacaggcttcaaaatgcattattactaattacatattactaatataatatactattatatacactatatagtatatattagtgtatatataatatatagtaataaaaattaaagtaccattaaagtatttcccagccaggcgtggtggctcacctgaggtcaggagttcgagaccagcctggccaatatggtgaaactacatctaaaaatacaaaaattagctgggcaaggtggcgtacgcctgtagtctcagctacttgggaggctgaggcaggagaattgcttgaacccgggaggcagaggttgcagtgggctgagatcatgccactgcactccagcctgggtgacagaacgagactccatctcaaaaaaaggaaaaaaaagtatttccattatgttctgagaggcctatttgctatttcttaacaactgtaggtatttataaaataaaacatgtgcacatcccgatatattattcagcattcaattcctttctcctagtaaaaagaggcaggtagagttttggctacatagctaccattaggaaggaacagaatttgtagttgaaaattggattctaagcatcagatggggttcaagaaaaaccaactggtttatggcattagtcattaggttaagcagatatataaaaaatccataaatggcaacctttcccatgtaaatttcttacaagataagtaagagctatactgttttactgtccacataccaattcaagcaaactcaggtacaataactattaactcaagcacatgcccttctcaaaatgtacaaatatacctctaacctatagaagacattgacatttatttctgggaactggaattgtaggtatatcatctcattttttccaaagtagtttttattttgttagctataagtcccactattatattgcaatcaatttaagctactaaaacatatcaaatcttacctctataaatttgtttaaggtcgcattggttggattgtgtgtaataagaaatctcatgttcttgtatgtgacttccacaggagctgggcggttcattcgagccatgttaatttagttaaaaaacactcaatagggttatgaaataattaaaaaaattgaatacagaaatgatgcaaagaaactgaagtctacttcaatatactccacttgaaattctcagtgctttgagtatgaagttgtaagtaatgataagtgaaatgaacctcctaacaagaagcagcaattcttcaatccagtaatactgaggccaacagaaaagaagtgcactgaggtttaccccatccaggtcagaactcttgtaaaatgctctgtggatttcaattcaacacttctgtgtccaggataaccactcttatgggggcttcttggtggagcagtaatcagtttctacagttcacttgtctgcatagaggtcgtgctgtgcctggcagtaatctccactgcccttcagaaactccataaatgtgtgaccaagaacaccacagaattgctgtttaaaagaaaaagacagaaagagagaataagttattttccaattcaaaagaaatacattagggttttacactatttaagtacacaactatttttctaaagcagggcctgagccgcttcatcgacttttacttgaattgcaaaactcaaggggtgagtacagattaaatcaatcagcataaaacaagcagtcagatagattaaactgaaatccatgatctattaccaagattcctcagaaaaaaaaaccaaacccattgttacatttttgtgaaattcatatatatattcatatatattctatctagttatattctctgtatatatactatctatatataatatataattatatgattctaataattatccctttcgatagttgttttctttacattgtaattacatacactttatgttgatttttccaactaacaaaaacatttttacacattaatacaaactccagataactctgaagttattagtcttgcataatttacttaactcataaactgaaacatctaagttcttttccaactttatgcttttatatccttttcttagactgatttaagtcctatatttagaatctcactttatccttaacaatctgttatcattcccattaaactgaagacgaggaaaatgagtctctgaaaatcaacttgttatgtgaaatatcataagaatgtatgcttatgaatctaaaaaggaaacaactctcatttataactgtaaagaaaatattcataattttaataatgttcttttgtattttaaaaccaaaatttcacatatacaactcaaaactgaaatccaactcagagaaggcggacaaagggatgttgaaggtggaagtggcaggtctcaaaagcaaggtaactactgtaaccaataaatataaacaaatatgaatgtatttatattttctctaagttcccccttaagaactaaaccatttttatgccaatatcaaacattaaaccaatagtcacagcatatttttaaaatatgtacatggaagacactgatgttaataatcagtcttcttccaaatagtttataaggtacttgtgtactcgggagtaaagagggcactaaggaaagtattaataacaggttaacaagagcagtaattcatagtcactgcctcaagcacttcatgtgtactctcattaccaaagtgttttaacaaaaggttccattagtttccatgcttaaatttaagcatttgaagtcttaaaattaaaattcaaacgatctgctcccatttccattttacacctttaaatagtcccatgctagttatagtttctagaactttgctaaattttgaagaataattcttatgatgattactgcagaaaacatcaagtcaaaaacccagtctacttttctggtaaaacatacaactagcattaacaatcatttatcaaaaggtcccataaaaaaggtaactttcattatcacaagtttgttcaaacaagccctcagaggttacttcacctagttggtcagctgggttaaaaaattaagtgtctaaattacaaagccatcacagttacagtgaatacagattgtagtaatctgaaaataatttcattatactttcaccccaaattctaaatacaacctccgtagaataaaaagtgtattctgacactttcccaatgacatacaatgatctttaaaagctttataatgactcatcacagtattctaatttctaggtattacctttttttcaattaaaagctaatttgaggcagtatttcacaccactatttccatatttaatagctaaaactcctgtcggctacaacctagtctggccatatcccttcatgtaagtaagcactttcatcaggaagcagagaaagaactatattaagaattcccttcctgaaatggttatttttactgagtggagccacctagtggatggggggactcgtctgttaaagcagtggtggccaccgatagatttctgttccgcccaagacactcctccattcccaatctcctacccacaggaaaaactatccataatggggattttttccctcccacctatcagttgcattataatcacaatcatatacaagaagggagaggaggaaagagtaatctctgtgcagaagcttaaatcattattatactgcagagtcaagccaattaatgtgtgtaactcctttgtcacaaacaattcgttgtatagtctgttccacatctatttaggtcttagggcacctaagaaagcatgtgtaaaatgctgctcactcttgggaatgatttagttttctagttttcaactgactgagtaacaggaagcactgcctcaggatctagatgtcgggcaggtcaacagttccaatcgtagtgtaaataacttaatactcgtggactggtagggggctccgcggacagaagataaaaaaccctcagaattccgtctctggttggctactgctgccacaaaccaacaggaggcaacaacatattacaccacagagctcagggatagttctaaacagtccccgattaaaaggcgccatccagggcccttccaaaattggcaggggaaatgtatgctggtgcccggacgggaagtccttcgcgtcagtgtaactaacagtagccctgtcagtttccaagacgctccgaaccaggccatttctcgacgactggcccagagaaaggacaagactagacttgttcccattatcacgagcccgaggtggggcgataaatccggaacagctcgaattaccaggtggagcctgggaggagggcggggcggacggccgaagttctcacctagcagaaccccactctggcccgggcaggggtgcagctcgcggaatgccccagagggccgccgccccgcgcacgcggctgtgtgcgcccgagcacgcccgctgcgccccctctccgcgccgcaatcacgggttcgcgccgcgccttcagtcaggcgcgggcgccgaggccattttgtctgaggctcgggtcccggccgtcgagcacaagagtgtagctgcacccagtggctgtcccgcgcccaccccggagctccgagaagctctggaaccagatcgttaccacccgtgcctggctgtccggcctaccccacgcccgcccggatctggaggcgaacccgccaccgccgcgccctccccgtatccggctccgcagtgacacgcgcagccctcgccccaccccgggccacgtctcccgctcccagtgcagccactctcctccggccgaacaaagaggccccgggacgccgcggagcctgccatgcccggacgggtcgcgccagaccaaagggccaagggcggaggcggcggtcacaaagcggcttttgtgccacccacccggcccgctgcggaagccgaaactgcccccggccgccgcagaagccggaccgcgccgcccccgtcgctccgggctcgggagggactcaaaagccggtgcctccggcggccaaccgccaccccgcagccccgaggggcccggcatctgcctccgcacagccggccgcaatcggccggccacagggccataacccgcccgctcccacccgggacccaccggaaccgcaacccggggcaacctggaggagacgccgggctccgaacaaaggcgacagcggggatggggggccggtcgtggattcccagcccgagaggcgacgatgcgacggctactcacaggaatatgtttactcattgaagattgtggcctaatcatacagccggtcccgaggcggcggcgacacaggcggtggcggtggctgcagggcaggaggcggcggtggtcgtggcggagcggcggtggcggcgatgcaggcggcggcgggggcaccagactctaccatgcagtgagcggctcggagcagagcgcgtagccgagccggcccgcagccgaaggagccaatacacgcgccgaggcgcccttgcgtcacaagccctcccctttatagccggcgcgacg

SEQ ID NO: 2448 - DNA, 6000 bp, Homo sapiens
ttaagttttgcgaaggtaagtttctccccgcttgaaagcgcccccagggacaagaattcatcttgaccaagcctaaggccgtggcatgcaaggtgttgagtcaccgggtacagcggtcttgcgacataaatattatttgatgacgaaggtactcggggcccaggtgccaaggtaaaccactggcaaagatgaccgtggttaaggcagtagaaagcaggctcgacactgagacgcggttccagccctagaaggattgcattttacgattcaggcaaacttcgagtctcctcatgtgacatgtgtgcactcctggaccgttttaattatgagaaacgtggtttgcagcatgattccttccagtcgataaatcggaatctctctcgctcccaccccttcttaacttcaggcttcctgcatcccggagcactcccggcagccccttccctcccccgccccggggatgctccgactcggcgcttagccattcatcaaccggttcacaccggcggcggccgccgcggagtgacgtccggagggggcgggcctccgcccccgcctgtcggctcctggcccgcggttccaggccgcgattggtggctggagggttgcacgtcgcgccggctataaaggggagggcttgtgacgcaagggcgcctcggcgcgtgtattggctccttcggctgcgggccggctcggctacgcgctctgctccgagccgctcactgcatggtagagtctggtgcccccgccgccgcctgcatcgccgccaccgccgctccgccacgaccaccgccgcctcctgccctgcagccaccgccaccgcctgtgtcgccgccgcctcgggaccggctgtatgattaggccacaatcttcaatgagtaaacatattcctgtgagtagccgtcgcatcgtcgcctctcgggctgggaatccacgaccggccccccatccccgctgtcgcctttgttcggagcccggcgtctcctccaggttgccccgggttgcggttccggtgggtcccgggtgggagcgggcgggttatggccctgtggccggccgattgcggccggctgtgcggaggcagatgccgggcccctcggggctgcggggtggcggttggccgccggaggcaccggcttttgagtccctcccgagcccggagcgacgggggcggcgcggtccggcttctgcggcggccgggggcagtttcggcttccgcagcgggccgggtgggtggcacaaaagccgctttgtgaccgccgcctccgcccttggccctttggtctggcgcgacccgtccgggcatggcaggctccgcggcgtcccggggcctctttgttcggccggaggagagtggctgcactgggagcgggagacgtggcccggggtggggcgagggctgcgcgtgtcactgcggagccggatacggggagggcgcggcggtggcgggttcgcctccagatccgggcgggcgtggggtaggccggacagccaggcacgggtggtaacgatctggttccagagcttctcggagctccggggtgggcgcgggacagccactgggtgcagctacactcttgtgctcgacggccgggacccgagcctcagacaaaatggcctcggcgcccgcgcctgactgaaggcgcggcgcgaacccgtgattgcggcgcggagagggggcgcagcgggcgtgctcgggcgcacacagccgcgtgcgcggggcggcggccctctggggcattccgcgagctgcacccctgcccgggccagagtggggttctgctaggtgagaacttcggccgtccgccccgccctcctcccaggctccacctggtaattcgagctgttccggatttatcgccccacctcgggctcgtgataatgggaacaagtctagtcttgtcctttctctgggccagtcgtcgagaaatggcctggttcggagcgtcttggaaactgacagggctactgttagttacactgacgcgaaggacttcccgtccgggcaccagcatacatttcccctgccaattttggaagggccctggatggcgccttttaatcggggactgtttagaactatccctgagctctgtggtgtaatatgttgttgcctcctgttggtttgtggcagcagtagccaaccagagacggaattctgagggttttttatcttctgtccgcggagccccctaccagtccacgagtattaagttatttacactacgattggaactgttgacctgcccgacatctagatcctgaggcagtgcttcctgttactcagtcagttgaaaactagaaaactaaatcattcccaagagtgagcagcattttacacatgctttcttaggtgccctaagacctaaatagatgtggaacagactatacaacgaattgtttgtgacaaaggagttacacacattaattggcttgactctgcagtataataatgatttaagcttctgcacagagattactctttcctcctctcccttcttgtatatgattgtgattataatgcaactgataggtgggagggaaaaaatccccattatggatagtttttcctgtgggtaggagattgggaatggaggagtgtcttgggcggaacagaaatctatcggtggccaccactgctttaacagacgagtccccccatccactaggtggctccactcagtaaaaataaccatttcaggaagggaattcttaatatagttctttctctgcttcctgatgaaagtgcttacttacatgaagggatatggccagactaggttgtagccgacaggagttttagctattaaatatggaaatagtggtgtgaaatactgcctcaaattagcttttaattgaaaaaaaggtaatacctagaaattagaatactgtgatgagtcattataaagcttttaaagatcattgtatgtcattgggaaagtgtcagaatacactttttattctacggaggttgtatttagaatttggggtgaaagtataatgaaattattttcagattactacaatctgtattcactgtaactgtgatggctttgtaatttagacacttaattttttaacccagctgaccaactaggtgaagtaacctctgagggcttgtttgaacaaacttgtgataatgaaagttaccttttttatgggaccttttgataaatgattgttaatgctagttgtatgttttaccagaaaagtagactgggtttttgacttgatgttttctgcagtaatcatcataagaattattcttcaaaatttagcaaagttctagaaactataactagcatgggactatttaaaggtgtaaaatggaaatgggagcagatcgtttgaattttaattttaagacttcaaatgcttaaatttaagcatggaaactaatggaaccttttgttaaaacactttggtaatgagagtacacatgaagtgcttgaggcagtgactatgaattactgctcttgttaacctgttattaatactttccttagtgccctctttactcccgagtacacaagtaccttataaactatttggaagaagactgattattaacatcagtgtcttccatgtacatattttaaaaatatgctgtgactattggtttaatgtttgatattggcataaaaatggtttagttcttaagggggaacttagagaaaatataaatacattcatatttgtttatatttattggttacagtagttaccttgcttttgagacctgccacttccaccttcaacatccctttgtccgccttctctgagttggatttcagttttgagttgtatatgtgaaattttggttttaaaatacaaaagaacattattaaaattatgaatattttctttacagttataaatgagagttgtttcctttttagattcataagcatacattcttatgatatttcacataacaagttgattttcagagactcattttcctcgtcttcagtttaatgggaatgataacagattgttaaggataaagtgagattctaaatataggacttaaatcagtctaagaaaaggatataaaagcataaagttggaaaagaacttagatgtttcagtttatgagttaagtaaattatgcaagactaataacttcagagttatctggagtttgtattaatgtgtaaaaatgtttttgttagttggaaaaatcaacataaagtgtatgtaattacaatgtaaagaaaacaactatcgaaagggataattattagaatcatataattatatattatatatagatagtatatatacagagaatataactagatagaatatatatgaatatatatatgaatttcacaaaaatgtaacaatgggtttggtttttttttctgaggaatcttggtaatagatcatggatttcagtttaatctatctgactgcttgttttatgctgattgatttaatctgtactcaccccttgagttttgcaattcaagtaaaagtcgatgaagcggctcaggccctgctttagaaaaatagttgtgtacttaaatagtgtaaaaccctaatgtatttcttttgaattggaaaataacttattctctctttctgtctttttcttttaaacagcaattctgtggtgttcttggtcacacatttatggagtttctgaagggcagtggagattactgccaggcacagcacgacctctatgcagacaagtgaactgtagaaactgattactgctccaccaagaagcccccataagagtggttatcctggacacagaagtgttgaattgaaatccacagagcattttacaagagttctgacctggatggggtaaacctcagtgcacttcttttctgttggcctcagtattactggattgaagaattgctgcttcttgttaggaggttcatttcacttatcattacttacaacttcatactcaaagcactgagaatttcaagtggagtatattgaagtagacttcagtttctttgcatcatttctgtattcaatttttttaattatttcataaccctattgagtgttttttaactaaattaacatggctcgaatgaaccgcccagctcctgtggaagtcacatacaagaacatgagatttcttattacacacaatccaaccaatgcgaccttaaacaaatttatagaggtaagatttgatatgttttagtagcttaaattgattgcaatataatagtgggacttatagctaacaaaataaaaactactttggaaaaaatgagatgatatacctacaattccagttcccagaaataaatgtcaatgtcttctataggttagaggtatatttgtacattttgagaagggcatgtgcttgagttaatagttattgtacctgagtttgcttgaattggtatgtggacagtaaaacagtatagctcttacttatcttgtaagaaatttacatgggaaaggttgccatttatggattttttatatatctgcttaacctaatgactaatgccataaaccagttggtttttcttgaaccccatctgatgcttagaatccaattttcaactacaaattctgttccttcctaatggtagctatgtagccaaaactctacctgcctctttttactaggagaaaggaattgaatgctgaataatatatcgggatgtgcacatgttttattttataaatacctacagttgttaagaaatagcaaataggcctctcagaacataatggaaatacttttttttcctttttttgagatggagtctcgttctgtcacccaggctggagtgcagtggcatgatctcagcccactgcaacctctgcctcccgggttcaagcaattctcctgcctcagcctcccaagtagctgagactacaggcgtacgccaccttgcccagctaatttttgtatttttagatgtagtttcaccatattggccaggctggtctcgaactcctgacctcaggtgagccaccacgcctggctgggaaatactttaatggtac

SEQ ID NO: 2449 - DNA, 6000 bp, Homo sapiens
ctatcgaaagggataattattagaatcatataattatatattatatatagatagtatatatacagagaatataactagatagaatatatatgaatatatatatgaatttcacaaaaatgtaacaatgggtttggtttttttttctgaggaatcttggtaatagatcatggatttcagtttaatctatctgactgcttgttttatgctgattgatttaatctgtactcaccccttgagttttgcaattcaagtaaaagtcgatgaagcggctcaggccctgctttagaaaaatagttgtgtacttaaatagtgtaaaaccctaatgtatttcttttgaattggaaaataacttattctctctttctgtctttttcttttaaacagcaattctgtggtgttcttggtcacacatttatggagtttctgaagggcagtggagattactgccaggcacagcacgacctctatgcagacaagtgaactgtagaaactgattactgctccaccaagaagcccccataagagtggttatcctggacacagaagtgttgaattgaaatccacagagcattttacaagagttctgacctggatggggtaaacctcagtgcacttcttttctgttggcctcagtattactggattgaagaattgctgcttcttgttaggaggttcatttcacttatcattacttacaacttcatactcaaagcactgagaatttcaagtggagtatattgaagtagacttcagtttctttgcatcatttctgtattcaatttttttaattatttcataaccctattgagtgttttttaactaaattaacatggctcgaatgaaccgcccagctcctgtggaagtcacatacaagaacatgagatttcttattacacacaatccaaccaatgcgaccttaaacaaatttatagaggtaagatttgatatgttttagtagcttaaattgattgcaatataatagtgggacttatagctaacaaaataaaaactactttggaaaaaatgagatgatatacctacaattccagttcccagaaataaatgtcaatgtcttctataggttagaggtatatttgtacattttgagaagggcatgtgcttgagttaatagttattgtacctgagtttgcttgaattggtatgtggacagtaaaacagtatagctcttacttatcttgtaagaaatttacatgggaaaggttgccatttatggattttttatatatctgcttaacctaatgactaatgccataaaccagttggtttttcttgaaccccatctgatgcttagaatccaattttcaactacaaattctgttccttcctaatggtagctatgtagccaaaactctacctgcctctttttactaggagaaaggaattgaatgctgaataatatatcgggatgtgcacatgttttattttataaatacctacagttgttaagaaatagcaaataggcctctcagaacataatggaaatacttttttttcctttttttgagatggagtctcgttctgtcacccaggctggagtgcagtggcatgatctcagcccactgcaacctctgcctcccgggttcaagcaattctcctgcctcagcctcccaagtagctgagactacaggcgtacgccaccttgcccagctaatttttgtatttttagatgtagtttcaccatattggccaggctggtctcgaactcctgacctcaggtgagccaccacgcctggctgggaaatactttaatggtactttaatttttattactatatattatatatacactaatatatactatatagtgtatataatagtatattatattagtaatatgtaattagtaataatgcattttgaagcctgtagttttaaatggtatgtgggcttttttactgtagttaagacttcattcaatgtaaatcagtaaagtttaaggagtgagtataattgagtgaagtcagattacccgattagttataaataatgcctttagttacatttacctttgtctgcattgctgctagccccttttggttaatgtttcatcccaatccggtattaccatgactgtaaacaacttcagtgtatgaagggggcacacaatttaaacaaaagaaggaaaacttttccagtttattaaaaatatgtatggtatttaatattcacttttctttttatattctagcattgtcacttaaaacaaaatttgcttttgtgttaaacataaatggattctagcattctttaaatgatcttctgttaaccagcatacttactgatcagagatgatcagaatataaaatgttgagttatagtgatgtggttaaacattaagatttttttaatgtacgttttatccaggaacttaagaagtatggagttaccacaatagtaagagtatgtgaagcaacttatgacactactcttgtggagaaagaaggtatccatgttcttgtaagtatttaacagttcttatgggtttatggtgctgtgctacaaaagtttattcaaatagtaaattcaaataaatatctatttaagtcataaatagacctcaaaaagctaaaaacaaatattatattattgtgcagaatcttaatttctaaataaaggtgaaaagctaagcaaggatttgaagttgtgaaacatttttgtaaagattgagcatttagtcacatttggtagacaacagggtttaataagatttgattaaacattaaaatgagaatgcttttgaaaacatttccatgttagaaatttagaattattactacagtgtttatattaatgatctaaaatgtttaaatattcttctgacttaggattggccttttgatgatggtgcaccaccatccaaccagattgttgatgactggttaagtcttgtgaaaattaagtttcgtgaagaacctggttgttgtattgctgttcattgcgttgcaggccttgggaggtaaatgaatttatcaatttgattctaggtaaaaatctattgataatgaaaatacagaaacttgaaaaattcttataattttttaatataaagtcaacatttgtcataggtattacttaaataggaagggtggtagataatacttctgagttggggaatgtttggagaaataaatttacaaagatctgattttgaaaaaactatttatcaaaattcttacctcaccagagctccagtacttgttgccctagcattaattgaaggtggaatgaaatacgaagatgcagtacaattcataagacagtaagtaatggattctcttttcatttgtactctctttcatttccttgttgagtgtcagtgagtttaatagtctaatagcccatttaatcattatgattattttttgagatagtattaaaaccaggaaatcaagatcttacattcttttttgcatttcatgcagttgctcatattactaagattctaatccaacaagagtttttgaattattgttttgctttaaatacttgattgaatatgttggttattttgtatttttattgaggtataattaagatacatttaaagatacaataaaatgcacaggtctccaaaggagaccagttgacaataacagccaaattaaccatccaatacaacacatagaatattttgagtgctgtagaacatgcctttgtggcttttgtagtcatcttccctgctaccagaggcaacttctgacttcactataaattagttttgtcttttcgtggacttacgtgtaaatggatttgtgagtcgactgttgtaaccaatactcaaacgaagatataaagaaaattaactttttatgattttttccatttacactgatgtgcctgttcatattcctttctgcatcaggtcacagcctaattaatcaaaagataaattgccacaagagaggtgatggttgtctataagacactaaatattactgtagggggcttttgccttgtttcatttttttttttttttcctcccagaaagcggcgtggagcttttaacagcaagcaacttctgtatttggagaagtatcgtcctaaaatgcggctgcgtttcaaagattccaacggtcatagaaacaactgttgcattcaataaaattggggtgcctaatgctactggaagtggaacttgagatagggcctaatttgttatacatattagccaacatgttggcttagtaagtctaatgaagcttccataggagtattgaaaggcagttttaccaggcctcaagctagacagatttggcaacctctgtatttgggttacagtcaacctatttggatacttggcaaaagattcttgctgtcagcatataaaatgtgcttgtcatttgtatcaattgacctttccccaaatcatgcagtattgagttatgacttgttaaatctattcccatgccagaatcttatcaatacataagaaatttaggaagattaggtgccaaaatacccagcacaatacttgtatatttttagtaccatacagaagtaaaatcccaggaactatgaacactagaccttatgtggtttattccttcaatcatttcaaacattgaaagtagggcctacatggttatttgcctgctcactttatgtttacatctcccacattcataccaatatacgtcaggtttgcttaaccattgatttttttttttttttaccaagtcttacagtgattattttacgtgtttccatgtatctcactttgtgctgtattaaaaaaacctccattttgaaaatctacgttgtacagaagcacatgtctttaatgtcttcagacaaaaaagccttacattaatttaatgtttgcactctgaggtgcaacttaacagggagggcctgagaaaagaatgggagggggctattaattatttttagcaaaatgttgcctttgtcttgtgcaaacatgtagaatatgctctttaatttagtaaaatatttttttaaaaggtagagatgctttgttattgtaatcataaacttcctgaaattcttgtaatttttttcccatacttatcagaagtgtgtttaccaacttatttttgtttgaaagtgtgattttttttttccttcccaacctctcttgcaaaaaaagaaatgggtttctgctaatgaattgagcagacatctaatattttatatgccttttgagctgtgtaacttaatatttggatacttgacaatttgttttattatgtaattgataaaatggtgatgtgtattaatgttagttcaaccatatatttatactgtctggggatgtgtggttatagttctgtgggagaaataattttgtcagtgttcaccagcttgtaaaaacttagtgcgagagctgaaacatctaaataaataatgacatgcatttatcatcattgagattggtttgcttaaaattaacttattttgtagaagacaaaatgaattgcacttcacttaatgtgtgtcctcatctttttacaaataaatgaaggattataaatgatgtcagcattttagtaaacttttagacaaaatttgttagggtcattcatgaaaactttaatactaaaagcactttccattatatactttttaaaggtctagataattttgaaccaatttattattgtgtactgaggagaaataatgtatagtagaggacagccttggtttgtaaagctcagttccactagttcatggttttgtgcaacttctgagcctcagttttctcctttgcaaattaataattacatacctttatagattttgaaattaatttaaatattagtatttggtacatgaaggcttaatgttaagtttcctttaatgatccacaataatccctttgatcacgttaatctaaatctagatgtctttgtctaattttttttgaatagcagttataaatgtaaaggactcaaagtttaagtaaaaagtgatactccaccttgtgtttcaaagaatttagttccacctcttcataccagt

SEQ ID NO: 2450 - DNA, 6000 bp, Homo sapiens
ctgattactgctccaccaagaagcccccataagagtggttatcctggacacagaagtgttgaattgaaatccacagagcattttacaagagttctgacctggatggggtaaacctcagtgcacttcttttctgttggcctcagtattactggattgaagaattgctgcttcttgttaggaggttcatttcacttatcattacttacaacttcatactcaaagcactgagaatttcaagtggagtatattgaagtagacttcagtttctttgcatcatttctgtattcaatttttttaattatttcataaccctattgagtgttttttaactaaattaacatggctcgaatgaaccgcccagctcctgtggaagtcacatacaagaacatgagatttcttattacacacaatccaaccaatgcgaccttaaacaaatttatagaggtaagatttgatatgttttagtagcttaaattgattgcaatataatagtgggacttatagctaacaaaataaaaactactttggaaaaaatgagatgatatacctacaattccagttcccagaaataaatgtcaatgtcttctataggttagaggtatatttgtacattttgagaagggcatgtgcttgagttaatagttattgtacctgagtttgcttgaattggtatgtggacagtaaaacagtatagctcttacttatcttgtaagaaatttacatgggaaaggttgccatttatggattttttatatatctgcttaacctaatgactaatgccataaaccagttggtttttcttgaaccccatctgatgcttagaatccaattttcaactacaaattctgttccttcctaatggtagctatgtagccaaaactctacctgcctctttttactaggagaaaggaattgaatgctgaataatatatcgggatgtgcacatgttttattttataaatacctacagttgttaagaaatagcaaataggcctctcagaacataatggaaatacttttttttcctttttttgagatggagtctcgttctgtcacccaggctggagtgcagtggcatgatctcagcccactgcaacctctgcctcccgggttcaagcaattctcctgcctcagcctcccaagtagctgagactacaggcgtacgccaccttgcccagctaatttttgtatttttagatgtagtttcaccatattggccaggctggtctcgaactcctgacctcaggtgagccaccacgcctggctgggaaatactttaatggtactttaatttttattactatatattatatatacactaatatatactatatagtgtatataatagtatattatattagtaatatgtaattagtaataatgcattttgaagcctgtagttttaaatggtatgtgggcttttttactgtagttaagacttcattcaatgtaaatcagtaaagtttaaggagtgagtataattgagtgaagtcagattacccgattagttataaataatgcctttagttacatttacctttgtctgcattgctgctagccccttttggttaatgtttcatcccaatccggtattaccatgactgtaaacaacttcagtgtatgaagggggcacacaatttaaacaaaagaaggaaaacttttccagtttattaaaaatatgtatggtatttaatattcacttttctttttatattctagcattgtcacttaaaacaaaatttgcttttgtgttaaacataaatggattctagcattctttaaatgatcttctgttaaccagcatacttactgatcagagatgatcagaatataaaatgttgagttatagtgatgtggttaaacattaagatttttttaatgtacgttttatccaggaacttaagaagtatggagttaccacaatagtaagagtatgtgaagcaacttatgacactactcttgtggagaaagaaggtatccatgttcttgtaagtatttaacagttcttatgggtttatggtgctgtgctacaaaagtttattcaaatagtaaattcaaataaatatctatttaagtcataaatagacctcaaaaagctaaaaacaaatattatattattgtgcagaatcttaatttctaaataaaggtgaaaagctaagcaaggatttgaagttgtgaaacatttttgtaaagattgagcatttagtcacatttggtagacaacagggtttaataagatttgattaaacattaaaatgagaatgcttttgaaaacatttccatgttagaaatttagaattattactacagtgtttatattaatgatctaaaatgtttaaatattcttctgacttaggattggccttttgatgatggtgcaccaccatccaaccagattgttgatgactggttaagtcttgtgaaaattaagtttcgtgaagaacctggttgttgtattgctgttcattgcgttgcaggccttgggaggtaaatgaatttatcaatttgattctaggtaaaaatctattgataatgaaaatacagaaacttgaaaaattcttataattttttaatataaagtcaacatttgtcataggtattacttaaataggaagggtggtagataatacttctgagttggggaatgtttggagaaataaatttacaaagatctgattttgaaaaaactatttatcaaaattcttacctcaccagagctccagtacttgttgccctagcattaattgaaggtggaatgaaatacgaagatgcagtacaattcataagacagtaagtaatggattctcttttcatttgtactctctttcatttccttgttgagtgtcagtgagtttaatagtctaatagcccatttaatcattatgattattttttgagatagtattaaaaccaggaaatcaagatcttacattcttttttgcatttcatgcagttgctcatattactaagattctaatccaacaagagtttttgaattattgttttgctttaaatacttgattgaatatgttggttattttgtatttttattgaggtataattaagatacatttaaagatacaataaaatgcacaggtctccaaaggagaccagttgacaataacagccaaattaaccatccaatacaacacatagaatattttgagtgctgtagaacatgcctttgtggcttttgtagtcatcttccctgctaccagaggcaacttctgacttcactataaattagttttgtcttttcgtggacttacgtgtaaatggatttgtgagtcgactgttgtaaccaatactcaaacgaagatataaagaaaattaactttttatgattttttccatttacactgatgtgcctgttcatattcctttctgcatcaggtcacagcctaattaatcaaaagataaattgccacaagagaggtgatggttgtctataagacactaaatattactgtagggggcttttgccttgtttcatttttttttttttttcctcccagaaagcggcgtggagcttttaacagcaagcaacttctgtatttggagaagtatcgtcctaaaatgcggctgcgtttcaaagattccaacggtcatagaaacaactgttgcattcaataaaattggggtgcctaatgctactggaagtggaacttgagatagggcctaatttgttatacatattagccaacatgttggcttagtaagtctaatgaagcttccataggagtattgaaaggcagttttaccaggcctcaagctagacagatttggcaacctctgtatttgggttacagtcaacctatttggatacttggcaaaagattcttgctgtcagcatataaaatgtgcttgtcatttgtatcaattgacctttccccaaatcatgcagtattgagttatgacttgttaaatctattcccatgccagaatcttatcaatacataagaaatttaggaagattaggtgccaaaatacccagcacaatacttgtatatttttagtaccatacagaagtaaaatcccaggaactatgaacactagaccttatgtggtttattccttcaatcatttcaaacattgaaagtagggcctacatggttatttgcctgctcactttatgtttacatctcccacattcataccaatatacgtcaggtttgcttaaccattgatttttttttttttttaccaagtcttacagtgattattttacgtgtttccatgtatctcactttgtgctgtattaaaaaaacctccattttgaaaatctacgttgtacagaagcacatgtctttaatgtcttcagacaaaaaagccttacattaatttaatgtttgcactctgaggtgcaacttaacagggagggcctgagaaaagaatgggagggggctattaattatttttagcaaaatgttgcctttgtcttgtgcaaacatgtagaatatgctctttaatttagtaaaatatttttttaaaaggtagagatgctttgttattgtaatcataaacttcctgaaattcttgtaatttttttcccatacttatcagaagtgtgtttaccaacttatttttgtttgaaagtgtgattttttttttccttcccaacctctcttgcaaaaaaagaaatgggtttctgctaatgaattgagcagacatctaatattttatatgccttttgagctgtgtaacttaatatttggatacttgacaatttgttttattatgtaattgataaaatggtgatgtgtattaatgttagttcaaccatatatttatactgtctggggatgtgtggttatagttctgtgggagaaataattttgtcagtgttcaccagcttgtaaaaacttagtgcgagagctgaaacatctaaataaataatgacatgcatttatcatcattgagattggtttgcttaaaattaacttattttgtagaagacaaaatgaattgcacttcacttaatgtgtgtcctcatctttttacaaataaatgaaggattataaatgatgtcagcattttagtaaacttttagacaaaatttgttagggtcattcatgaaaactttaatactaaaagcactttccattatatactttttaaaggtctagataattttgaaccaatttattattgtgtactgaggagaaataatgtatagtagaggacagccttggtttgtaaagctcagttccactagttcatggttttgtgcaacttctgagcctcagttttctcctttgcaaattaataattacatacctttatagattttgaaattaatttaaatattagtatttggtacatgaaggcttaatgttaagtttcctttaatgatccacaataatccctttgatcacgttaatctaaatctagatgtctttgtctaattttttttgaatagcagttataaatgtaaaggactcaaagtttaagtaaaaagtgatactccaccttgtgtttcaaagaatttagttccacctcttcataccagtttaacacttaatatatttcattggattttagacagggcaaaaggaagaacaggggcctctggaggcccttggttatttaaatcttggattatttgtgatagtaatcacaaatttttggctaatttttaacctgaggttttgttttttttttaaaggaaatgcagcctagtcttgagaacataattttatataatcaattactaaatgttaaactattaccacacagcccataaaacagcatttgcgtttattgagagagaggatgtgccatcatgattaatgaaaactatcttttgagtttgaaaagaaattaatttgcagtgtttggattgtatatatggtgctaaaaataaattaatttactttataaaccttatctgtacattatacgatgtgatgaaatttgctttttatccaaatattttgtatcttgtaaatatggctaattataggaatgcctataatacatcttagattccttatatctaat

SEQ ID NO: 2451 - DNA, 6000 bp, Homo sapiens
actcacttgtttgtttcactattcttaaggatcactgtactgtattgcctgatgtctgatgcttgaaaaccattatttcatttattttgtatagtttttgttgttactgttgtttcagagaataaatctgaaccatgtttcttcatcttggctagactctaactgtgtatttgataattttattatttttagaaatctaaatgtacagacttacatttatctctataaattgcatattatcaactttgtccttttaaagtatcttctaattttgtctttttttaattcatatgaaaagttaagcattatttttatatgtttgtgacacagataagatatgtagtttagaataaaaccacagacagagttctgagaccttctactagggatcaacctgaagttctcaaactattaacaagtgatcttggagaaaaatgatccagagttgcagaaatacttcacattaaccatatgggaattacttgctcctttcttccacaaaagcagtaagagagcctttatcattttatttgccaaagttaagatagtctgtatttatggccttcccttttctaaatatacaaacaatcaaaatcagaacttagtatattctatatagcctgctcttaatgcatttacattggcttctagagatctttgcttccaaacagttcggtaattgatcccagaaggggtctaaaattctaaaatctacattgagattatagagattaatagcttccaaattctaccttttccaaaaaggtaacacttgtccatccatttctggctttctatcattgcttctacttattatgacttttcagagattgccagcaatgtttctgggattatatttgcacgttttttttcaatatcctgcttattttcttcaggatattgtggtatattaaccaactacgtgaggctctctctatatagcagagactgaaaatgtatggagatatatatatatatatatatatatattttttttttttttttttttgagacagagtttcgcccttattgcccaggctggagtgcaatggcgagatcttggctcaccacaacctctgcctcccagtttcaagtgattctcctgcctcagccttccgtgtagctgggattacaggcatgcaccagcacgcctggctaattttgtatttttagtagagacggggtttctccatgttggtcaggctggtctcgaactcctgacctcaggtgatctgccccgcctcagcctcccaaagtgctaggattacaggcatgagccactgcacccaacctggatacatttaaaaaaaaattatggccaggtgtgatggtaatcacagaccatcacaatgcttccctgcactttgggaggccgaggcaggtgcattgcttgagctcaggagtttgagaccagcctgggcaacatggcaaaaccctgtctctacaaaaaatacaacaattagtcgggtgttgtggcatgaacctgtagtactagttacttgggagtctcaggtggaaggatggcttgagctcaggaggtagaagttgcagtgaaccaagatcacaccactgcactccagcctgggtgacaaagccagagcctatctctctctctcacacacacacacacacacacatacatacacacacacttcatttgtgtcagagagtttggatggaatttaaatgtctttcttatatagcctgtcctgtatttatttttaagattgtcagtctgactgctattcttcatattggagaaaaaagaaaaataggaactgagaatcctacttttcttctgctgtttgttagcatagtttattgcctgcatgattaaataatacctgatgtccaagtagtggtcctaactcgtcactgctgttttcctttgtagaacataatctaagctgtcattgctgtttttctttgtgatctatgaggtacgttggtacctctccttggcattattttcttttcttttgggtatggcttggtccattctgtgatagttagctttcctgacagtattcatacaggtctcaacattcttatgggctcacgtcactcctaaatgcactaaaatcagcatacactagtaatgttttatccagaataaaccaccataaagcagcacacaactgattgcatgctgtaagaactggatttattattgatcagaaatttaacttttgtatatgcacaaaataaattcatgtataataattagtttctaaaatcaaagtttgggccttactgagcttgtgtaacaatgacctcaataattgaaaaaaaaattccttggaggggatttaaataaataagtaaataaataatggaataaaaaaggcagctgtgctgacagagaagtcaaagatcagcaaaaaagtttcatgatgataatgacaaagttaaacattcgaaacttttgtttatgtgacaaaaatgtgaaacttaccatcttacaataagtcataatcttatggctaattttattgctttgtgaaaggcttgactctgaaaatgaacaagtttattcactgtcagatgcagctgatttaaagccaaatgagaaactgtgatgcaagaagtatacaaatgtgttaaataaaataggattcttaaatactctaatggttgtaaatattagtatttagctaacatttattaagtgcctacaaatgtaccaggcactgttctaagcactaaggatgctgtaatgaacaaagtagacaaaaattcctgtattatggagtttacattctagtgggggtaaagtttggagagtcagaaaataaacaagataaataaataggtcaaataggtaaaactgtaggattttacagatcaccgctgtccagtggaaacacaatgtaagctatatatgtaattttcaatttcctactagccatattaaagtataaaaagaaacaggtgaaattaaattttcataaactttttatttttgaataatttttaatttacaaaaaaattccaagtgtattaaatagtacagtgaattgctgtatactgttcattgtttttctgttaagatctcgcattactgtgatgcatttttcaaaaccaagaaaccaacattagtgcattttcattaactaaacctcagactttatttgaattttactaatttttcaattaatgtcatcctcctgtttcaggatccagtttatgatatcacagtgcatttagttgtcatgtcttcttagtctcctctgtgatggggtggtattaattttaataatatattttatttaactcaatatagcaaaaatatcattttaacctgtaattgatatttttaaaattatcaatgtttattactttttcttattcagtcttcaaaatccagagtgtattttatacttaacagtacatcacatttcatactcagacactttcactggaaatacttcatctgcatttggttctcacaaaatttacagttgaaaaagtaggttcatatacttacattgttccaagtatacttaaaagtcttccaataaattcatgactaatgcaagtttagaaaaaagaaagcaaaaaaaattactttaaatagtttaaaaataatcccattagatatcagttttcaaatttaaatataaatttaattaatcaattaaggttaattgatttaaaaattcagttcccagttgcactagacatactcaagtgctcaatagtcacagaccatcacaaggacttttgattttattccgagctagaaagggagcactgaagggttttgagcaaagtagtgacataatctgatttaagatgactttgctatgtcagagaataaattgaggtgaggcaagggcagaagcagggagaccagccaggaggctactgcaggtaacatcagttaagtgatgcagatgccttggactgaagtggtggcagtggaggtggggagaactggtaggagtccaggaatctcttgtgccagccctgactcaatctgcttatgagttagataagggatcagggatgacacaaaggttttggggctaaaaaatttaagacaatgaatttgtcttttatagattttgtaaaaaaaacaggtttgggtaggaagatcaggggcttggttttggacattttgagttcaagatgcgtatgagacatgtaagtgaagatgttaataagtaggcagtggatatctgagtatggagttgaggagagctcagctaatgatacacatttgggagccatcaacatatagatggtatttaaaaatagaagactgaaggagaccaccaaacgagagtacagaaagaagtgttagggtgaggtcatccagcaacagtattttaaggaaaatgcaagctttgtgatcaggccgcaaacagatcaacgagaattggaggaataataaactctttccaggcagaagcattagatgcaatggtgcaaaggtaagtgattagccaaccatggtatagcaagtcattttgctctgctgaagcagaaatactagctagctgacacagaaagatgcattaagtgattgagaagggctctcacgctagctgggtggctatccagagctgggaatgtgagggttctaaggatagctttggagttaacaagtgacagctgcagttagtttcctatacatacacaaaaccaacccgtcctaccacagaatatatgtcataatgctggcacaacagacacatcccttttagttttgcagacgaggagtaaccgttgccctggaccacaaagccacttagcggcagagcctcgcacccgcgaagattattactagggagatgtttttacccctgaggacacctgagcccttaagtggggcaggcttcgagggaggggggccgataaggcgacttcagacagggcaatcacgatgggcgcttgagttctgcgcagaattttgacaagggggagggtcttggcttgaagacagagcgtggagtcatttaaggataatggaagggcataagcagaagctcaaggataaaaagcactgaaattcttgagctggcggcagggctgaacgtagctcagtgaaagatcctttcttgccacatcctctctaagccaggctgtgagaaccgcgggaaacgaaggagaagggtggcggtggggtcagtaaagggccggcccaaggtgcatcttttaggtcctgatgctaggagcagccgtccctgcccctatattcctctcactgggtaggtttgctcgggagtggctacctcccaggcaaaaattcggcctggttaaactggaaagaccaggaaagcccgcccacgggcgtccggggaacgcctgcaaagtgccagcaccctaccaacccaggcgccgcacgggtggggtcgcggccgcaggctcttccggggcgggcctagcctgacgcaggaggaggggcggcccccgtcgcacaagaaccaatcacgactgtcgcttctacgtggctagcattgaccaataggagaccgtagtgatagcgacggggaaattcaaacgtgtttgcggaaaggagtttgggttccatcttttcatttccccagcgcagctttctgtaggtaagttctgtcttaccggtgcaccggcgcactgaggaacagccgcagccggtgtaggggctcattgttagcgctggtcggtgaggggtggggcgaggtgggggcagctcggagccaggtatgcgacgcggctaaacgagctggagggggaggggatgtctcactgcctcagcgggtctggccggtggggtgatgcaggaggttttgttgaggaagtaagaagtgggtgtggcccacgctggaaagaaggggtggtggggtacctgcgcacaagatcgttttccaaaggacagtctctcttgttttgggggttagaactgggaaagaagcgggtggccgtgatctgacagttatctttcaaacctgacttaagaggtggagtgataccttgctgcaactttatgactttttttcattgttaaacctgaagacg

SEQ ID NO: 2452 - DNA, 6000 bp, Homo sapiens
tggccttcccttttctaaatatacaaacaatcaaaatcagaacttagtatattctatatagcctgctcttaatgcatttacattggcttctagagatctttgcttccaaacagttcggtaattgatcccagaaggggtctaaaattctaaaatctacattgagattatagagattaatagcttccaaattctaccttttccaaaaaggtaacacttgtccatccatttctggctttctatcattgcttctacttattatgacttttcagagattgccagcaatgtttctgggattatatttgcacgttttttttcaatatcctgcttattttcttcaggatattgtggtatattaaccaactacgtgaggctctctctatatagcagagactgaaaatgtatggagatatatatatatatatatatatatattttttttttttttttttttgagacagagtttcgcccttattgcccaggctggagtgcaatggcgagatcttggctcaccacaacctctgcctcccagtttcaagtgattctcctgcctcagccttccgtgtagctgggattacaggcatgcaccagcacgcctggctaattttgtatttttagtagagacggggtttctccatgttggtcaggctggtctcgaactcctgacctcaggtgatctgccccgcctcagcctcccaaagtgctaggattacaggcatgagccactgcacccaacctggatacatttaaaaaaaaattatggccaggtgtgatggtaatcacagaccatcacaatgcttccctgcactttgggaggccgaggcaggtgcattgcttgagctcaggagtttgagaccagcctgggcaacatggcaaaaccctgtctctacaaaaaatacaacaattagtcgggtgttgtggcatgaacctgtagtactagttacttgggagtctcaggtggaaggatggcttgagctcaggaggtagaagttgcagtgaaccaagatcacaccactgcactccagcctgggtgacaaagccagagcctatctctctctctcacacacacacacacacacacatacatacacacacacttcatttgtgtcagagagtttggatggaatttaaatgtctttcttatatagcctgtcctgtatttatttttaagattgtcagtctgactgctattcttcatattggagaaaaaagaaaaataggaactgagaatcctacttttcttctgctgtttgttagcatagtttattgcctgcatgattaaataatacctgatgtccaagtagtggtcctaactcgtcactgctgttttcctttgtagaacataatctaagctgtcattgctgtttttctttgtgatctatgaggtacgttggtacctctccttggcattattttcttttcttttgggtatggcttggtccattctgtgatagttagctttcctgacagtattcatacaggtctcaacattcttatgggctcacgtcactcctaaatgcactaaaatcagcatacactagtaatgttttatccagaataaaccaccataaagcagcacacaactgattgcatgctgtaagaactggatttattattgatcagaaatttaacttttgtatatgcacaaaataaattcatgtataataattagtttctaaaatcaaagtttgggccttactgagcttgtgtaacaatgacctcaataattgaaaaaaaaattccttggaggggatttaaataaataagtaaataaataatggaataaaaaaggcagctgtgctgacagagaagtcaaagatcagcaaaaaagtttcatgatgataatgacaaagttaaacattcgaaacttttgtttatgtgacaaaaatgtgaaacttaccatcttacaataagtcataatcttatggctaattttattgctttgtgaaaggcttgactctgaaaatgaacaagtttattcactgtcagatgcagctgatttaaagccaaatgagaaactgtgatgcaagaagtatacaaatgtgttaaataaaataggattcttaaatactctaatggttgtaaatattagtatttagctaacatttattaagtgcctacaaatgtaccaggcactgttctaagcactaaggatgctgtaatgaacaaagtagacaaaaattcctgtattatggagtttacattctagtgggggtaaagtttggagagtcagaaaataaacaagataaataaataggtcaaataggtaaaactgtaggattttacagatcaccgctgtccagtggaaacacaatgtaagctatatatgtaattttcaatttcctactagccatattaaagtataaaaagaaacaggtgaaattaaattttcataaactttttatttttgaataatttttaatttacaaaaaaattccaagtgtattaaatagtacagtgaattgctgtatactgttcattgtttttctgttaagatctcgcattactgtgatgcatttttcaaaaccaagaaaccaacattagtgcattttcattaactaaacctcagactttatttgaattttactaatttttcaattaatgtcatcctcctgtttcaggatccagtttatgatatcacagtgcatttagttgtcatgtcttcttagtctcctctgtgatggggtggtattaattttaataatatattttatttaactcaatatagcaaaaatatcattttaacctgtaattgatatttttaaaattatcaatgtttattactttttcttattcagtcttcaaaatccagagtgtattttatacttaacagtacatcacatttcatactcagacactttcactggaaatacttcatctgcatttggttctcacaaaatttacagttgaaaaagtaggttcatatacttacattgttccaagtatacttaaaagtcttccaataaattcatgactaatgcaagtttagaaaaaagaaagcaaaaaaaattactttaaatagtttaaaaataatcccattagatatcagttttcaaatttaaatataaatttaattaatcaattaaggttaattgatttaaaaattcagttcccagttgcactagacatactcaagtgctcaatagtcacagaccatcacaaggacttttgattttattccgagctagaaagggagcactgaagggttttgagcaaagtagtgacataatctgatttaagatgactttgctatgtcagagaataaattgaggtgaggcaagggcagaagcagggagaccagccaggaggctactgcaggtaacatcagttaagtgatgcagatgccttggactgaagtggtggcagtggaggtggggagaactggtaggagtccaggaatctcttgtgccagccctgactcaatctgcttatgagttagataagggatcagggatgacacaaaggttttggggctaaaaaatttaagacaatgaatttgtcttttatagattttgtaaaaaaaacaggtttgggtaggaagatcaggggcttggttttggacattttgagttcaagatgcgtatgagacatgtaagtgaagatgttaataagtaggcagtggatatctgagtatggagttgaggagagctcagctaatgatacacatttgggagccatcaacatatagatggtatttaaaaatagaagactgaaggagaccaccaaacgagagtacagaaagaagtgttagggtgaggtcatccagcaacagtattttaaggaaaatgcaagctttgtgatcaggccgcaaacagatcaacgagaattggaggaataataaactctttccaggcagaagcattagatgcaatggtgcaaaggtaagtgattagccaaccatggtatagcaagtcattttgctctgctgaagcagaaatactagctagctgacacagaaagatgcattaagtgattgagaagggctctcacgctagctgggtggctatccagagctgggaatgtgagggttctaaggatagctttggagttaacaagtgacagctgcagttagtttcctatacatacacaaaaccaacccgtcctaccacagaatatatgtcataatgctggcacaacagacacatcccttttagttttgcagacgaggagtaaccgttgccctggaccacaaagccacttagcggcagagcctcgcacccgcgaagattattactagggagatgtttttacccctgaggacacctgagcccttaagtggggcaggcttcgagggaggggggccgataaggcgacttcagacagggcaatcacgatgggcgcttgagttctgcgcagaattttgacaagggggagggtcttggcttgaagacagagcgtggagtcatttaaggataatggaagggcataagcagaagctcaaggataaaaagcactgaaattcttgagctggcggcagggctgaacgtagctcagtgaaagatcctttcttgccacatcctctctaagccaggctgtgagaaccgcgggaaacgaaggagaagggtggcggtggggtcagtaaagggccggcccaaggtgcatcttttaggtcctgatgctaggagcagccgtccctgcccctatattcctctcactgggtaggtttgctcgggagtggctacctcccaggcaaaaattcggcctggttaaactggaaagaccaggaaagcccgcccacgggcgtccggggaacgcctgcaaagtgccagcaccctaccaacccaggcgccgcacgggtggggtcgcggccgcaggctcttccggggcgggcctagcctgacgcaggaggaggggcggcccccgtcgcacaagaaccaatcacgactgtcgcttctacgtggctagcattgaccaataggagaccgtagtgatagcgacggggaaattcaaacgtgtttgcggaaaggagtttgggttccatcttttcatttccccagcgcagctttctgtaggtaagttctgtcttaccggtgcaccggcgcactgaggaacagccgcagccggtgtaggggctcattgttagcgctggtcggtgaggggtggggcgaggtgggggcagctcggagccaggtatgcgacgcggctaaacgagctggagggggaggggatgtctcactgcctcagcgggtctggccggtggggtgatgcaggaggttttgttgaggaagtaagaagtgggtgtggcccacgctggaaagaaggggtggtggggtacctgcgcacaagatcgttttccaaaggacagtctctcttgttttgggggttagaactgggaaagaagcgggtggccgtgatctgacagttatctttcaaacctgacttaagaggtggagtgataccttgctgcaactttatgactttttttcattgttaaacctgaagacggggcagcattgttatcagtgacactgagttggtgtttgagagtcacaaagatacgattaacaataagactgcagacactttattgaacaaacaccaccaccatgcagataagcaagtgctcagtaccagtacaatagtttcttagtgttagattaaggtagcaaatcgtgattctgctagatatgcacaagaataaatctgcggatttcctaattatcagtaaagccccatcatgtttatattctgctttgaaagcacttgcactggaagatttactcaagtaaagcaggcgaataaaggaattgttattcccattgccaaacgaattctttatgtctatgtcactaccagaatccaagcaatctttatgtgtatgtcgctaccaaaatccaagcaaacactctatcatattttttttaagtgacactaaatttgcagatttctacagtgtgacgtcattgatgttatattgggggaaaaagtatacttggcctatgaaaccttggtgaataaattacaaagatgtgtaccttgttgttgtgcacttacctccattaa

SEQ ID NO: 2453 - DNA, 6000 bp, Homo sapiens
gccactaaccttctagctcctagtttaccagaaatagtattcatgctgctggagaaagcactgtaagaagaaaaaggataaatgctttcttgtcacaggagattgaacactagcatcaagaatttattaacattttaaaatactaaaagagtataattggattgtttgtaacacaaaggataaatgcttgagatgatggatacccatttaccctgatgtgattattactcattgcatgcctgtatcaaaatagctcatgtacccccataaatatacacacctactatgtatccacaaaaatgaaaaataaaaaattttttaaaaagaatttattgaactcatcccatttgaaaagcacaaggtaagttgaaaattggaagggacaacattaatttatttcatcaagtttaaattagtgggtagtgaggtctgaaaaacaatactcctaaaattataaagaaaagtttaaaaaatcatcagcgaaaaaaggcaaatctgctagatagctcatgatctttttgcatccaggtaagctgggatatctatgtattttaacagcttttgtaaatttatctattccactagagatatccttaaatgaagttagcttttggttcaagtcaatttaattcaacctacatttatagaatgacctcaaaagcaatttactctgaaactaaggaagcctaagctccaggcctgtcacttgcacagcccccatgagcactgggagctgctgggcatttggtggaagcagaaaccaggtcacaaacaggaagaggttctatgtagcacttgtggtaaattgcctaaaagagttcacagaaggaaaggacctgaatttccacagctctagtaagttgttgtggctctttttgcattctaaatgtagtactcacttttcaacataattttgtatccgtaatgttatatcaaagcacatcccccaaattctataagagatttatacaaagatgaaggatctcactgttttgtaggaagaagagtgcagaattaggtataaaacaaaattgcggggcacggtggctcatgcctataatcccagcactttgggaggctgaggtgggtggattaactgaggtcaggagtttgtgaccagcctgaccaacatggtgaaaccccatctctactaaaaatccaaaaaaaaaaaaaaaaaaaaaaaattatctgggcatggtggcaggcacctgtaatcccagctacttgggaggctaaggcaggagaatcgcctgaagccattgcactccaacctgggtgacagagcaagactctgcctcaaaaaaaaaaaaaaaaaaaaaaagtgctagtccagtaatagcaacaaagtataataggatcgcttagaataaaacattagtaatactaattcgttgcagtatccttatcttctggatgatgccagtttcacaaaaacaaaacaaaccctgagagagttgaagaaatcctgaatctgtgaactagcccatggcctggagtttcttaaggtagtgccttttaaatataaatataaagataaatatatatatatttttatttattttttttttttttgagatggagtctcactctgtcgcccaggctggagtgcagtggctcgatctcagctcactgcaagctccgcctcctgggttcatgccattctcctgcctcagcctcccgagtagctgggactacaggcgcctgccaccacgcccggctaattttttgtgtttttagtggagacggggtttcaccgtgttagccaggatggtctcgagctcttgacctcgtgatccgcccacctcagcctcccaaagtgctgggattacaggcctgagccaccgcgccctgccaatattttctattgtgatctgtagtgtaacagacagtagtgttcatgaagtatactacacactcgtttacatttctcagctttctttcttttttttttttttttgagacagagtctcactccgacacccaggctggagtgcagtggcgcgatcttggctcactgcaacctccgcctcccaggttcaagcgattctcctgcctgagcctcccaagtagctaggatcacacgcatgcgccaccatgcccggctaatttttgtattttagtggagacggggtttcaccatgctggccatgatggtctgatctcctgacctcgtgatctgcctgtcttggcctcccaaagtgctgggagtacaggcgtgagccaccgtgcctggcctcagctttcttcacagttaaaaattggaggcatgtgtctattctggtcaatggcccatgagagaaagtgattgggttgtttctgtttcaaggctcttaaccctgggtaagagttagtatgagtcctctgtgctctctctagaaagattttaaacctagaagtaaagaccatcaagatggagtaattgaaggatatataaatattacattcttgaaaatctggaagacaaccaccaaggagagcaagccgactttatgggactttatgggagtgacgtatgacatgtaaaatactttgatgttaagctatgctgattaggggtgggggtggggaggtgttaccacaatttcacctagtgtagcttatccagactaattcattcttttttctttttctttttggatttggagtctcactctgttgtccaggctggagtgcagtggcacaatctctgcccaccgcaacctctgcctcctgggttcaagcgattcttgtgctgcagcctcccgagtagctgggactacgggtgcacgccaccacactccgctaatttttgtatttttagtagagacagggtttcaccatgttggctaggctggtctcaaactcctgacctcaagtgatccgcccatttcggcatcccaaagtgctgggattacaggcgtgagccaccacacctgatgcagactaattctcacatacaaacaaatgcatttcacatcttgactgtgtgtgtatatgtgtgtttgtgtatgtatatacacacatatataactgaaccaaatttaaatataatatccttgctatttctgatttacctagtattttctgttctatttaggaaaatgattatacttaattttaccacaccctaattggtctccacctacaatgtgaaaaatactgtcttaagttgcctcagatgctgactgtctataaacaagtttctggagtgtccaattatttagaaaaataattataagttttacaataaatgcattgctacaatgaaaatgaaatggaaaatacaaaatatttcgtcttgtaaaattaaattatggctttttttgcagtatgtttctattaggtgcatacatgtacatacatgtgcatacatatatgcatgaatatttttagatgttctgcaaaactgttgattccgctgctctgtaagtttgcactttatcactccaaaataactccattaagatcgcggccgagatctcgccactgcactccagcctgggcgacagagcgagactccgtctcaaaaaaaaaaaaaaaaaagatcgcggccgggcgcggttgctcacgcctgtaatcccagcactttgggaggccgaggtgggcggatcacgaggtcaggaaatggagaccatcctggccaacatggtgaaaccctgtctctactaaaaatacaaaaattagctgggcgtggtggtgtgagcctgtagtcccagctacttgggaggctgaggcaggagaatcgcttgaacctgggaggcagaggttgcaatgagcctagatagcgccactgcactccaacctgggcgacagagcaagactccgtctcaaaaaaaaaaaaaaaaaaaaaccgcctgatccaggccgggcctggtagcccacgcctgttaatcccagcattttgggaggctgaggctgacggatcacctgaggttaggagttccagaccagcctagcgaaatcccctctccactaaaaatacaaagattagatggacgtggtggcacgcgcctgtaatccctgtaatcccagctacctgggaggctgaggcagcagaatcatttgaactggaaaggcagaggttgctgtgagccgagattgtgccactgcattccatcctgggtgacagacccagactccgtctcaaaagtaaaaaacaggcagggtgcggtggcttacgcctgtaatcccagcactttgggaggttgaggagggcggatcacgaggtcaggagtttgagactatcctggccaacatggtgaaaccctatctctactaaaaatacaaaaattagctgggcatggtggtgcgcgcctgcagtcccagctactcgggaggctgaggcaggagaatcgcttgaactcctggaggcggagcttgcagtgagccgggatcgtgccactgcactccagcctggagacagagcaagactccgtctcaaaataaataaataaataaagtaaaaaaaaaaaaggaacacttgatccctgagaacaaagtcatcttcatttatttctctttccaatcacaggaaaaataagtcacaaaaccttgtactttattacaatgccacattgttctgtttttgaagtcctggaagaggtaataacagaaccccgtatctgagccacttcgcctaggttagacccactcagcaactcccgtgctgaagacaggagaccgagcggcttgggcccccggccagaattctcaagacgctctcgcgagagccttccaaccgccgcgagctctcgtgaacactagttctcttcaatctcagcacctccaagggtcagcacctcccctccggctccctccgctaccgcgggccggaacttttgtcgataggaacgggtttgcacagttgagtgttgtcggccggcgtgaaggagactagggggccatcctcttcctttcgccgtcgccgccgcggagcggagtcgagccgagctgatttgatcgaggagcgcggttaccggacgggctgggtctatggtcgctccgcgggccgctccgccggctggtgcttttttatcagggcaagctgtgttccatggcagggaacttttggcagagctcccactagtaagcgatcttccgtcttctcacctggggccggtttttgggggagctgtgaggacggggcctgtgactcccctgggcctggatcccagctcagttccgagtgccggggtcctcacgggagaccgcagcggtcagaatcaagatgcgcttttctgaggcgactcccctccccgcccccagccccagtttcggggagggaaggatctgtgagggggaggggtgggagagagtttcgtctcccgggaaggaacgtttcggagtttaatttcggattcttggtttagctaggccgcggggggtcggatagagtgggcacaggtacgggaagtgtgactcagctcaagactgtgaggctacctgttcaggacagttgtggcgtgcttttacctggggtttcttcgggtgatcggcgtcgtggtcttttgtcattcactgtatatcttgagtggatttaatattatgaggagaggagagagtctggcttgtttctgcctactaaccgcttcttgcgcgtactttatgtctagatggagttttatattgataaggtatagggcaggtgccctctaaatttatccatttcattagcctgtgctttatattttgttttaaaggcctatttttccagtgactttgtttacctgtttctttaacctttttcatgaataagttcttgtttctgtcagtgaccatgtgagagctagaataatattaaaaacatttatccctaaatacatttgtttaagcaggcaggaaggtgcgttatggggtaaattgaacatttgagtaggctttccactgtatagttgaaagatgaacagaatttgacaaggtatcttggtataattttttatgctaagaaagcattagtaagtaatttaaatttcgattctgtgaataggatctgttcctgatgttcattttttagccctttgc

SEQ ID NO: 2454 - DNA, 6000 bp, Homo sapiens
attcttaaaagatagacaagaacccatatttatctggcaaataagttggaagatggttaatgtaggaaaagggagagaagttggggtcatcacatcaggcaaaagaaggggattgagcaaaggtcaacaggtatgcagaagaagtgcacatttgcagattatatgggttcacagcaagagtttggaggaagactatgtggtggagagttttgtttttattttttatggctccctaggccataatcctcttttctatgtgtgggggaatatgttactgtgtgagttggggagacagagtccaattttcctttatgatagctctctctaagccctagtgctgaggcctagcagggtttggggatcattaattcgtcctggtataaaactgaatagctgttggattttctgtagcagtattcagcataccaggtataggagcatggttcaattcatttaatattgtgtatattaggagtggggattgtgggagctagaaaattcaaggaagacagaagtgatttttggctggaatggttaaggaaggtctaaggaggtgagggatttttattcagatcttgaaatgcaggcaggagtaagtagacttactgggaggggaagttagcagtggaaggaatactgagtaaaagaatggcaaaggatacaggatcagatgtgggaacagatgaggcatatgggagatctaataaaccagtctggctaacataaagccataatggagggggtgttgaaagggtacatctgataaagtttggataaagtacaaattccttagccttgaattccaagtcatatcttccaagcaatgaggatctgttgaaggttattgtgtaggagagtgattaagattaatgtggtggcaatttgctataaggatgagaagaaaattgactccaggcaggaaaactgggttaggaggctggcaaaggaatctaacattcagggagcaataagagaggaaaggaagggactgagaagcaatagacagaatgtattccctcctctgtgctcctggctcttttcacactatagaactttcactctcaatcatgaatattcacataaatgtttatctctccccaattgtttcttcctgcttccatttcctccccatttttatctctgtctctcccacactgtttctttttctttatttctgtgttaattatttaattcatcaaatatttattatttacataatggacattgtacaagacactaaaggttcagagaagggaattcagttctccttggaaaaccaaagaggggctcaaccacaaaccaagtagaagtttctgccagaatttaggggtgcatagaggcctttcatctatattcatgcatcgcctgaacccaacctagaaaaatgacaaggaagtcatcaggggagcaggtagaggaggatgcagaggtgcagcagggaactgctggtcatttggcgaactatgtcacaggacctgtgtgcaggagtgatgaaccatgattggagaagttagcagggccttgtgtatcatgctgaagaactaaggtttattccaaatgtgttggaggttcttccagaattttacatagaagaataatatcagatatttttagagtcagcaaaactgaggatttatactctcaggctctggagtcagattgagaacagagtgttactcagggttagccacttggtggccgtgtgaccttggacaaattacctagcctttcagcctcagtttcttctctaaaatactttttttaaaaaaaaatactaccttctttgtaggcattgttttttatttggtgagaattaaatgatatgttatttgtaacattctcttatttttacctgatattgacaaattattattgtatattttatggggtacaaagtaatgctgtgatacatgtatacagtgtagaattattgactcaagctaattaacatatccacagtctcgaatggaatacttatcatttattcctcctgtctaactgaaacattgtacccttcaaccaacatctccccattcccctgattccccagcttccggtaaccaccattctgctctctgcttctatgtgttggattttttttttttttagcttccacatataagtcagaacatgcagtatttgcctccatgtctggtttatttcattagcataaagtccttcaggttcattcatgttgtcacaaatgacaagattccctgcttctttgaggctgaataggtttctaatgtgtatatataccatattttcttgtccattcatcaattgatgaacactcagattgattccataacttgactgttttgaatagtgctgcaataaacataggagttcaatatctctcagacttcctgatttcaaatcttttggatacataccctggagtagaattcctggatgttatttctaacattcttagtacagtgcctggcacatagaaagctttccaaacagatagctactcttactagtaatgactaggaatgacttatcacctcagtcattgttactattataaaaactactctataaactattatgaacaccactcatcttggtgtgcaagatgagccagagatgggaataagctggaggaagggagatcagttaggaggcctctggaataatctaggaaagaatattctgttttctgtctggtgcccagctgtcgctcagaaggagctttaaaaaaagtttgtggaataaatgaaaaggaagactgagcagaattcagtgattgattagctcaaagaaaccagggagcaaacgaaagataactgcaagacttggagattgagtgactggagaattctggtactatggacacaaagaaaccttctctctttccacccctcagctctgcgttctcaggccattgctcacctgacatctttggatggttggccgctttttgaatttcactcacttgctcaatgactgtggtgtgcaggtctgctgctttgtctttttccagaatgccttgtcataactatagtaaaggtatatctgaatttagaaccccgacaattcaaaaatctaaaaccccacttacaaattgggtttgaatacatctctcaggttgcttccaaatctttctttcttttcttttctttttttttttttcatttttagatcatgtagatgtctcagggaagacttcagcatctgtgcctctgttggggcattaatagaatcctatgcttttacatccattattgtatttggaacaaaatatcctttatggtcatttggtattatatattttctgttttgtatataatatgaaattacatatacagtctattttaggtctcatatcattataaaacaaaacaacaacagcaacaacaaaaatttggctcagcttttggcttttatacttctgtcaacttgttatttgtactctgactccaaagacaattggagaaacttgggagcataacacaagattttattttaaccaattgatctgtccactgctatggactgatttttgcacaaagtaatagcaggttgggctgatgccatggttctctgattttctttttcttttcttttcttttctttctttctttctttccttctttctttcttttctttctttttctttcttttctttcttctttctttctttcttcctttctttcttcctttttcttgagtttgattattctgattactaaatgccttgcaatttgaaaaagaacagaagttatgagcttgtactaggaataggttagccaggttcaagggtctcacaacatttagaaagattgtttttaagaaagaaataaaaaaaaagtcttatagagagatcagtgacacttcataaacaagtttgcaatgctgtctactagtataaatgaccgtacgttgatctgccagactcattgcccggctgtttttgccagggcacatatttgtgagacagctgctccgaactagggaaggtcaagcaaaaaccactgcctgtctagagatggctgtcctgatgtcagtctcattagttcctgagttcttgccaagttagtaagaactagcatagatctggaggtcaaagtttagcagaaagagcccccacagcagtgtgcaaagagctctttttctgttctactctttttttctctactggtcacctagttggtgtgtagcgtgtgtgtgtgtgtgtgtgtgtgtgtgtgtgtgtttcccaaatagtacttgaaggataggaaattaaatgtctgtgggaaaaagcaacattttgggttctcagcattttagtcagctgctttcttacttttccagactgtgactattctttgaagctattaaaatctattcttggtaatgagaaaagggagtgacttgatggttcttttccaattgctctgtgtctgacaagaaatacctaaatactttaatttgcctttttaaatttcccctagtggtggcaaaacaattctactcctatttgtcagggaaaaaaatctctgccgtgaatttcagtgctgggaacataacaagacaaaaagctacctgggctagcctgtttctccaggatgaaacaaaaggaatatagattttagcggctgctttaacagtttggtaaaggatctggtctatcttgggtgtgggagatgggaggggtaaagaggtcagaataccatttagatcacagacagaaagaaaccaggaagtaaggggaaattattacagtctgttcatagctcagaatgttaaaggcaacagcctctgctggttggttattcattagcaaaaaggagagagccgtccagatccggactggtcgaaagacaggaacagacttgaaacagggggagagctcctggcgaaagcaagacgtggaggttttaccaggggttagtagcttcctcttgctaactttttattgggacaaaaggcaagatggcaccattctgttctcagatatttgtctaaataaagcccttttaattttattttatttttgttgtgggattcttaagcagataagaagaaaagacaccttcctagtgagcagctgcccagctcctgctcagttttgcctcggggtagcacctccagccacagaaagcaagccggtaagtctctccaggtaggacttgctgcaacccagctgctggactgatctgaaacgggactttgcatactctccgaagtatggtgagttggtgctgacttcaaagttgcctggtgaaggaagataaggtggatcgcagagactaaggggagagggagaagccctgctcctcttctccccaccaaggcacaatgagcaacatctgtcagaggctctgggagtacctagaaccctatctcccctgtttgtccacggaggcagacaagtcaaccgtgattgaaaatccaggggccctttgctctccccagtcacagaggcatggccactactttgtggctttgtttgattaccaggctcggactgctgaggacttgagcttccgagcaggtgacaaacttcaagttctggacactttgcatgagggctggtggtttgccagacacttggagaaaagacgagatggctccagtcagcaactacaaggctatattccttctaactacgtggctgaggacagaagcctacaggcagagccgtgagtagtacaaacttatacttaatttctgaactctctgagggctgggtaatgagttttcctttctacttctctacaaccccctaatgtccaaagagttgcctaaaaagtatgaggaagtactggcaagaaaccactaattgaaacacacctcccccgctaagtgagtgtgaaactggccagtaattgttgttgagatgacttcaattacagtatgtacatccacaggtccagggtgtattttcaaaataaacaaatgatgtgtttaatactgtaccttctctttggctgtaaaataactcatgcctcactttagcaataaaattgcattttgtttgaaggtaaattataagacttcccttaa

SEQ ID NO: 2455 - DNA, 6000 bp, Homo sapiens
tcttttattgaatgaatatgtattaaacacttaactatatgccaggccctgttttaggtacagaagattaacagagaaatcctcaccctcttgaaacttgcattctagtgtggaaggacagacagtaaacaaagttaataaacataaaaataaatctcttaggccgggcgcggcctcttaggtggctcacacctgtaatctcagcactttggaaggccaaggcgggtggatcttaaggtcaggagttcgagaccagcctggccaatatggtgaaaccccgtctctactaaaaatacaaaaattagctgggcatggtgtcgcaaacctgtaatcccagctattcaggaggctgcggcaggagaatcacttgaacccgggaggtggaggttgcagtgagccgagattgtgctactgcgctccagccttggcgacagagcgagactccgtcccaaaaaaaaaaaaaaaaaaaaaaagtaaataaatctcatgaaggaaacgttctttcgggtttactggggcctaagatagtattgatgctgaactgggacaatagtatgagcaaggaaggcacagaggttcgagtaagcagcaagttcagggatcactgaaaaaaattctgacccttttttatgactgcttttatagattatgaaaataatgtaaaagtcacaactaaaggatggaaaagagattttaagggcaaatatttgagaaaaatattaatattggtaatcgggaacagcctaaagggagagtagatctatggaatttattaatcaatattattatttgctttaatattccattttttcaaagtttttataatcacaattgtcattattcctcaaagaaaacctgtggccataggaaaggctatttgcagaagaaaaaactgatgcatgaagacaatgcattgctccaggtgtatttatttgaagtgactttttagcagatcaggctttagtaccttttagcttatgtttcaattgtggacatattcttgtgtgcattactgtgttatctgcagaattccttctgagttccaatatgattttttcgatcaaggtgtatttggatatttggcttcttacctatgttctaagttttcaattatccttaacacatatattttgtactttaaacctaaccaaacttagctgaccccaagagctcagaagacagccacaaaatgtcaaatgaacaaaattagggcactgaaacaatgactgcttattccagttcagcctgaagattagcccacccctttcttaagggtgtaaattgtttgcttttgatgcccttgatttgttgctgtgctttattttgttttcgcagagaagtgagcaatagggtgggtgaggtttgggggaaggaaacctaggatagaggtataatttttttgaagtttatatcagagcatgagttgatcagggaaattgaagaatgagaaggcaagtgtagatgtacagaacagagtggcttcctcagttccttggagttctttatacttctggaagtttctaaggggaatgttccattgtaccatctgccaccttttgtcttttggtatgctgtctctctctctcaccttcagaaatggtgggaaaacggctaggacagcaggatagaacataggaaatggagtcctttaacttcacctacattttgttcctaacatcttgattttagtatattgtctttgtagcaataaaatcggaactattgcctctgcaccaaatttgactaaggctaaaaatagattagcgaggttgagcatggaagaagtggcaagcttctccttcctccttttcattttgtttcagtttgaatagaaggaggtagctcacacaattaaccagaacagcaactggctggatgtctgggtgctttgagccaattaggatatttttgtggaaagtttccaattcttaattctcagttatgtagaggtgggaggcagctggtgtgaatgtctgtctgcagggtacatgcatactaactctgatccaatatggcatgacagcaatgtgcttattcaagaaaataattatctcaattttcttgtactctaacctaaaatgtcttcgccttcacgacttaaaaaaacaaaacaaaaaaccagaaaaaaaaaaagaaacgccaaagctaacatcacccacatattttgagacctctagtggtatcaataatgaaattaagctaagtctgaatgggcaacagtaattcattatcttcctccacggacccactgccctccccgggaagtctccctttaattaactaccttcatcatttcttctgattttcagaatttcttgacttcactctctctttcacccctcatttttggtgtccaagtggccaccaaagcaatatcccagtgtgtaagctgctatggtgaggaaggtgcagggagtatctggggacaagtctagttttgggttgtcacagatttcctagagaattgatgatttagctgagactttaaggttcagaataatgtagccagaagaagagtgctttaggtatcttccatgcaacaaatttttattgaatacttactgtgggtcaaggtttatgccagactctgtagcgttagaaagctaggcacaatccctgctctcttagcacctaggggatttcaaggttggggagaaatagacatgaaaatataagcacaaaatatctatctatcaatagggccttctaaagggtcactatcctctaatacatattagggaatttaaaatttcaactttttttttctactaaagagtccaaccagcaatttcccctgagtatccagtgcttgctccttcttgccgttccaggctctgttatgcattctgctatggttgcccagagctcgcaatcagaatctcctctccattacctgaatgtgggggagagtattgtttcttgtactttcctgtctatctgtatagttcacaatgaggcagagaacagagtctggaggcagggaacctaagggcgtttcaccccacttcctaaactaaattgaaaggaaaaccctaactttccacacctgagtaacaaaaggaccagaagctgctccctttgcaaaccctcaccttttctgcgtggcagatgggaaactggctgtcagcaaccaatgagactgattgcgggtggagtctttgcatagaagtgcaactttgtaacttcaccttagcctctgattggttgctttttaaacagaagtgtgcaaaaagtgtgattgcacagaagtgtgacctttgttaactccacttcagcctctgattggttgacgaaagcaaccaatcagactaattgtgcgtcaccacttcatttacatgagaaacctccagggggtatttggacctcagaagattctgcatccggaaccttgagccaccgctggggccgcttccatactgtggagtgtactttcattctcaataaatccctgctttcttctttccttgctttgctgggcgtttggtccaattgtttgttcaaaatgccaagaacttggacgacttgcagtcaagaccctctaatggtaacaacaacaccgtgacagagcttttactaaagggctgaattaaagattacactataaaaggggaacactgtaaagctgtcagctaaactagtctttcctccacagttcgtgaggaaggaacctaatttatacattcaacaaatttatgccagctgttctctgatgtgcccaaggcagataaaatctatccatggaggtttcatttcagtgagagggagatatacaagaaataagtaaacacctacattgccaacataattagagatggaggaggaaaataacagggtggaacttctgacagctctcctgggaaggtctctgtggaagtgatgtatttgagctgagacctgaaggaagggaaggagttggccgaaaaggtagaatagaattgcagaaagagatcaaggggagctcttcccaggggtcccctgccctcatattgcctgtcttcactggtgtcacctaatctcctactgctcataacctggctacctatctttcactatctttcaggacaactcagccctatgcatagggatgggttccccccaagcagggactgcttcagagtccaggcaacatctagttacatccctggatgatgggtcttgtttgagtgaattgttttcaccaccagactgtgaaggcttcccattcaggaccctggtgttcatccccattgtctgggaactctaccctgtttctttctttcttttctttttttttttttttttttgagacagagtctcgctctgttgctcaagctggagtgcagtggcgcgatctcggatcccaggttcaagtgattctcctgcctcagcttcccgagtttctgggactacaggcgcacgccaccacgcccagctaatttttttttgtatttttagtagagacagggtttcaccacgttggccaggatggtctcgatctcttgacctcgtgatacacccgcctcggcctcccaaagtgctgggattacaggcataagccaccgcgcccggtcccctgtttctttaattactgttactgaaaggcatagcctttgaatgagttattaatccaaaatcttttgttttccattcttgctctagtcacagcttatttttccagaccatactgttctaagcctcaattacattaaggccaggaggccaccgaagaactccacatgccactgcactggcgggtggagcaagtcaagcagggcagctcatgaacgcccgggagtccaggaggcccgggtggggacgcctggatgacgtcactcgaggtgggcaggccccgcgcggggcgtgacgtcacgcgggcggtcccgtcagccgtgaggtcacctggtgggcgcggccaggccgaatccccagtgtcgtcacgggagggggcgggcccagagcgtgtcagtgcagccgaatcaaaacaagccggagacccgccttttccctccggctcgggagcgtctcgcttgcgccccgggcccgcggcgcccgcgcggctgcgagcctcgggtggccgcgtgccggctccaggaagccggagagggcgcggcggccaggatggcgcggcacgggccgtgcggctagacgggagccgagggaaccgccggctcgcgccctccgttctttcccggagccggcttcacgcagggccgggaacggccgtgcctctgggatccgccttcgctgacgccgggcacctacctggacgcgagcgagcgagatgcccaaccccaaaaacagcaaaggcggccgcaaaaacaagcgcgccaacagcagcggcgacgagcaggaaaatggagccggggccctggcagcggcgggcgcggcgggagcggcggccgggggggccctggcggcggcggccggttgcggggcggcggcggcgggcgcgccgggcgccggaggcgcggcgggcgccggaggcgcggggactggcgccgcgaacgctgcggccgccgcgggggctgcggccgcgggcgatgccaaaaacggtaagacggggctggcggggcgagcgccaacttcctccccgacggggacggcgcggtggcggggccctgggtggcgcgggcggtgcgtggacaatgcgagagtcaggaagtgctcaccccgcccctccgccccgccgcggctgccccttcgcggtccccacgcctggcggcggggacagatctgcggcccctgcccggtgtccgcgcggggggcagcccgcgccccacactctgaggggctcccggctgcggcagcgctgccctcgggcccagcctgctgcccgcgctggcactgccccgccgtgtgtgccgggccgaagggaggaaggaagggaggaaagagccgcccaagttgagaagaatgatccgattgaaaacttaggcaccggttaattcttcccggtgctccaaggccacccgtaacccccggaatgaaggagagagagcctcaattcttagcacacccagg

SEQ ID NO: 2456 - DNA, 6000 bp, Homo sapiens
caagtaaagaatgagagaaagacgagactgcgcatagagcaccatgaacggcgcacagaagagctcttcactttaatacacgaagtgtacaggaagaatctttgatgcatgaggcaatattttctgccaatctccactaaaaaggtggatttcaaaagacaacatccaaaggcaaatagttcttgagacccaaaaaactgacttctagataaggcaagaaaatgttttctaagattataatggtaacctatataccttagatcctcaacagatattccttgatttgaaaataaacagcaagcaaacatttttcattttcctactgatggatataggtaatttaaatgtagtaggaattaaagtaaacatctaaaaagaaactatttaaaatatactacaaacctcggttataaaaagtgtctttagtggcctaaatatgcagcaaaatacaaatcctgtgcatagggaacaggtggtactccaaaaaaaatctacttgtcaacagatatatggaattcagaatgcgttttcccatggaaacactgttataatggtggttaattcccagtctcctccacaaagcctatttagttgttagtgagaaatatttatcccacacctgtgttttatgtgaatggtactggtggtctaaatgaagacatccataatgctaggggaataagaatggctctcctttcactcagagctgaagcttctcagcagagtccctctccataaagggtttccaggtaaagagatgccaccctcaaggtcatgctctcttcctggggggagcccaagtccaaatgaccagtcaactgggagttgggggagtgtgtagaaggccctgcccctattatttaaggtgagataactcagaaaggccatcccacctccagagctcccccaagagaggatcaactggggtctctgttacagatgcatcacagttcaactcctgcttctgcccaatcctgcttccttccctcctccactaggaatgatgccaagagcactctccagtaacctccagcacgtgtatctctgctcaggctatttccaggatctaagacaaacagctaatacttcgtaagctggtactgtaagtcagacactgttctaatctatctaatgtatgtaatctatttattttaaatatatttaatagatagatacagatattttactacatctgtatgggtaggtactacaatccattttacaaagcagaaaccaaggctcagagaagttaaatgacttgcccaaggtcatttgacaagtaatttgagaagccaggatttgaatctaggtccaccaaatggaaagccaatctctatgcaaacgaactccatctgctagaaacagttccatgaattaaggcagactctgctgcccacgggttctagaggcagtaaggaatgagtggagtgatgaaccatggtcatccaataacaggaatttataaaagtacttaagatccaggcccaatgaaaactagatatactatgatcaaggtttcaaatatttttaggcctgatataaaaatgtagaggcctaatggaaccagaatgaaactacgtatctaccttttgataactagattctaaatataaccattggtaatcttgtatacctgcaatgaaaatgcaaatggtatgtgcagacagattactatgtaggaaaaagatggggtggtcttttacaccaatccctgaaaaataagcctcataaactagtatcttaaaattagtatctaataaatgtcttattagcggtatgatatcctaagaattaatattaaacttactcaagatgcacaactgcagccagttcatcttctccaaccacaactataccgcggcttccccaagctctccgtaactagtaatcttcctttacagaataagtatttatttatgcccacttgacaaactgaacaactaaaagctaatattgccctgctctggtggccgcactgcccaagagctacaagacacaaaaccattctataaactccaaacaactacaaataaacactattaattttaagcgaagtcattaagtttgcatgtttgcagatgtagatagctgacttgaacagtgaaaaactatttacaagtttcaaagaatatcaagtacctcctttcttgtaataattacttgatttgtaatttctgtaattacaaaatctaatgtcacagttaagtaaaaaattgaaatacacttaaaactactaccgataataactttaacattaaaaatccaaatattggtccttagttgattttgagaatttacgcatctcttgccccttcctctttaaaaattcaccagtaacgcctctcccaaacccctaccttataaactatagctttaaataacaaagaaaaaaacaaagaaagaaagaaaagaaaagaaaaaagcatttgattttgcacccaggagtcctcagcatccaagttcagttatcatcaactgcagaactgagggggggttcctcacattaaggtgaatcattcacgaagacttcacatcacttcagaaacaagaatcaggcatcataaaatttggctcactcctctaatataagttacatcctctgaccctgactatgggaatgttggcccattcctttttctccccgcctttcacttaataaaataagctcctaatcagaaacagctcttcacatacactgtgctgctaaatatacttgagtctgccacttcagagaataataataggggccccttaaccagtttgttatgtacaaactaggaggtacaagtagcctaagaaaaaaatttcctcatgccaccttaaattggactaatcttttggagcaagaaaaaaaaggaaactgtgaacttgaagcttccacataggccaaaaaaaaaaaaaaaaaggagctggtaggggggtgggcagagcaaaccaaaaccaccaccagaacaggaatgcaagctccctgaggaccgggatgtctcgtcttgattaccgctggatcccttagtattgaacacggtacttgcaacactgcaggtaatcttttttaaatgaataaacgaaagctgtcatcattgttcatgcactctttgtgagaaactttaagctcattatatatgtaacctttaaaataacaagaactgggagcataatagggaaggggcactctgagcctctcaataacactaggagggagccagggtaattttttttcaagtttacacatgaggaaattgaggctctggaagactgacctttccaagatgatgaagctctaaatggctgagctaggagtctgtcctacccagagtctgagcacctttctctctgccacatcaataccaaaatgaaggttaaagccaggagaaaaacaaaagaacatgaagaacacaggctacccaaaactagtattctgaaacattcacaaacggggtaagtttgtttctgaaaataaataaataaatcttcctatttcaatattgcagagacacagccaacggggcctacagttctaacaggcgacattcagccgcctatgttcagagcactgtacgctgcttgtaagagcaggtgccctgtttaaaaagtgcctgatctggctgggcgtggtgactcacgcctgtaatctcagcactttgggaggccgagacgggcggatcacgaggtcaggagttcgagaccagcctgaccaatatggtgaaaccctgtctctactaaaaataacaaaaattagccgggcgtggtggcgggcgcctgtaatcccagctactcgggaggctgaggcaggagaatcgcttcagaccggaagacggtggttgcagtgagccgagattgcgccactacgctccagcctgggcgaaattgcaaactccgtctaaaaaaaaaaaaacaaaacaaaaaagtgcctgatctacataaagaatggcttcaaaagctgacgctataaattaaaagccagatataacaattcaaatctcccttcattaaaatacctacgttgtcttcctggaaaaagtgcctgactagaggaattcaaagaactgtccaaataagtaagtgtttgcccagcaccttataacgaaaaccatggctctgtaatgagaacagaaatcctgtcacatctgggccagttcctaagtgtcccctcaaaaggaacattcaggcactacctaagattatgaggcttccttctgaaaatgttaagcacaatgacatagagaatgatttttcttttctttcttttctttttttttttttttttttaactccgggctgagaacggaagtcaagttcagattctcttccttcctcaagcaagccaaaaaattaaagagcaaacacagaggccctaaatgtctcgaggcctcttcacctgtggcgatcgacgcagcaagcctgggtgtgctaagaattgaggctctctctccttcattccgggggttacgggtggccttggagcaccgggaagaattaaccggtgcctaagttttcaatcggatcattcttctcaacttgggcggctctttcctcccttccttcctcccttcggcccggcacacacggcggggcagtgccagcgcgggcagcaggctgggcccgagggcagcgctgccgcagccgggagcccctcagagtgtggggcgcgggctgccccccgcgcggacaccgggcaggggccgcagatctgtccccgccgccaggcgtggggaccgcgaaggggcagccgcggcggggcggaggggcggggtgagcacttcctgactctcgcattgtccacgcaccgcccgcgccacccagggccccgccaccgcgccgtccccgtcggggaggaagttggcgctcgccccgccagccccgtcttaccgtttttggcatcgcccgcggccgcagcccccgcggcggccgcagcgttcgcggcgccagtccccgcgcctccggcgcccgccgcgcctccggcgcccggcgcgcccgccgccgccgccccgcaaccggccgccgccgccagggcccccccggccgccgctcccgccgcgcccgccgctgccagggccccggctccattttcctgctcgtcgccgctgctgttggcgcgcttgtttttgcggccgcctttgctgtttttggggttgggcatctcgctcgctcgcgtccaggtaggtgcccggcgtcagcgaaggcggatcccagaggcacggccgttcccggccctgcgtgaagccggctccgggaaagaacggagggcgcgagccggcggttccctcggctcccgtctagccgcacggcccgtgccgcgccatcctggccgccgcgccctctccggcttcctggagccggcacgcggccacccgaggctcgcagccgcgcgggcgccgcgggcccggggcgcaagcgagacgctcccgagccggagggaaaaggcgggtctccggcttgttttgattcggctgcactgacacgctctgggcccgccccctcccgtgacgacactggggattcggcctggccgcgcccaccaggtgacctcacggctgacgggaccgcccgcgtgacgtcacgccccgcgcggggcctgcccacctcgagtgacgtcatccaggcgtccccacccgggcctcctggactcccgggcgttcatgagctgccctgcttgacttgctccacccgccagtgcagtggcatgtggagttcttcggtggcctcctggccttaatgtaattgaggcttagaacagtatggtctggaaaaataagctgtgactagagcaagaatggaaaacaaaagattttggattaataactcattcaaaggctatgcctttcagtaacagtaattaaagaaacaggggaccgggcgcggtggcttatgcctgtaatcccagcactttgggaggccgaggcgggtgtatcacgaggtcaagagatcgagaccatcctggccaacgtggtgaaaccctgtctctactaaaaatacaaaaaaaaattagctgggcgtggt

SEQ ID NO: 2457 - DNA, 6000 bp, Homo sapiens
gcagcaagttcagggatcactgaaaaaaattctgacccttttttatgactgcttttatagattatgaaaataatgtaaaagtcacaactaaaggatggaaaagagattttaagggcaaatatttgagaaaaatattaatattggtaatcgggaacagcctaaagggagagtagatctatggaatttattaatcaatattattatttgctttaatattccattttttcaaagtttttataatcacaattgtcattattcctcaaagaaaacctgtggccataggaaaggctatttgcagaagaaaaaactgatgcatgaagacaatgcattgctccaggtgtatttatttgaagtgactttttagcagatcaggctttagtaccttttagcttatgtttcaattgtggacatattcttgtgtgcattactgtgttatctgcagaattccttctgagttccaatatgattttttcgatcaaggtgtatttggatatttggcttcttacctatgttctaagttttcaattatccttaacacatatattttgtactttaaacctaaccaaacttagctgaccccaagagctcagaagacagccacaaaatgtcaaatgaacaaaattagggcactgaaacaatgactgcttattccagttcagcctgaagattagcccacccctttcttaagggtgtaaattgtttgcttttgatgcccttgatttgttgctgtgctttattttgttttcgcagagaagtgagcaatagggtgggtgaggtttgggggaaggaaacctaggatagaggtataatttttttgaagtttatatcagagcatgagttgatcagggaaattgaagaatgagaaggcaagtgtagatgtacagaacagagtggcttcctcagttccttggagttctttatacttctggaagtttctaaggggaatgttccattgtaccatctgccaccttttgtcttttggtatgctgtctctctctctcaccttcagaaatggtgggaaaacggctaggacagcaggatagaacataggaaatggagtcctttaacttcacctacattttgttcctaacatcttgattttagtatattgtctttgtagcaataaaatcggaactattgcctctgcaccaaatttgactaaggctaaaaatagattagcgaggttgagcatggaagaagtggcaagcttctccttcctccttttcattttgtttcagtttgaatagaaggaggtagctcacacaattaaccagaacagcaactggctggatgtctgggtgctttgagccaattaggatatttttgtggaaagtttccaattcttaattctcagttatgtagaggtgggaggcagctggtgtgaatgtctgtctgcagggtacatgcatactaactctgatccaatatggcatgacagcaatgtgcttattcaagaaaataattatctcaattttcttgtactctaacctaaaatgtcttcgccttcacgacttaaaaaaacaaaacaaaaaaccagaaaaaaaaaaagaaacgccaaagctaacatcacccacatattttgagacctctagtggtatcaataatgaaattaagctaagtctgaatgggcaacagtaattcattatcttcctccacggacccactgccctccccgggaagtctccctttaattaactaccttcatcatttcttctgattttcagaatttcttgacttcactctctctttcacccctcatttttggtgtccaagtggccaccaaagcaatatcccagtgtgtaagctgctatggtgaggaaggtgcagggagtatctggggacaagtctagttttgggttgtcacagatttcctagagaattgatgatttagctgagactttaaggttcagaataatgtagccagaagaagagtgctttaggtatcttccatgcaacaaatttttattgaatacttactgtgggtcaaggtttatgccagactctgtagcgttagaaagctaggcacaatccctgctctcttagcacctaggggatttcaaggttggggagaaatagacatgaaaatataagcacaaaatatctatctatcaatagggccttctaaagggtcactatcctctaatacatattagggaatttaaaatttcaactttttttttctactaaagagtccaaccagcaatttcccctgagtatccagtgcttgctccttcttgccgttccaggctctgttatgcattctgctatggttgcccagagctcgcaatcagaatctcctctccattacctgaatgtgggggagagtattgtttcttgtactttcctgtctatctgtatagttcacaatgaggcagagaacagagtctggaggcagggaacctaagggcgtttcaccccacttcctaaactaaattgaaaggaaaaccctaactttccacacctgagtaacaaaaggaccagaagctgctccctttgcaaaccctcaccttttctgcgtggcagatgggaaactggctgtcagcaaccaatgagactgattgcgggtggagtctttgcatagaagtgcaactttgtaacttcaccttagcctctgattggttgctttttaaacagaagtgtgcaaaaagtgtgattgcacagaagtgtgacctttgttaactccacttcagcctctgattggttgacgaaagcaaccaatcagactaattgtgcgtcaccacttcatttacatgagaaacctccagggggtatttggacctcagaagattctgcatccggaaccttgagccaccgctggggccgcttccatactgtggagtgtactttcattctcaataaatccctgctttcttctttccttgctttgctgggcgtttggtccaattgtttgttcaaaatgccaagaacttggacgacttgcagtcaagaccctctaatggtaacaacaacaccgtgacagagcttttactaaagggctgaattaaagattacactataaaaggggaacactgtaaagctgtcagctaaactagtctttcctccacagttcgtgaggaaggaacctaatttatacattcaacaaatttatgccagctgttctctgatgtgcccaaggcagataaaatctatccatggaggtttcatttcagtgagagggagatatacaagaaataagtaaacacctacattgccaacataattagagatggaggaggaaaataacagggtggaacttctgacagctctcctgggaaggtctctgtggaagtgatgtatttgagctgagacctgaaggaagggaaggagttggccgaaaaggtagaatagaattgcagaaagagatcaaggggagctcttcccaggggtcccctgccctcatattgcctgtcttcactggtgtcacctaatctcctactgctcataacctggctacctatctttcactatctttcaggacaactcagccctatgcatagggatgggttccccccaagcagggactgcttcagagtccaggcaacatctagttacatccctggatgatgggtcttgtttgagtgaattgttttcaccaccagactgtgaaggcttcccattcaggaccctggtgttcatccccattgtctgggaactctaccctgtttctttctttcttttctttttttttttttttttttgagacagagtctcgctctgttgctcaagctggagtgcagtggcgcgatctcggatcccaggttcaagtgattctcctgcctcagcttcccgagtttctgggactacaggcgcacgccaccacgcccagctaatttttttttgtatttttagtagagacagggtttcaccacgttggccaggatggtctcgatctcttgacctcgtgatacacccgcctcggcctcccaaagtgctgggattacaggcataagccaccgcgcccggtcccctgtttctttaattactgttactgaaaggcatagcctttgaatgagttattaatccaaaatcttttgttttccattcttgctctagtcacagcttatttttccagaccatactgttctaagcctcaattacattaaggccaggaggccaccgaagaactccacatgccactgcactggcgggtggagcaagtcaagcagggcagctcatgaacgcccgggagtccaggaggcccgggtggggacgcctggatgacgtcactcgaggtgggcaggccccgcgcggggcgtgacgtcacgcgggcggtcccgtcagccgtgaggtcacctggtgggcgcggccaggccgaatccccagtgtcgtcacgggagggggcgggcccagagcgtgtcagtgcagccgaatcaaaacaagccggagacccgccttttccctccggctcgggagcgtctcgcttgcgccccgggcccgcggcgcccgcgcggctgcgagcctcgggtggccgcgtgccggctccaggaagccggagagggcgcggcggccaggatggcgcggcacgggccgtgcggctagacgggagccgagggaaccgccggctcgcgccctccgttctttcccggagccggcttcacgcagggccgggaacggccgtgcctctgggatccgccttcgctgacgccgggcacctacctggacgcgagcgagcgagatgcccaaccccaaaaacagcaaaggcggccgcaaaaacaagcgcgccaacagcagcggcgacgagcaggaaaatggagccggggccctggcagcggcgggcgcggcgggagcggcggccgggggggccctggcggcggcggccggttgcggggcggcggcggcgggcgcgccgggcgccggaggcgcggcgggcgccggaggcgcggggactggcgccgcgaacgctgcggccgccgcgggggctgcggccgcgggcgatgccaaaaacggtaagacggggctggcggggcgagcgccaacttcctccccgacggggacggcgcggtggcggggccctgggtggcgcgggcggtgcgtggacaatgcgagagtcaggaagtgctcaccccgcccctccgccccgccgcggctgccccttcgcggtccccacgcctggcggcggggacagatctgcggcccctgcccggtgtccgcgcggggggcagcccgcgccccacactctgaggggctcccggctgcggcagcgctgccctcgggcccagcctgctgcccgcgctggcactgccccgccgtgtgtgccgggccgaagggaggaaggaagggaggaaagagccgcccaagttgagaagaatgatccgattgaaaacttaggcaccggttaattcttcccggtgctccaaggccacccgtaacccccggaatgaaggagagagagcctcaattcttagcacacccaggcttgctgcgtcgatcgccacaggtgaagaggcctcgagacatttagggcctctgtgtttgctctttaattttttggcttgcttgaggaaggaagagaatctgaacttgacttccgttctcagcccggagttaaaaaaaaaaaaaaaaaaagaaaagaaagaaaagaaaaatcattctctatgtcattgtgcttaacattttcagaaggaagcctcataatcttaggtagtgcctgaatgttccttttgaggggacacttaggaactggcccagatgtgacaggatttctgttctcattacagagccatggttttcgttataaggtgctgggcaaacacttacttatttggacagttctttgaattcctctagtcaggcactttttccaggaagacaacgtaggtattttaatgaagggagatttgaattgttatatctggcttttaatttatagcgtcagcttttgaagccattctttatgtagatcaggcacttttttgttttgtttttttttttttagacggagtttgcaatttcgcccaggctggagcgtagtggcgcaatctcggctcactgcaaccaccg

SEQ ID NO: 2458 - DNA, 6000 bp, Homo sapiens
atccaacagctaaaactataaagtttctggaggaaaacaaaggcaaatgtcttcaaaatcttgagagtgggctgggcgcggtggctcacacctgtaatcccagcactttgggaggccaaggcgggtggatcacgaggtcaggagatcaagaccatcctggccaacgcggtgaaaccccgtctgtactaaaaatacaaaaaattatccaggcatagtggtgggtgcctgtagtcccagctactcgggaggctgaggcaggagaatggcatgaacctgggaggcggagtttgcagtgagccgaggtcgtgccactgcactccagcctgggtgataaagtgagactccatctcaaaaaaaaaaaaaaaagagaataaataggcaaacttcagggtagaaaattcctgcaaacatatacccaagaaagattccctatccagattatattaggaactaaaaatcattaacaaaaaggtaacctaatttttaaaaaatgggcaaaatatttcaataggcaggtgataaaggaaatctaaatagctgattaagatattttaagatgttcaacattattagtgtttatggaaatgcaaccaacctaccaaaaaccatcaattcaactccttggtatatagctgagagatatatgtctaccaacggaagttggaagaacattcctcacaattcaattcttaatggcccaacaatgaaaacaactcaaatgttaatcgacaagaaaatgaataagtaaattgctcatattatatatccacataatgtaataccgtagaagaggtgtcaataaatttttttctgtaaatggccacgtggtaaatagtttaggctttgtgggccatatggcctctataacaactactcaactctgccaaatggggataactatgttccagtaattttttttttttttaagatggggtcatctcactgtcacccaggctgcagtgcagtggcatgatcgtagttcactgtaagctcgaactcctgagctcaagagattctcctgcctcagcctcttgactggctggaattatagacaggagccatggaacacagcccaataaaattttataaacagaaacatgcagtgggttggaattggcccacaggccatagtttgccaacccttgatacaaagcaaaaataaaaaacaaacaaaaattcttatacatgcaacatggatgaatacaatgtgaacaaaagaataaactgtatgactccgtttatatgaagtttaaaaacatttgaaaataatacatggtcatagaaatcgggacagtagttgactgggggaagcgagtggctccattgataggaaggggcagaaggaatgaaaatgttttatatgtttatctgggtagtaatcacaaaggtatacacatatgtaaatttcaccaagctacacacttttttttgttgtacataaattatagaactaaaaaacatatgtagaattcaacatggataaaaaatatattaaatacattaaatctaccttaaaagatgtgggtgatagagtgaggaagtctaacagaagtctaatcatagctcctaaagaataggacaaaaatgtgtgaaaataaagagataaaagacaaaactttcctgaattaatgaaacataaaccttagagacaggagattttattcatatatatatatacatttatataaatatatttaatttttatataaactctacagagagattatatataatctatatataaagtgtatgtgtatatattatatatatacacacacctacatacattgcctcaaaagtctgtgagtacaaattattcttgatgatacaaggagcagttaaaaccataaagcaattctcgaatttcaaagaattgttggccttgacacgtatgctaactacagtgcaaattagaaatcagtaacaaaaggataactcacaaaaccttccacattggaactagactactttctacaaatctcttaggggaagaaaaaatatcacaatgaaaaaatcttaaattcttagaactgaacaatatactacatagaaagcagcagtaaatgaaaatctgcagtattttcaaatgacaaataaaccaggattaacagcctggaaataagcccaaacatatctgggtactgtatgtgacagaagtggcactgctaatcactgatattgggacaattaccttttcatgtgggaatctgaaaattaattaagcttgatctcataacataaaatatatacatctcaatatatacatgtctcaggtaaattaaagaacaaaatgtggacaaaacataaacttaaaaattcttagaaaaatattcagaatacatttcattaatagtagagtatcttaagacaaaaagcataaggattaatgtctacagtttaatatctgcaagtatataacaaatatttgtatccagaatgttttccaatataaatttctgcaatgatggaaatattctgttctataatgtataatgtaaaatatataacataataaaatataataaaatattaaagtcatatgaggctattgagcactaaaaatgtggcctgaaagaactgaggaacagaaattattgaggtaaatacaatatgttagcattttaaaacgctgaaagtctgtaaagttctgtgatttttatatactttttagtatttcgtttttcataacaaaatttgattttagctaaaattactatataaaatattccagttgtgtacaaaacatgtaaatgtgacttttgggaaagcaaacacaccaaatgatgttttctcctaaatgctttttgaaatattataaattaagttataagaatacataaagaataatttaatgaatactggtatgtccaccatggaatttatgaaataaaacattactgataaattccctaggtactcctccctgagcaagattttttttttctaaaaagaagccaggaaataagaataacagacggagagccctagactcaggcttcttcagtttgcaacacccatattttaacatatttggggggaaatgtaacattcaaacccagtgtgtatcatttaacaaagagttacaaagcaaacacccatgtaaccattgcacaggtcaggcgataaagcatttccagcatctctgagcccctgaccctctcctccccactaggagatgaccattagcttgactttttttctttactacttttaatgcctatacatgcatccctaaacaacagctttgctccaccaggttctgaattttacatagaagatatcacacagcattctccggcaactttttttttttttggttcaacactgaaaggcatttgtgttgaaacacaaaaatacttcattggccactgtacagtgtgccctttttatgagtggtgtataatttatctttctccttcaggtaggcatgaaggcggcatccagttttctgccattacagtcaaccttcttgtacacgtctgcttgtggacatgtattaaaatttatctagggcagtggctttcaaacttttttgtccatgactcatactaaggaatgacgttttacatcatgacacacatttgtgtatgtatgaaactgaggagggggagagagattcataaagcgaacacccctatgacctgagagacactgatgttctattctccgtctgtgttttacaaattctgatcatccatttaaatgactttacgacccactaaaatggacttcaaattctgaaaaacattgttcttaaggatgaatacccaggcgtgcaactgctggatcaggaaacacggacatcggacgtcgtcaacttttccagatccttaactgttaaatgttcttatctaagcgcatataaatttaccactatttaacttcagagcgaaaagcgtgaaacatcagagaacattttatcttttccctcggtcattaaacagtattaatcacttaccatgtgctaagtaagcaatctctgagcccagcgagaccggtgggttaatacgcggaggggctgcgggggaggacttaggggaccaggacctcagtgaggccccagaaagcacccgggaggggcctccgatcctgcctgggagggaggggttagaggaggattcctggaagaaggaggacctaagctgggtgtttctatttttgatttttattggtttcctaaaacatgaaagtaacacatttgatgagaaaaaatattcaaaattacaggagtatattcagtaaaaggtagaaatccccattccgccctgaaagttggatgcggagactaacagaagtcgcattatcagctgtcccgatctaggaaatttttaggaccccacgtttttaaatacttttaagagtatgtctgatacagtctgtaatactaaagcatcaaaataatcatattttccataagagacgaaagtgcaaacagttactgtctagtcccattattacttggaacagactttttcttcttttccttgttctgtttttttcctggcccgttggcgaggttagagcgccaggttgtaagaatcgggtctgtggacctcataccagataggcgcgaacgcctctggcagcggcgtccagggggtccggcggcactcgcggtggggctgcctgggttgcgggtgacgatctgcggggtcccgcacccggccccgcggagcccggacccgcacgtaggcggcgcggcaaaggcacaccctcctcgcggccgcgaacccagcgccgtcctcgcagcgcggcaatgcacggccaccgctgcccccagcccgcccgccgcagccgcgagcacccaaacacctaccctgcggggcgacgacccccggagctcaggcgaggccgctcgggcgtgccacctccgcggccatgacggcgacccggggaagcgccccgcgcgccaaggccccgcgctgctgagctgtgagcacggctgccccgtccgtccgtccgtccagcacccgcccggagagtgaggccagagcacgccccagccgtgtctaaatcaaggctcggggcggtaccgacgggctgaatgacaaatggcagatgccgtgggctttgccgcccgcggcagccaagaggatggctgcgccgaggaggccgcgcgcaggcggggctcgggagccggaacggcgcggccgcgaggagggcgctggggcccctggcgggggcgtcacgtggcaggaggaggccccgccggggagctgggggtcggcggccgaggcggggggagctgagcggcacccacacgtcctgcgggccgggtcaccggtgggggcaaagccaaggtcgcccaggtacagcgctggcgcaggtagacccgagccggcctggggtctgcagcggggcctgctagccgaagtctccgccaggatgggccgccagagcccaatcacacatgagaaacgcgacagatgctgggacgctgcaataggccaaactaacttacctcctgtgccagcagcgcccaagtgcagctgcccaaacgtgagcactgaccgtgagccaggcactgtcctaagcactttgcaggtaaatacgtgtaatcctcacagcaacactgggagaaatacccgtctcacagctgaagaaacgaagacgcagaaagggtagacagaagtaattttctaattacggtatcacactacgtctgcttcatataatttcaaatttttcatgttactggaatttaagaaaaataaactgaagggaatctctattgctttcttccctaaaagacgtgctttttaaaaggcctataagcattacgtaaaaagattaagagaggtgtaaggagctcactacatgttcgggtttagaaagtctcatagctctgaaagatgaggttaattagcatcatacacctccacctacctttagggggtaaccctgcctctcaatttccattagttctgttactttcggcttcctagcaatgagaacatttgcaattgctctgcaactttatttttccagatgttgtcttaa

SEQ ID NO: 2459 - DNA, 6000 bp, Homo sapiens
aataaaatggaatctccaaatacttagagaaaaagtgtgattatggaatttgtcctgaggggttctgtctactacagtgaccacgctggcaacccttgggtccagtttgacctggagaaatacttcatgtggcctctgcagtgtttccaaaattagaagattttatattaaaatgttagatagcatacttcccttgaaaattatgcagatgtggcaaccctgccctgagttcaaacatggcagccattggcctgagctgagcatctgccccttacacaaagaatgtccttttcactttaccacagtcccattgttcctcactgttttaaactttgtagagatttgagtttgcaacccctgctccagaagctttgctagggcatgctgtaatgccaaagcatgcgtcattgagggaaagctcaggagaaaaagagtgtgtcacagctaccaggtcaacatagtcatgttcaaagagaccactgtggaaataacctaaagataaaaaaggatttcatatagttcattaccagtgagaaagaaagactgcttgactgacttctggataaagatggcacaaggaagcactaaaaaaatcaaaattaaaatactaaatcatccaggcatggtggctcacgtctgtaatcccagcactttgggagactgagacaggcggatcacctgaggtcaggagtttgagaccagcctggctaacatggcgaacttccccccaacccagcacccccataccagcctctactaaaaatacaaaaattagccggttgtgatggtgcacgcctataatcccagctactcaggaggctgagacaggagaattgcttgaacccgggaggcaggttgcggtgagccaagatcatgccactgtactccagcttgggtgacagagcgagactctgtctcaaaaacaaaacaaaacactaaatcacccaaaggaaagaaagcaacaaaaaacttacatgctgcaaccaaagaagaaaaaagtacaaccttataatgtaaaatttgagaattgatagcaaaaacaaagagaacagaagattctatggaggcgtgctttgtctccagatgaacctatgtctgcccagccctccacccaccgctgcaagacatgttgaggaaaaagatgatcagaccaaatcctaagaattctcacaaacgtcccccaatgtggaaaggcagggcacacctgtgagatgttgaggaacctttgcataccactgttggatcttgccagaggcaggaaagtttcccactttctgggatactgtgctgaactgagcaaatgaactgaaactctgaggcatgggatgttcccttggctagcttgaagtccagctgccagaggacttaaaggaatctcagatgtgaaggttgagttcctccagcaagctttatactctgtctgagctgaattccacacatccccttttcccccacctctccttgtccgaaaaaccttggatcacagaacaagtagatagaaacaacattcagccctgaaaaagcagcgtattcagatatataatatacatgggacattagaaaagaacataatctataaattggaagatcatactgtatgctggggggaaaaattgatctagaataactgacacagaggcatagcccagataagaatactaaagggtatattaatgttaaagaattcttcaggtatccaagcagaaaaatcaagccacctccaaggggaaaattacatgggattaagatctttccacagaaatctttgaagcatttctctaatgaccagtaatgatgagcttttttcatatgtttgttggccacataaatgtcttcttttgagaagtgtctgttcatatcctttgcccactttttgatggagttgtttttttcttataaatttgtttaagtgctttgtagattctggatattagccctttgtcagatggataattgcaaaaattttctcccattctgtaggttgcctgttcagtctgatgatagtttcttttggtgtgcagaagctctttagtttaattagatcccaattgtcaattttggcttttgttgccattgcttttggtgttttagttatgaactctgcccatgcctatgtcctgaatggtattgcctaggttttcttctaggctttttatggttttaggtctgatgttttaagtctttagtccatcttgagttaatttttgtataaggtgtaacgaagcggtccagtttcagttttctgcatatggctaaccagtttttcccaacaccatttattaactagggaatcttttacctattgcttgtttttgtcaggtttgtcacagatcagatggttgtagatgtgtggtgttatttctgaggactctgttctgttccattggtccatatatctgttttggtaccagtaccatgcagttttggttactgtagccttgtagtgtagtttgaagtcaggtagtgtaatgcctccagctttgttctttttgcttaggattgtcttggctatacgggctcttttttggttccatatgaaatttaaagtagtttcttctaattctgtgaagaaagtcaatggtagcttgatggggatagcattgaatctataaattactttgggcagtatggcaattttcatgataattgattcttccaatccatgagcatggaatgtttttccatttgtttgtgtcctctctgatttccttaagcagtggtttgtagttctccttgaagaggtccttcacatctcttgtaagttgtattcctaggtattttattctctttgtcgccattgtgaatcagagttcactcatgtgttggctctcttatttgtctactattggggtataggaatgcttgtgatttttgcacattgattttgtatcctgagactttgctgaagttgcttatcaggtaacatctcatgccagttagaatgataatcattaaaaagtcaggaaacaacagatgctggagaggatgtggagaaataggaacgcttttacgctgttggtgggagtgtaaattggttcaaccatcgtggaagacagtgtggcaattcctcaaggatctagaaccagaaataccatttgacccagcaatctcattactgggtatatacccaaagaattataaatcattctactgtaaagacacatgcacacgtatgtttattgaagcactattcacaatagcaaagacttggaatcaacccaaatggccattggtgatagactggattaagaaaatgtggcacatatacaccatggaatactatgcagccataaaaaaggatgagttcatgtcctttgtagggacatggatgaagctggaaaccatcattctcagcaaactaacacaggaacagaaaactaaacaccgcatgttctcattcataagtgggagttgaacaatgagaacacatggactcagggaggggaacatcacacactggggcctgttggggagtggggggctagtggggtagggatagcattaggagaaatgcctaatgtagatgacgggttgatgagtgcagcaaaccaccatggcatgtgtatacctatgtaacaaacctgcccgttctgcacatgtatcccaaaacttaaagtataataaaaaaataaataaagcaattgccatcttgttctgttaggttttgaaggaaggtgtgaattgaaaatatttacccaactcactttttatttatgtatagagaaaaacaccagatcttctcaaacatggcagcactctataaaccctccttaggaatatgacttgaaaatgaaggaagtccatcaagaactaaataaaaataaaaattcagggatagataagttacagtgaatatcaaattcatttaaagatagaattaagacaacatctggaaaaataaagttgcagagcaattgcaaatgttctcattgctaggaagccgaaagtaacagaactaatggaaattgagaggcagggttaccccctaaaggtaggtggaggtgtatgatgctaattaacctcatctttcagagctatgagactttctaaacccgaacatgtagtgagctccttacacctctcttaatctttttacgtaatgcttataggccttttaaaaagcacgtcttttagggaagaaagcaatagagattcccttcagtttatttttcttaaattccagtaacatgaaaaatttgaaattatatgaagcagacgtagtgtgataccgtaattagaaaattacttctgtctaccctttctgcgtcttcgtttcttcagctgtgagacgggtatttctcccagtgttgctgtgaggattacacgtatttacctgcaaagtgcttaggacagtgcctggctcacggtcagtgctcacgtttgggcagctgcacttgggcgctgctggcacaggaggtaagttagtttggcctattgcagcgtcccagcatctgtcgcgtttctcatgtgtgattgggctctggcggcccatcctggcggagacttcggctagcaggccccgctgcagaccccaggccggctcgggtctacctgcgccagcgctgtacctgggcgaccttggctttgcccccaccggtgacccggcccgcaggacgtgtgggtgccgctcagctccccccgcctcggccgccgacccccagctccccggcggggcctcctcctgccacgtgacgcccccgccaggggccccagcgccctcctcgcggccgcgccgttccggctcccgagccccgcctgcgcgcggcctcctcggcgcagccatcctcttggctgccgcgggcggcaaagcccacggcatctgccatttgtcattcagcccgtcggtaccgccccgagccttgatttagacacggctggggcgtgctctggcctcactctccgggcgggtgctggacggacggacggacggggcagccgtgctcacagctcagcagcgcggggccttggcgcgcggggcgcttccccgggtcgccgtcatggccgcggaggtggcacgcccgagcggcctcgcctgagctccgggggtcgtcgccccgcagggtaggtgtttgggtgctcgcggctgcggcgggcgggctgggggcagcggtggccgtgcattgccgcgctgcgaggacggcgctgggttcgcggccgcgaggagggtgtgcctttgccgcgccgcctacgtgcgggtccgggctccgcggggccgggtgcgggaccccgcagatcgtcacccgcaacccaggcagccccaccgcgagtgccgccggaccccctggacgccgctgccagaggcgttcgcgcctatctggtatgaggtccacagacccgattcttacaacctggcgctctaacctcgccaacgggccaggaaaaaaacagaacaaggaaaagaagaaaaagtctgttccaagtaataatgggactagacagtaactgtttgcactttcgtctcttatggaaaatatgattattttgatgctttagtattacagactgtatcagacatactcttaaaagtatttaaaaacgtggggtcctaaaaatttcctagatcgggacagctgataatgcgacttctgttagtctccgcatccaactttcagggcggaatggggatttctaccttttactgaatatactcctgtaattttgaatattttttctcatcaaatgtgttactttcatgttttaggaaaccaataaaaatcaaaaatagaaacacccagcttaggtcctccttcttccaggaatcctcctctaacccctccctcccaggcaggatcggaggcccctcccgggtgctttctggggcctcactgaggtcctggtcccctaagtcctcccccgcagcccctccgcgtattaacccaccggtctcgctgggctcagagattgcttacttagcacatggtaagtgattaatactgtttaatgaccgagggaaaagataaaatgttctctgatgtttcacgcttttcgctctgaagttaa

SEQ ID NO: 2460 - DNA, 6000 bp, Homo sapiens
cgttgtgaagatggaggcagagattggcatgctgtggccgcaagccaaggaagccgaggaagccagggaatggcagtggtcaccaaaagctggaagttgtgaggaaggaatctccactagagccactagatggcgcctgcggcctttgctgatatcttgatttcagacttctggcctttcggactcagaaaataaatttcatgttttatgccaccagtttgtggtaatttgttatggcagctataggataaaatatagccactatctggctaaggaagttccattccattcctagttgtcatttttttcaggatggggtgtagttgtcaaatgctctttttgcatcaattgaaaataacattttccccctccattattttgttaatgtgggcataatctgtatgattgtctgcccatgtggtattaattttagccccatcatagctgttacccctggtaacacctgttcctgaaagtgttgggtcctgacacattgtatcaacctatagatgtgtcagcatgaattttcttgttctgcatttgctgaagaaatgttaagaagtcattcaatagtctgcagaataaaatggaatctccaaatacttagagaaaaagtgtgattatggaatttgtcctgaggggttctgtctactacagtgaccacgctggcaacccttgggtccagtttgacctggagaaatacttcatgtggcctctgcagtgtttccaaaattagaagattttatattaaaatgttagatagcatacttcccttgaaaattatgcagatgtggcaaccctgccctgagttcaaacatggcagccattggcctgagctgagcatctgccccttacacaaagaatgtccttttcactttaccacagtcccattgttcctcactgttttaaactttgtagagatttgagtttgcaacccctgctccagaagctttgctagggcatgctgtaatgccaaagcatgcgtcattgagggaaagctcaggagaaaaagagtgtgtcacagctaccaggtcaacatagtcatgttcaaagagaccactgtggaaataacctaaagataaaaaaggatttcatatagttcattaccagtgagaaagaaagactgcttgactgacttctggataaagatggcacaaggaagcactaaaaaaatcaaaattaaaatactaaatcatccaggcatggtggctcacgtctgtaatcccagcactttgggagactgagacaggcggatcacctgaggtcaggagtttgagaccagcctggctaacatggcgaacttccccccaacccagcacccccataccagcctctactaaaaatacaaaaattagccggttgtgatggtgcacgcctataatcccagctactcaggaggctgagacaggagaattgcttgaacccgggaggcaggttgcggtgagccaagatcatgccactgtactccagcttgggtgacagagcgagactctgtctcaaaaacaaaacaaaacactaaatcacccaaaggaaagaaagcaacaaaaaacttacatgctgcaaccaaagaagaaaaaagtacaaccttataatgtaaaatttgagaattgatagcaaaaacaaagagaacagaagattctatggaggcgtgctttgtctccagatgaacctatgtctgcccagccctccacccaccgctgcaagacatgttgaggaaaaagatgatcagaccaaatcctaagaattctcacaaacgtcccccaatgtggaaaggcagggcacacctgtgagatgttgaggaacctttgcataccactgttggatcttgccagaggcaggaaagtttcccactttctgggatactgtgctgaactgagcaaatgaactgaaactctgaggcatgggatgttcccttggctagcttgaagtccagctgccagaggacttaaaggaatctcagatgtgaaggttgagttcctccagcaagctttatactctgtctgagctgaattccacacatccccttttcccccacctctccttgtccgaaaaaccttggatcacagaacaagtagatagaaacaacattcagccctgaaaaagcagcgtattcagatatataatatacatgggacattagaaaagaacataatctataaattggaagatcatactgtatgctggggggaaaaattgatctagaataactgacacagaggcatagcccagataagaatactaaagggtatattaatgttaaagaattcttcaggtatccaagcagaaaaatcaagccacctccaaggggaaaattacatgggattaagatctttccacagaaatctttgaagcatttctctaatgaccagtaatgatgagcttttttcatatgtttgttggccacataaatgtcttcttttgagaagtgtctgttcatatcctttgcccactttttgatggagttgtttttttcttataaatttgtttaagtgctttgtagattctggatattagccctttgtcagatggataattgcaaaaattttctcccattctgtaggttgcctgttcagtctgatgatagtttcttttggtgtgcagaagctctttagtttaattagatcccaattgtcaattttggcttttgttgccattgcttttggtgttttagttatgaactctgcccatgcctatgtcctgaatggtattgcctaggttttcttctaggctttttatggttttaggtctgatgttttaagtctttagtccatcttgagttaatttttgtataaggtgtaacgaagcggtccagtttcagttttctgcatatggctaaccagtttttcccaacaccatttattaactagggaatcttttacctattgcttgtttttgtcaggtttgtcacagatcagatggttgtagatgtgtggtgttatttctgaggactctgttctgttccattggtccatatatctgttttggtaccagtaccatgcagttttggttactgtagccttgtagtgtagtttgaagtcaggtagtgtaatgcctccagctttgttctttttgcttaggattgtcttggctatacgggctcttttttggttccatatgaaatttaaagtagtttcttctaattctgtgaagaaagtcaatggtagcttgatggggatagcattgaatctataaattactttgggcagtatggcaattttcatgataattgattcttccaatccatgagcatggaatgtttttccatttgtttgtgtcctctctgatttccttaagcagtggtttgtagttctccttgaagaggtccttcacatctcttgtaagttgtattcctaggtattttattctctttgtcgccattgtgaatcagagttcactcatgtgttggctctcttatttgtctactattggggtataggaatgcttgtgatttttgcacattgattttgtatcctgagactttgctgaagttgcttatcaggtaacatctcatgccagttagaatgataatcattaaaaagtcaggaaacaacagatgctggagaggatgtggagaaataggaacgcttttacgctgttggtgggagtgtaaattggttcaaccatcgtggaagacagtgtggcaattcctcaaggatctagaaccagaaataccatttgacccagcaatctcattactgggtatatacccaaagaattataaatcattctactgtaaagacacatgcacacgtatgtttattgaagcactattcacaatagcaaagacttggaatcaacccaaatggccattggtgatagactggattaagaaaatgtggcacatatacaccatggaatactatgcagccataaaaaaggatgagttcatgtcctttgtagggacatggatgaagctggaaaccatcattctcagcaaactaacacaggaacagaaaactaaacaccgcatgttctcattcataagtgggagttgaacaatgagaacacatggactcagggaggggaacatcacacactggggcctgttggggagtggggggctagtggggtagggatagcattaggagaaatgcctaatgtagatgacgggttgatgagtgcagcaaaccaccatggcatgtgtatacctatgtaacaaacctgcccgttctgcacatgtatcccaaaacttaaagtataataaaaaaataaataaagcaattgccatcttgttctgttaggttttgaaggaaggtgtgaattgaaaatatttacccaactcactttttatttatgtatagagaaaaacaccagatcttctcaaacatggcagcactctataaaccctccttaggaatatgacttgaaaatgaaggaagtccatcaagaactaaataaaaataaaaattcagggatagataagttacagtgaatatcaaattcatttaaagatagaattaagacaacatctggaaaaataaagttgcagagcaattgcaaatgttctcattgctaggaagccgaaagtaacagaactaatggaaattgagaggcagggttaccccctaaaggtaggtggaggtgtatgatgctaattaacctcatctttcagagctatgagactttctaaacccgaacatgtagtgagctccttacacctctcttaatctttttacgtaatgcttataggccttttaaaaagcacgtcttttagggaagaaagcaatagagattcccttcagtttatttttcttaaattccagtaacatgaaaaatttgaaattatatgaagcagacgtagtgtgataccgtaattagaaaattacttctgtctaccctttctgcgtcttcgtttcttcagctgtgagacgggtatttctcccagtgttgctgtgaggattacacgtatttacctgcaaagtgcttaggacagtgcctggctcacggtcagtgctcacgtttgggcagctgcacttgggcgctgctggcacaggaggtaagttagtttggcctattgcagcgtcccagcatctgtcgcgtttctcatgtgtgattgggctctggcggcccatcctggcggagacttcggctagcaggccccgctgcagaccccaggccggctcgggtctacctgcgccagcgctgtacctgggcgaccttggctttgcccccaccggtgacccggcccgcaggacgtgtgggtgccgctcagctccccccgcctcggccgccgacccccagctccccggcggggcctcctcctgccacgtgacgcccccgccaggggccccagcgccctcctcgcggccgcgccgttccggctcccgagccccgcctgcgcgcggcctcctcggcgcagccatcctcttggctgccgcgggcggcaaagcccacggcatctgccatttgtcattcagcccgtcggtaccgccccgagccttgatttagacacggctggggcgtgctctggcctcactctccgggcgggtgctggacggacggacggacggggcagccgtgctcacagctcagcagcgcggggccttggcgcgcggggcgcttccccgggtcgccgtcatggccgcggaggtggcacgcccgagcggcctcgcctgagctccgggggtcgtcgccccgcagggtaggtgtttgggtgctcgcggctgcggcgggcgggctgggggcagcggtggccgtgcattgccgcgctgcgaggacggcgctgggttcgcggccgcgaggagggtgtgcctttgccgcgccgcctacgtgcgggtccgggctccgcggggccgggtgcgggaccccgcagatcgtcacccgcaacccaggcagccccaccgcgagtgccgccggaccccctggacgccgctgccagaggcgttcgcgcctatctggtatgaggtccacagacccgattcttacaacctggcgctctaacctcgccaacgggccaggaaaaaaacagaacaaggaaaagaagaaaaagtctgttccaag

SEQ ID NO: 2461 - DNA, 6000 bp, Homo sapiens
ctttgttttttttttgagacagagtctcgctcagtcgcccaggctggagtgcaatggcacaatcttggctcactgcaacctccatctcctgagttcaagcaattctcctacctcagcctcccgagtggctgggattacaggcacctgccaccacacccaattaatttttgtacttttagtagagacggggtttcaccatgttggccaggctggtcttgaacccctggcctcaggtgatctgacggccttggcctcgcaaagtgctgggattacaggcttgagccaccgcacctggcctaaacctctttttctttagaaattacccagtcttgggtatttcttcatagcagtatgaaaatggactaacacaagagatgatgaaaaagatgctaaaaagctgtatgtgctcttctgaaattatattcagagtagatccaatcaacatactcttttgatgtcccagtagcacgtaacaatttgagaaagtaacaaaacaagtgaatgaggggagatttctgactggaaatggagagaagtcaaggaaatgaagagtcatgcttatggcggtaaggaaataagtgcacacacgtacacacaaaaccacagcaacaaaaactgacctatagtgagtggagaggtaagggaagtcagaatggaggtaatgaactaagaaagtaggaagaggttctagggattaaaggtcacaaagacattttttaaaataggaagcaagacaaggtgggcagaataagaggctgtggcaacaaaagggaattctatatccttggagtaatttattcattaaggtggtcccttacattggtaactaatgagttcctggaaatgtgtttaaaggcaaaaaacaaaacaaaaaaaaaaatagaaaaagaaaaaaacaacaaaacctgtagatgttagaaatatttctcattactagaaaaaaattttgattagaaaatttctcatgatggtctctgtaggtcctggctccctcaggcttgagcggccagggctgccagtgagagttctagcctgtcagccctcactctggaacccaaggcagggagatggctgctggggtcaggccacccatgtcccaggcacctgggtcgattaaacccaactaccaacatcatgccgttgtttagttggaacagggtagggggtgaggatcttcatcttctgtacctacagaggatttgattgtattatttcaccaaagaattgaggctgtgtctgctggaactaaccccattccccaacccaggagagcaggttctaggcactgggacatgacccctgagcctccttcatgagtgccgtctgtgtggaggcagaggtccaagaacatggttctttggcatggggtggtgggcgctgggaccacaagcccccggcgtctgtgcttcttttgatgagtggctaacagcaacacccatcactcaatggttggtgtcatctcttagatcatgacccaaaatggaatttggtgtatgaaaggtagttgcaggttatggggcagggggtgcggtgtgtattaataaacagtgcacagctgtactgatggtatataaccaaagatcttgtacttgaaagttaaggactgctggatgcgctagtgacatctgcaaatgagggatgttgtgactaggtatacaactaaggaaggctgtactctcagtctgggattggggaatgactgctttaatcttcaagctcaagggcctcacatcttctgtaggtcttttaagaaagcacccacagaccaaacgtggtggctcatgactgtaatccaagcactttaggtggccgaggtgggcagatcacctgaggttaggtgttcaagaccagcctggccaacatggtgaaaccccgtctctactaaaaatacaaaaattagctgggcatggtggcatgtgcctgtaatcccagctactcaggaggctgaggcaggagaatcgcttgaacccgagagacagaggttgcagtgagctgagattgcgccaccaaactccagcctgagtgatggagcaagactccgtctcacaaaaaaaaaaaaaaaaaaaattgttgggtgtggtgtcaggtgcctgtaatcccagctactcaggaggctgaggcaggagaatcacttgaacctgggaggtggaggttgcagtgagtcgagatggcgccatcgcactccagcctgggtaacaagagtgaaactcttactcaaaaaaagaaaaagaagaagaaaaaaagtaatgtgagtccctcctccctcctcgctctcactttctgttctccagcctgccatttctagatcagttggtctaaacctgttctgctgtgaagtgcccaatagcatgggcaaaagaacatgggctctggtgtcagcttgcctgaataagcactagaatggtagctgttattcctttcattagagcgatttccttccctcctctaaactttggaaaaaccatctattccttgaaagttgtatgtatcctccctctctcacttcctttattgaatttgtttttgaaagtctttgaaagttcaattcctgcatgaaagttcactacctgcctgaaggagaagtagtgaacttgccttctttatctaaatgtgcaatctcccatctgcctaccccatccgagccacagctggactcacatgttgtggggtgggagtgtgcatgggtgcaaggtttattttctgtcttaacaaaatattgttgcttttacagtaatacaataacaaactatttcacaatttagttagaaaatttaatgcacttttgtagttttattcatgtttctgacagatataaaatctttctctctgaagaggcaacggaaaggatgtgtctcattctccttctccttattcctatgatccttttattcttctctgtcctttcctgcttccactctccttttgctccccctaaaaatttgatttgtcccttttattacccaagagggagaacaaaagtagaggggggaaaatctcttcacgatactggcattttataagaactacatattgaaaggctgtgacttaagaggcactaccaacgacccaaaagaatttcactaattcttttatgaattcattcattcatgcaacgaatgtcctattatgtgcctggcactgtagcaggcactctcccttcctcaccctaaataactaagttgtggatctaagctttctgtttagttctcctgcaatagaaacttaaaataacgacttacttttgatatactcttttcttccactttgcaaaacataaatgacttcatgtattttattttattttattttattttatttattttttgtgagatggagtctcactcttgttgcccaggctggagtgcaatggccctatctcggctcattgcaacctctgcctcccaggttcaagcaattctcctgcgtcagcctcccgagtagctggaattacaggtgcccaccagcatgcccagctcatttttttgtatttttagtagagaaggggtttcaccatattggccaggctggtctcaaacttgccagcctcagcctcccaaagtactgggattacaggcgtgagctaccgcgcccagcctgacttcatgcatttaaaatagtttcttctcttctcccccaaagtgcagaaaaaagagctaagatttagaatccaggcaaatcaggtgggttcaaatcctgactatctgtgtgaacttagacaacttaatctacttttgagttttcattagttaattgagggtattacaactacagcatagagattttgaaattcaatgagaaaaagaatgaagtgccttgaacaggaaagttcctttccttatgttgttgtcttcgtttatacgccctttggggatagattataaactcattcatctgaagtgcagtagtattaataaccaatataaaaactaaacacatagtcctaacagagcaagcaaatgtgtaacctgaacacatttcagtaaatttgttgattttccaggtatttcatatgcagggcaagtcttctttgctgttgcatgagctggggaaattttgcactgaaaattcattaacaattcactcatgggggaatttcttctcttgcccaaacaacaagttatggtaacatagttacatattcatatttgtgagatggaactgtggaaaaagcgggtctttgcaacgtggcagaattgggttttcggtgaaaccatgaacaagttacgtgactccctgagcctcggtgttctgagctataaaactggcatattgcttacgcacgcgttggcatatgaattgagtttaacacgtattctaacacctggcacataactgacaatcagcattatttcctcctctcccaagtccacctggccagttacagggaaatgatccctataaacaacacctgctgagtgcgccccgcactatgctaggccccgttcgcggctcacctcatttaattctcgcacttaattaatctcatgaagaacattgcagaggcagtttgagacgtgaagctaatgaagcttaagcttcgggccccctcacgcgcacagatgcttgctaatcccagaatctcattttatacttcccttgaagattcgccacctctactcacagttgtttcagtttcaagccccacaacacgtggattcgcccctggataggaattattgttattattattattaatttccctccttttgcagaggggtagagtaggttacctcagatcacacactcctaagtggaggagcaagatctgaactgaggcagcccgacccggagccccaactcttaaccgcgggcggcgatgacaagagtctcgcggaagagaggcaaagtccccaacgcgggggcggataatcatagcgcagaagttcccaaggcggctaccgcgggccggctggggtcggagggggatcgccccgccgaggctcccgccccttcctccccttccccttttccgcgccgccgagtcggagctgcgccgcacgcccagcggccgcccggacccgccggccggagctgacccagtgggccacgggctccggactccagaactttccaagcgggggaaacttggcggcgggtaggtaggaaaggcaggtgaggcaggggcgagcgagagaactggctggcagcggggcggggagccgggggcgcggcgttaaggtgggcgcgtggggcgggggctccaacccgtgccgcaggtgcccacgtgccgcgcggagtccgcgggccaggcgaggtagcctggccgaggctcctgcctgcgtcctgccggggatggcggtcggtgcttgggacaccggcggccacctttgtgcggcttggggcgcgcttcccttttctccgtcgtctgcagctcttcgcttctgcgctgggcggagggcgggccgggtgacgtgggagctgaacagccgccacctagcgcccgccccgccggccactgtccccgcgcggaggcaggtcgccgcctcccgggtcctgtgctctccgaggctgggggcggggctgtctgcgcagacggcggggtgatcattgctgaaccaccccaacgggagaatctcaagtgccagcttagcccgtctcccagagactgagttaatgggaacaaagtgaccgagttgcggcggggaggtccccgcagactccgggagaaaagagacctgggccgtggcgtcaccccggattaccggcggcgcgcgggataatttcgagagcaggactcccctgatgggggcgggcaggacacgccccgccacggtgggcgtgggcactttggcgggtgcacagccgtgttgggtttgtagggcccctgctgtgtcgaggacagagatacccctggggcttcccgagtgttcatgggtctaggagcgcgggacctgttcattttattgaaaaagccaagtgaagtgacaactatggcagttattcaagggtcgtggcattgagcatctgtgtggccaccgaaagaacagaactccgatgtat

SEQ ID NO: 2462 - DNA, 6000 bp, Homo sapiens
cttgaagaactttgtgggaatcaaatggagtatgatacagatgaaaagacttttaaaataatcagtttgggtctggtgcagtggctcacgcctgtaatcccaccactttgggaggccaaggtgggcggatcactcgaactcggtcaggagttcgagaccagcctggccaacatggtgaaatcccgtctctactaaaaatacaaaaattagcctggcatggtggcacgtgcctgtaatcctagctactggggagactgaggcacaagaatcacttgaacccaggagacagaggttacagtgagccaagatcacgccactgcactacatcctgggcaacagagtgagactccatctcaaaaaaaaaaaaaaagatgataatataaatcagtttgttcttactttgattctgccccatgtagctgtgttcacttggacttatcattcaagttctctggagcctacttcctcatctgtaaaatgaaggatttgacctagatctttttcgaggcccttttccatttccatgaggtagaattctaatataaaacgttcttggtaaatgatatcctatatgactctgaagttgtgatgatgatgatgatggtgatttctttataaggaaaggacaactttgttaaaaagcccctgaagggccaggagccttggctcatctctgtaatcccagcactttgggaggccgaggcaggtggatcacctgaggtcaggagtttgaggccagcctggccaacatggtgaaaccccatttctactaaaaatccaaaaattagccgggcgtggtggcaggctcctgtagtcccagctacttgggaggatgaggcaggagaattgcttgaacccaggagggggagattgcagtgagccgaaatcgggccactgcactccagcctgggcaatgagcgagactctgtctttaaaaaaaaaaaaaaaaaaaagagagagagagataaaaagcccctgaaggaaattttagaagaaaggagtgacaagtgacattaactaagagagaaaagagtcgtcaatcttgggagtggtaatcagatcatgttgagttaacacatggaaattgataagtagaaagtagctgggactacaggccacatgctgccatgcccagctaatttttgtatttctagtagagacgaggtttcaccatgttggccaggatggtctcaaactgctgacctcagatgatccttctgcctcggcctcccaaagtgctgggattacaggaatgagtaaccatgcctggcctcaaatttcacattctatgtataggcatcaacatttctcccaaaacattatctcatttccctatccattgattaagaagcaccaggaaaaacagcttaaatatctagaataggttgatttctataagtgccaaaatgctggctaaggtttaattatatgtgtgtgtatatatatagatatataattataaatatagatatctatataaatatctatatagatgtattttttgagatggagtctcgctctgtcgtccaggctgagtgcagtggctcactgcaacctccacttcccaggtttaagcgattctcctgtctcagcctcccaagtagctgggactacaggtgtgtgccaccatgcctggctaagttttatatttttagtagagatggggttttgtcatgttggccaggctggtctcgaactcctggcctcaagtgatgtgcctgcctcagtctcccaaagtgctgagattacaggcatgagccaccatgcccggcccgtttaattacactgatgcgggtatgtgttgtcactaaactgtacgtgtctttagatgaccctgaaacatactataacctgtgaagaagcaggtggccattagtatggccttgcctcatcttggatggggaaactagcaccaggtcaaatgctttgccccaggtcatctgatgagtcaagaagaaaatgattctggattggtgctggagagtcaggcttcatcctaaccccagccccaactgcccggcttgcctggctccttgctgagttatttgctggaaagtgtttatgtagagaacaggctgccccttggaagcagcacagtcctctgcatcttcttaaatttaagaaagtaccaggccaggcacggtggctcatgcctgtaatcccagcactttgggaggctgaggcgggtggatcatgaggtcaggagttcgagaccagcctgaccaatatggtgaaaccccgtctctactaaaaatacaaaaattagccaggcgtggtggtgcatgcctgtaatcccagctactcaggaggctgatgcaggagaatcgcttgaacctgggaggcagaggttgcagtgaaccaagatggtgccactgcactccagcctgggcgacagggtgacagagcaagactctgtctcaaaaaaaaaaaaaaaagtatcacgtggtgaataaattcaaattcttaaatataccaatacagtcaactgtaaaggctatttatcttttcctatcatttacttatatttatctatttatagaaatgacaattaaaaaaacctcatcagccttaactgaatttatttttattcaaagtatcacagagcacgagggagccttgaaaacccatctggcctaactccggcatcagcctaggaaagcacaagacctggctgtactgactcatagttcagtgctctttctacttcaacacaatgcctcaatgctattaaggagaaatttaataattcttttggtttcctttcacaaacattatcgtcagagactgtgcgcagtggctcatgcctataatcccagcacttgaggagaccaaggagggaggatcccttgagtccaggagtttgagaccaccttgggcaacagcaagagatcatgtctctataaaaaatttaaaaaattagtctggtgcagcggtgtgcctgtagtccctgctactcaggtggttgaggcaggaggattgcttgagcccaggagttcaaggccgcagtgagctacgattgcagcactgcactgccggggtgagagagcaggaccttgtctctaaaaaaatttttcagcatactttttttttctttggagacagagagtcttcctctgtcacccaggctggagtgcagcagcaggacctcactgtaaccttcgcctcctgggttcaagctattctcctgcctcagcctcctgagtagctgggattacaggcatgttccaacactcttgctatgttttgttttttttttttgttttttttttttttgtatttttagtagagacagggttttgctgtgttgaccaggctgttctcaaaatcctggcctcaagtgattcgcccgcctcagcctcccaaagtgctgggattacaggcgccagccccgcacccgccaaaaacacacaaaaattatcagggattgtgtttataaatttagttacttttgaaaatgtttttacattttgaactttcctgtaaggactattcacccattgcattgattggtgctcacagcacttaatacttgaacaaggggaattcaaggacatgctcttatcccctttcaagtggactcagaaggaaaacaaaacaaaacaaaacaaaacaaacaaacaaacaaaaaaaaccccacaatcaacaagaaacaggagaggcctcaaaacaagcagggctctctccctggggcatctcacttttttttttccttttaaaccacaaggccctaacagaggagcaaactccatgtggtttcttaactgtttcaaaagtgatcaatcaccaaatcgaatgtgacgtgcattgtcaccttccaaggaaaactctgagtagtcttgaaagatagaatcacaaaagggaaaaatcacctctccagggctagttcccttataaaataaatctgtcctggggcttccccttggaaaaacacacacagggccccaagtgtgtgtaggctgactggctacacaatcatttgaatttagtttcgaaaatagcccttccctgtgtccctaatgtaaaggaataattaaaacccaaagcgcatttcccttaattagccgaaagccctagcaatgcatggcattgtgggcattcaggagccaaaatgcccccactcataaaaaatgatccaaacaatggctcgtgcccaagctttcacacttgttttgcagagaagtcttggctggcagaggcaggatttgtaattccttgggtcgcttgacttcacgaggggcgaggtatgcattgtagcgacacggactacttgtgaagcctttgggcgggagtcgcttaaagattaactttctcgggtttccgttaccaaaagcgtttccgtgaatagcgtgattggaaacttgtgcgggccggagaccgcggcgcggctgctctttcaacaggcgatttgttctcctgtccgaggctcatttccatgcaaagagcctgacatcagagcaccttttgttgctaaacgctttctttagcctcgagggagagagtcatgtggagctggaagagctcattttgaagagaggggtcccggggagctccctccaagatctagaggctccgcggccacccctgccgggtcctgccaagacttgctagaaggaacgagtcgcgtgccttagttagttggttcccgtcacaggaagaaacgcctttgcagtgggtttaattgcttctgggccgagcgaattccccgccgtacaactcagtggtgcggactttgcctcctgctaccctgttgctgcgccgagcggggtgggaaagtttctggagttgtcagtcgcgcagcccgtggccacctagacccgaggtgcgggcgcctgcgaagggcccccgcggggtggccggggccgccggggcatgcagcgcgggggcgcggctcggtgacgccgcgggcggggacccggcatccgggcaggctgcgcgcgggtgcggggcgagggcgccgcggggactgggacgcacggcccgcgcgcgggacacggccatggaggacgcgggagcagctggcccggggccggagcctgagcccgagcccgagccggagcccgagcccgcgccggagccggaaccggagcccaagccgggtgctggcacatccgaggcgttctcccgactctggaccgacgtgatgggtatcctggtaagttacctggggagggggcggcgcaggaagtacagttcgcagcagcccctctgaaaccgggggctcccttctcgcccacccactgggcaacccactccgcagaggcgtccttctctggctctagttcttagggggctaaatacacacagtataggatttcaaaccctaattaaaaaataaccagccacaggtcccgtcaaaaggtgttttttaaacaatcgggtatgatattcaacagtttaatctgggacacctgctgacatgttggtgtggaaaaggcgagaaagaggccttcaaaaagtagatgtaaataaatatttggttggtgctggattagggaaaaggctgatgttactgatgtttatctcttcaccatttgttgtgtgaccacaagagggaaaacaaacatttccttactcagaactgccaaaatgtttgcctacttttttttgcagtttttcaatttgtggagttacaggatatttgttttatatgtttggggctaaaacaataggacttattttgctaaatctgtgctgtcatgtattttgaaatgtccagtgactaaaagcgcccctggatttggcatagtctctgggaagcagttcttctgtatggagggtgaagttttaacctgctcagggttgaataccttggggaagtaatagatttgctttggtggagctgtagttaggcaggtagactggaatcagatgggcgaggtttattacagtcagacatcttaatccatacataaaagacaactttagtttaaagacttggaatggccagatgtgcagattatcagaaaagtctctagatttgctttgagatcttatattttt

SEQ ID NO: 2463 - DNA, 6000 bp, Homo sapiens
gtgttatttctacttagactgtgcgtgtgcatttgagggaggatttggggacactgatagtgactagaggagttggaggaggtaaagatcaaagataaccctttcttgtaaaaaaaaaaaaaagaaacatacagaaacatcagggtgtattttgtgtgtgcatgtgcatatgtgtgtgtatggggaaaaagtgggaaggcataaaccaaaatattaccaagttttctgagtatgggatgatacgtcatttctcttactactttgtgcatttttgcattctccaaatttttaataatatatgtcatgtgtagtcagaaacaataaatgctactaacatacagatgtggaaatgaatatggtcatgtacattgtctgcatgacagttagtgatgggctagggaatctagcaatgccaatatatgtgtgaagtccttggataaagtatctttagtctaaggtagatgaggagcaaagccaggagagctttccagaggaggcaatatgcagactgaaacttgaaggatgcataggagttaggggtgtggatgcaatcagcagagctgtttgcagaagatgagccatcagggcagtgatgggcatggggtgtttgagatgctgcaaggaagcagggggtgagaccgggtgctctggtgccctttctaccacgtggtatctgaagagtggagcacaatgtaccagaaactgaatctgaccgcacacagtcacatattccactataaggcctttggaccttgttccaaggagctaatgaggaccaattcctcaccataggagtcaaatactgaagtcccttctcagcaaatttgcacatctactgtgttcaagcccgccacccagagaacaggaccagcagtggccttccctcacaaagtctatctcccaatctgtccctcaccagggagcttcctagggtggcctggctcagtctagtcttccaaatatcccccagtttactctgacacatggccagggctgagagccacagggctggggagtctcaacttcttcattccacagtgatcgcaccagtatttatgggtgggcactaggaatgcaaggagcaggagatcagacaaggctcctggcccggggagcctcctgttttctgaaagtcaagccatggtacgtcctcacaaagggcccaacatcgagtatcttgataaatacctgaatgactccctgagaggcgtggcagtgaggttaaaaaggggtggacaaggtcggctctctctcccatcctcttaggacactctccaagtcctgtgctgtgaggagaggccgctcaggggaagtactggggatgtatccttcccgccaccctccccaaagtatctggataaatcagtgcatgaacttcatgtgtatttcacatggaacgagggcttccttacctgccaagctctagacttcacattcaaggtctcattttatcctctagagagccctaggaggcttctcactgcctatcttagaaatgagagaagaaacatgcccacagccacaggctcttcccatgtggcacagaggggatctgaacctgcattggctcagagtcttctctatatctgaacagcctgtccagaaccagcctcagatgctggccatatgacaagctttcacacgtaaaaaggttgttggttttttctgtttttgttttttgagatggagtcttgctctgtcacccaggctggagtgcagtggcacgatttcggctcagtgcagccactgcctcccaggttcaagcgattcttgtgtctcagcctcctgagtagctgggattacagatgtgcactatgcctgactaatttttgtatttttagtagagaccatgtttcaccatgttggccaggctggtcttgaactcctggcctcaagtgatctgcctgccttggcctcccaaagtgctgggattacaggcatgagccactgtgcctggctggttgttgggtttttttgttgttgtttttttttttcttttttctttttggagatagagtgtcgctctgtcacccaggcgtgcagtggcatgatctcagctcactgcaacctctgcctcccaggttcaagcaattctcctgcttcagccccctgggtagctgggattacaggcatgtgccaccacacatggctaatttctgtatttttagtagagacggggtttcaccatgttgttcaggctggtctcgaactcctgacctcgtgatccgcccaccttggcttcccaaagtgctgggattacaggtgtgagccaccgcgcccagctaatttctgtatttttagtagagacggggtttcactgtgttagccaggatggtctcgatctcctgagctcgtgatctgcccacctcggcctcccaaagtgctgggattacaggcgtgagccaccacgcccggcctggttgttgggtttttaagtggtctttgctatttacacagcacctaaaagaacagtttgtgaaaattaggtgttatttgaactccagtgagttatgaatagaagactgcagagttaataataaggctgggcttggtggctcacgcctgtagtcccagcactttgggaggccaaggcaggcagatcatctgaggttaggagttttgagactagcctggccaacatggtgaaaccccatctctactaaaaatacaaaaattagctgggcatactggcgggtgcctgtaatcccagctacttgggagactgaggcaggaggattgcttgaacccgggaggtggaggttgcagtgagctgagaccaagccattgtactccagcctgggcaacagagcaaaactccatctcaaataataatattaatagtaatagtaaaaatattaagtccttattgaactccagttcagtaaggatttcaggtacgcagtatttaatacaaccacaacgtaagaaaagtgctactataccacatttatgtgcaggaatattaagacccataaaagtaaagtgatttgctagagaacttggtaattaaacccaggtttttctaacccctgagaccttgggctaatcctcttccctttaccccagtctcactggggcactctcattttcttcgtttttatcctgtaacgaaggaatttggtggaaaatgtctacactcagttttaaggaactgtgagcataactttgcagcatagttgtcagtcttggatgaagaaaggtcttgttgaggtagggtagtggcacaggagcaaaaccatacagtctcagattctgcccctgccattgctgtgaaatggggtctgtatgcaaatgtttagcacagtgcctgggaatgctaagctttggacaaatacaagtgttggaagtacaacatcgcaaaagcacctggtccgtcagatggtggcaggggaaggggagtttgtgggagaatcagtttgtgaaatggggaattgggcagtgtagggaaggtgtggtgaacccttgcaggagaaagaagaggaaattcaataaaggttgggaggagatacttctgagcagaagacagagtgggagaagggagtttaattcttggcaaggagtgagagacgccagcccgcccagggaagaagagcaggacaagagccgaggaaaaggggatggagctctggtgatctgatgcagaacccgcaatgtgtgcgtggtaaaacatgaccctccacttgggagcttcgtattccaattcccttttgttgttgttgttgttgttgttgttgtttgagatggagtctcgctctgtcgcccaagctggagtgcagtcaggcgatcttggctcactgcagcctctgcctcccggactcaatttatcctcctatcccagcctcctgagtagctgggattaccggtgtatgccaccacgcctgactaagttttgtagttttagtagagacgggttttcaccatgtttcccaggctggtctcgaactcctggcctcaagtgatctgcccgcctccgttggaattacaggcgtgagccactgtgcctggccgtttttagtttaggtaacctctgaatcctgtccaactctaaacttctgccattttaaggagggacagtggttcctacgcatccctgagtcctgtgtagctaggtattttatgtcgtgtgatgtcctataaagagcattatacatgaagactcacccaacaggagggacatctagaaacaagcaactcacattgtgctgtgagaataaatgacttacccaagtgaatgaacttagccctgaaaagacaaacgtgacttgcagcccacgtcatggagactttgtgtgggtttttagtcctgtgttgtttagatgatgttctttttaagtaacagcatgtgcctagtggctcccctgaggtccttgagaaaattaaataatcatcttgtgacacggtcctcatgctcacgtttctagaatgcaggagaactcggatgctctgaaatgggcattaaaacaatttgttaagagagctttagaagcaccaatgaaggggaaatatcctacatttaccctggttgttaaaattttaaaaaggaatggggagagagagagaaagtgacaactctaggagaaaaccacaatcataagttttaattcagtaatttcaaaaatagccattggaaggtgtctattttcaattgagactgctcccttaagggggtgttcagaagaatgtctgaaaaagagatctttttttaagttcagtcacttttaagggttagtccttgtcctccttgtcctggatttgctcagattctcgcgttcttttttctgtctctggaattccatagacagtaattaaggaactggaggccagcaggaggtcagggagccttcctcagtgaaaacagggattgttggccatgcacaacactcccttttttccttgtggtgaataggagatttgcttagagctgatgacttatgcctttcttgcgagttatgcagttagcaagcgactggggaatcagtcagcaagcagaaagaagctaattgaatccagtgtcttcccctttctccttcggatactgagctgtgacggtggagcctgcctgatcatgtaactccagagagacatgttccaggagtgcctaatcttaattttgagattgcggagtttgatgctacaagagtgaagacgctctccgagtggggaggggggtgggaggtacaggacgtcttcagaattaccccttaggcttgctaaatgccgaagccggtaagtcactgaatgcgttcaatgggaaagaaagaatgtgttttctgttgcttcaagtaaaagtttttgctgctcctgcctatgatgtttctctctcttttcttcttaaattcctctagatttgtccttcttcgcctgtttacttccctacctggtaaccctgagcatttttgcctggcattttcaccagtgaaaatgcgtaacttttagagaatagtgagtattgttttgagaatttgagacaatgagcatatatggctcagctgtgaattgtggaggcttttcctggggaggacttgaattcagacagtgttgcacattgcttttcataagcttatatctgattggcttccttctcttaagtttaagattaacgctgtgacacagccgacctagaaagctgaagtatgtatgtctaatcatgcgctaggttagagagaccagtgtgtgaatttcacaggcaagtacatttccagtttcaaattgcttttcagaaatgtttaaatatctctcggtgttacgtggcgctgggggagatgagtgggcttagtctgggtgttaattgtgacagcgtgtcgtgtgtttcgagctagggaaacaagctgagtgaaagtgcttctgcagagggcacagttgtaatcctgtgatcagcgtggtggtctcaagcggtcctccaaagggtctagttgctccttgcaaattggttttaacctttattacagcatattgccattgtgcttgcacaactgtgccatatggcttttggaaaggatt

SEQ ID NO: 2464 - DNA, 6000 bp, Homo sapiens
agagagatatggtccttggcctttaggcttttattaagatagaatatgatcagtggtcatgaatccagggaggcaagatttaggtgataggattttattccttttcttttggagctcagatgcccagtcttgagttactcatagaccttagttcatagctatattgcttcataacagattatcccaaaacttggtgacttaaaacaacagacattttttatctctttcactgtttcactgggtcaggaatttgggcatgacttagctggatgccttagattcagggtgtttctcagagctgtgatcaggtattggccaggcctgtagtcatctcaaggctctagtgaggaaagattcacttctgatctcactcacatggttgttggcaggattcagttcctcaggggctggtggactgagggtctcagttcctcactgattgttggcctggatcctgcctcagctctttgccacatgagcctctgcccaggcagctcactctgtggagctggtattccatttgagtggggccagcaagagacagcaagcaagatgcaagtcatagtctaatctcggaaatggtattatgttatttgttacaggcacacattcaaggggtagtaattatataagggtacagataccaagaggcaaaggtcattgagtgccatcttagaggctccctatgattatccatggatataaggcccttcttttgttatatttattttttgtttctctcctacttgtcataagcaatttctccactcacatattttcctcctcaccttccatagactctctaatatatttaaggtactttcttggatatgtatgcatcctttaaaaatgagtattttatatagcatatgtatttttaatttataaaatgacattgggatttagatcttgttctatgtctgagacctttttttagccaaccctgtattttgatgatccatccatgttgctatatgtaaattttattcattgcttctgtctgctacatggtaccatgtggtctgtatccaccatatttcccctagcagggaataaatagattgactctacttgatttctcaaagatttctgtcattaatgtccaaaaccaagttcctttgtggatctgtgtgagactttctctggaagatttacacaagagtgggattgctgggtcatggggtgtatatatacatatatatgtgtgtgtatgtgtgtgtctatgtacatatacatgcatacataatttccccaagtactgccagattgcactccaaaatgactatgccagtttattcctgcaaattgatgtaaagatttcctttttcccaaatccttgccaatacttagtatcattgcttttttgagtctggtaaataaaagaggtctctcggccaggcgcataggctcatgcctgtaatcccagcactttgggaggcccaggtgggcggatcacaaggtcaagagattgagaccatcctggccaacatggtgaaatcccatctctactaaaaatacaaaaattagctgggcatggtggtgagcgcctgtagtcctagctactcgggaggccgaggcaggagaattgcttgaacctgggaggcagaggttgcagtgagccgagatcacaccactgcactccagcctgggcaacagagtgagactctgtctccagaaaaataaaaaataaaagaataaaaagaggtttctcatggcttcagtttgtatttattggtcactcctgtctgtgcttgttagctgtttgggtttcccttctgtgaattgtcctttatgctctgtcctcattttcttgtgaggtacttttgtccattaatgtgaagaattacagtgatagattttctgatcttaagtcatccatgcatttctgggataaacccttcttgatcatgtggtgtgtgtcttgatgcattgtaggtaaactaatattaggatttccatgttcataagtgaaatgggtcttgtgttcttattcagttgagatgatttcagccacataaaaaagagttgctcagcttttctcttgttttctggatcaacttttatgtggttggaattatttctgtttagaagtttggttaaaaaaaaaccccaaggcaggccaggcgctgtggctcacacctgtaatcccagcactctgggaggcctaggcgggtagatcctgaggtcaggagattaagaccatcctggctaacatggtgaaaccccatctctactaaaaatacaaaaaattagccgagcgtggtggtgggcgcctgtagtcccagctactcgggaggctaaggcaggagaatggcatgaacccgggaggcggagcttgcagtgagccgagaacatgccaccgcactccagcctgggtgacagagtgagactccatctcaaaaaaaaaaaaaaacccgaggccagaccaggtgcggtggctcacacctgtaatcccagcactttgggaggccgaggtgggcagatcacccgagatcgggagttcgagaccagcgtgaccaaaatggagaaaccctgtctctactaaaaatacaaaattagccaggcgtgttggcacatgcctgtaatcccagctactcaggagcctgagtcaggagaatcgcttgaacccgagaggcggaggttgtggtgagccgagattgcaccattgcactccagcctgggcaacaagagcaaaactccgtctcaaaaaaacaaaaacaaaaacaacaacaacaaaaatacccgaggccaggcatggtggctcacgcctgtaatcccagcactttgggaggccgaggcgggcggatcacgaggtcccaagatcgagaccaacctggccaacatggtgaaaccctatctctactaaaatacaaaaatttagccgggcgtggtggatgcatggctgtagtcccagccactctggaggctgaggcaggggaatcgcttgaacctgggaggcagaggttgcagtgagccgagattgcgccactgcactccagcctggcaacacagtaagactccatctcaaaaaaacaaaaacaaaacccaaaaaaacccaaaaaaacccccaccatacttacagaaatcatctgggcctggagcttttttgtctttttttaatgttttcttgagacacagtctcactctgtctctgttgcccaggctggagtacagtggcactatctcggcttactgcagctttgacctccccaggctcaggtaatcctcccacctcagcctcctgagtagctgggactacaggcacacaccaccatgctctgctaatttttgtattttttgtagagatggggttttgccgtgttgcccaggctggtcttgaactcctaggttcaaaggttggattaggttctcatatatagaaagtttcatggcagacacatttaacatttattgaagacctactatttgtcaagtagtatgcttagtactttaaatagccatttattgtttatagcgtaactcctgaaagtagttgctatggcagttccacagatattaaaacaggcttagaaaaaagttaagggacttgattaaggtggcacaattataattctagccaagatttttctaacttcaaaatacatacgccttctgctaatccacactgcttcaaaaaatgtatctaatattcactatttattctgcagatgtttaataaaatgtgtgtcatgcaaggatcatatagtctcacacctttcagatgcaaatcctactgtcagataacagtctactagagataagacatatatagaaactgtaatttgaagtagacaagtgtcttgggatgaaagtcacagtaaagtgcaaggggactttagaggagggagagtttattttgaactgaggagttcagggggtagacatactaggaaaactgccatctgagctgggctttgacaatagggagggtttgaatgtgggaacttttttaaaacaatgttttaaatttattttattttatttttttattttttgagacagagtctcatgctgttgccaggctggagtgctgtggtgcgatctcggctcactgcagcctccgactccctggttcaagtgattctcctgcctcagcctcctgagtagctgtgattacaggcacgtgccaccatgcccagctaatttttgtatttttagtagagaccgagtttcaccatgttggccaggatggtcttgatctcctgacctcgtgatccacccacctcagcctcccaaagtgttgggattacaggtgtgagccaccgcaccgggcctgttttttgttttgttttgttaaacagagtcttgctccatctcccaggctggagtacagtggcacgatcttggcctactgcaacctctgctaccctggttcaagcaattcttgtgtctcagcctcccaagtagctgggactataggcatgtgccaccacgcccagctagtttttacattttagtagagacagggtttcgccatattggccaggctggtcttgaactcctggcctgaagtgagctgcctgccttagcctcctaaataaaatatttctttgaggccaggcgcggtggctcatgcctgtaatcccagcactttgggaggccgaggcgggcagatcacctgaggtcaggagttcgagaccagcctggccaacatggtgaaaccccatctctacaaaaatacaaaaaaaattagccgggcatggcggtgggtgcctgtaatcccaactacttgggaggctgaggtgggagaattgcttgaacccgggaggcagaggttgcagtgagccgagatcatgccattgcgctccagccggggccacagagcgagactccgtctcaaaaaaaaaaaaaaaaaaaaaaaacaatgttttttttaaaggagtgaaatagcatgagcacacatatagagatgggaagtgtggtatgtgtgattgtttcttgagggagccctggaaagtattttttaataactatacttatttttaagagacatgtaaacctaaagtgtttctttttttcttcttctttttagcttacagttgaacatgagtcttcttatgattagtgagaatgtaaaattggctcgtgaatatgcattgctgggaaactatgactctgcgatggtctattatcagggagttcttgaccaaatgaacaagtatctgtactcagtcaaagatacatacctccagcagaaatggcaacaggtgagagtaatggctgctgtatgttttaatggcttaagtactcggaagagaaaatttagatcagatgtcaatgctgtatgtagttacatgttaagactgtatgactaccgagcacagtacacagtggctcactcctgtagtcctagcactttggaaagccaaagcagaaggatcacttgaggccaggagttcaagtccagcctagacaacatagcaagacttcattctacaaaaataaaaaaattagccagatgtggtggtgtgtgcctgtagtcctagctactagggaggttgaggtgggaggatcacttgagcctgggagattgaggctgcagtgagctatgcttgtaccactacactccagcctgggcaacagagctagaccttgtctcaaaaataaaaaacaaaacaaaacatgagtatgtgagttattacacagatttctatataatattacttgacactttattatatgaataataatccactttcaccatcagcagtattatgagttctacttaattctaattgctggaatctaataagaggggttttttttgttttgttttttcctcgagacagagttttgctcttgtcatccagggtggagtgcagtggcacgatctcggctcactgcaaccttcacctcccaggttcaagcctcccgagtagctgggattacaggcgcctgcctccacacccagctaatttttgtatttttggtagagacgggctttcaccatgttggccaggctggtgttgaactcctgacctcaggtgatctgcccacctt

SEQ ID NO: 2465 - DNA, 6000 bp, Homo sapiens
gattacagatgtgagccactgcgcccagccttcttttccttgttctcacctggtgaaaagagagggggaggggtggagggagatttctatggcttctccttttaaagatgccttcctaaaagttctacacaacactttcactgccagaagttagatccatggtcacatctagcagcaagagtgtctgggaaatagtccttattccaggtggtctgattttatcaaccaggttctgttatgagaatgggtatttggcatccagtctctgccgcagtgagcaagctgagagaatttctttttttttttaattattattttttgagacagggtcttgctgtgttgcccaggctggagtgcagtggtgtgatctcggttcactgaaagctctgcctcctgggttcaagcaattcgcctccctcagcctcccaagtagctgggattataggcacgtgccaccatgcccagctaatttttgtatttttagtagagatagggtttcaccatgttggacagcctggtcttgaactcctgacctcaggtgatccacccacctcggcctcccaaagtgctgggattacaggcctgaaccaccgtgcctggcccaagttgagagaatttctgatagcttctatttctttgaggttggaggcatagtaattcactgaaagggcagaaagggctgggtagctgcctttctggggtaaaagtctgaaataggttgggtgcactggctcacgtctgtaatcccagcactttgggaggctgcagtgggaagatcatctgaacccaggagttcgagaccagcctgggccaacatggtgagaccttgtctctacaaaaaatttaaaaattttctgggcttggtgtcatgtgcccgtagttctagctactcaggaggctgagacaggacgatggcttgagcctagtgggtcaaggctgcggtgagccgagatcctgccactgcactccagcctgggggacagagcaagaccctgtttcaaaaaatgaaagtctgaactaatgggaagagtgagacataactgaagtgagacaggcagaaaaatgtttcggctgggttagaaagacatgaaattatggcgcatcaatcttcacagagatgtgattttcttcgtagcattcaacagcctggtattagcagatcagtgatggaagctgttgtttaggaagaatgtgtataaggttagtgaagaacactggtgaatctgtcccagtctgttactgcagctatggtgtgacataatctaaaaattcagtaaatcttacttatggttagatttttctagccttatacatactgtatcccaggagatggctcaaatgtttgaagtatagaagaggaatgccagatgcatcaaccacgtgagtgaagttaataaactggccctaaaagtcctttccaatttctctcatgaaatgtaaaaagtgtctcaaattcttttatgtatttattttttgagacagagtcttgctctgttgcccaggctggagtgcagtggtgcaatctctgctcacggcaacctccacttctgggttcaagtgattctcctgcctcagcctcccgagtagctgggactacaggcgcccaccagcacacccactaatttatgtgtttttagtagagatggggttttgacattttggccaggctggtctcaaactcctgacctcaggtgatcctcctgccttggcttcccaaagtgctgcgattacaggcgtgagccaccacacttggccctcaaattctttgaaattattttatttattctacaaatatctaattaacacctacaatatgccagacattgctctactcaaatggacaaagtatctgacttcattaagtttactcactggggcaagagaaacaaatatataatgtgaagaaggtcttcatggccattcaccttctgtgtaattccaggggtcacagtacctcttgcaacagtcccccaatctattctctctcccctccaaaacttcctacgtttagctgtcaaattaatcctcctatttgctatataacttatgtcttcatttgacacctttcaatgggtccccttttgtctactgaataaagtttaactctttagctggcacctatctttctacctcttttcccctaacttgtttttgtgtgtcctgtgattctgccaaattaacctgaccattcaccaggaaaatataatctcagattttctgagtcacagtttggatacaatcattttagaagggtggtggttgtagaagccacactgtaaaagaagaaatgactcctagtcatgagagtggtacacaaatattctgcttcttcaaggcacaatgcagagatgaacacctgcatttctttgaagtcaggcttgaccagtgacttgctctggccaaaaatatgtaggcagagcagcaagtttcacatccaggcagaggctgtgcaatttatttccctttctttttttcactgccaagggtcccactgcctgcatccactcaagctatgaacataaaaagtagataagaaaaaaatgctattgttgaagcctctgtgacttagaggttgctacagcataacccactcctgcctgactagtacagctagtaaagaaatggaagtagtgaatgtaagccactctctggaggtttgtctttccacctaaaaaaagtcttcagccaggagcggtggctcacacttgtaatcccagcactttgggaggctgaggcgggcagatcatgaggtcaggagttcgtgaccagactggccaacacagtgaaaccccgtctctactaaaaatacaaaaattagctgggcatggtggcgggcacctgtaatcccagctactcggggagggtgaggcttcaacctgggaggtggaggttgcagtgagccgagatcgcaccactacactccagcttgggcgacagagctacactctgtctcaaaacaacaacaaaaacccaaaaaatcttcatatataatacgcgtacgtacacgtaataaaatgtgcccagtttgtgtactgttgatgaattttaataaatgtttacacctgtgtaagcactaccctaacagaacatttcctttccatcaccttaaatatttcctggggactttcagcaatctatttcttctccccctcctcctgaatacagcctcaggcagccaaccactgatcagctattattatagattagttttgcctgttctaaaatttcttttctttttcttttttttttttttgagacagagtcttgctctgtcacccaggctggagtgcaatggcgcgatcttggctcactgcagcctctgcctcctgggttcaagcgattctcgtgcctcagccacccaagtagctgagattacaggtgtgcgccaccagacccagctaatatttgtatttttagtagagacggggtttcaccatgttggccaggctggtctcaaacgccttgacctcaagtgacccacccgtctcggcctcccaaagtgctgggattacaggtatgagccaccgtgcctggcctagaatttcttatcaatggaatcatacaatatgtattaattttgtggcctttgagaagttttttaactgtaaattggctttataaattagcatacctttgaactcacataaaggatgaaggttgaattagggtaattaatctgtacctccctgaattggttttgattccaaaaatatatactaaatatagtttcctgttccctattacaatagagttcatatttactacagtgaaactatcattttccactcagttgagacgttacaagactttaagccccatgaaacattctatttcgtgaccactgtatacccagtgccaacactgtctcacacatagtagttgctgagtaaacatttgttgactgaatggatgtatttcccctgaattgcttctacatgtctatgttagatgactggggtgcttttatttttttagagatagggcctcactttgtctcccagactggagtgcaatggcgccatcatggcccactgcagcctccaactcctgggctcaagtgatcctcttgtgtcagcctcctgagtagttgtgactacaggcgtgcgccaccatgtccagccaatttttgtactttttgtagagacggggggtctcactatattgcccaggctggtcttgaactcccggctcaagctattctcccgcctcagcctcccaaagtgctgggattacagggatgagccactgtgcccagtcgggatgctttaatgttagaaacttaattaccttgcgtttttaaaggaatgtgtgagaagtgccctattctgcctcaagtgatggcagagggtggagattgagactggaggaagccctgtgcagtacatatctgtaagtcatgaaatagcatcattttccttgtctggtcatattaaaacggtgattaaaaaatcaagaaaataaaatcccactagcagtgtgtccgagaatctttgtttacctcctccctattgttatgtcatgacatggagcccagctggggaattctgaatactaggttctaaaacaggatttgtcataaacgaattgcttgatcctggacattcacctctaaaatagacacctgacctcggtgtgtgtgtgagtgtggtgaaaatcaagtgggagggaaagtgagcaagcacctgaacaaggtacagaggcgcgcgaggtagtaccataataccatctacaccaaggtctatactatccctggtctccgctgcgtccgccgggaggaggcggtgcaagaatgcgcacgcgcggccccgggcccggccacaccctcttccgccgctcccgcccagcgacctcgctcccggggcgacgccccgcgtgcgccagagtcgccgaggtcgtccccggcaccggaagtgaccctggcgggtttgtcttcaaattctcggcgagcaggagccgcgccggcaggtggtgttgacgattgaactgggcagtactggggccgtgagcggagagcaaagtgggctggactgggtcaggccctccttcctcgctgccgggatctccactccgccaatcccctgtgcctggcgttgggcggtttcccgaggagcttgggccgccgcaggtgagttttcactctggcggtgctctggggacccccgattttccagggccgggctggtgagggactcggggggcccacagcgagaacccgccgcgcaaccctccgtgagcctgcctgtgcctgagctgaggtcctaggtccttgctgttgtccacgataacttggcttaggtgacagtccccctacctgaggaatcctgtcaggcggaggacttttcgggggctcctgtcgatcccatcttttgatctgtgtcgttagcgaagtcaccagccgagtttttagttcttcgatttttcgactggttctctccagaacccgctcacgccccccaccccgaaaccctcacaggtaaaaatcccgatggccatgacattgggaggcaacttcttttcttaaaatttgttaggttcgagtgatattgttggggatgttatttcttatttattctagagcccggcgtcctctggaaggcctgtgggccttttggtttagagttggtaccttttagaaaagttttccctcgaaacagttgtttcatacaaatgtgatgacaaagttagagataaacgtagatcctgaagtgccttacagtggataatctcaagctcttatttaatcaaaaatagtttcctgttaaaaccgcgaagggccgcttttatattagttactaacttccaacagcacagtgatgctcttttctcttgaaagcactaatttacgtcttcctctttgaaattagacctctagttattgctgaaaacattcccgatgttttagaatgggtgcagtagatctttgtcacgtaatcacaatgataatcaccttagtagatgttaagacagattcttgaaatgtttttacgggcttaaatgtct

SEQ ID NO: 2466 - DNA, 6000 bp, Homo sapiens
gggactctccacgacttggagaagggttccaagccctttcgtgggacctacttgctcttacttcctgcgttactctaaccactctagccacctggtttaagccccaggagcacatccgagtgtagtaagtgttcatcatcatcatgcattcattcagcaaacacatcttccacatggagcctgtgccgggatagtcctcggtgctggggctgtggtggtggacaggagtccctgtcaccgcggagctggacttctggcgtggaggacgcctactgagatgagtgtttaggctgatcggggtgtcccgctggcaacagcagtcacccttggcagccggcctctgctgggcccctgctgagcgggcgccgaggcaccgtgctgcttccctgctctgcagagagagacggaggcctggcccttcgcagcccccatctagcgggagggtctcggtgtccactgtctctcccagtggccgacggcccaggtgaggggctgcccgtacccgtctccctctgcttccggctcccttggtggccactgcactgtgcacttgcaggggctgccaagccacagaagccaggccagccggtcccctgcctgtcagctgctgactcacaggggtctttgtccccatcagctgcagaggtggcctgcaggctccaagaagccaccaaggcagggccctgtgggcacaccctgacgtcacctggtcctgcagactgtggtcactgcacttggtgtctgggcccagctggcaggagtgggagagggccgacggggtggggggtgatggtcaggccactgtgccctagaggctcttccggctgtggaggaggagggtcttgggggcagggatccccttcagcctcacatttcccagcccaagcaggatacaagtaaggacatttccttacggagccccagagtttctccttcaccctggagctccctccaggcagcccctctcagcccttgtcctccccgtggagagctgctcttgaagttgaaatcgtggtacatgcaaaggaagaggctggtttcagccccgcaggctctggcagctgcatccacgcttcctgctgtttctcactccccacccggcccgccatttctaacagctctattgaaatgcgacgcacattccacgtacctcgtccctttgaagggggcagttcagcgacttttatgtccacggctagtgcaaccaccgtcacccttcgcagaacgttttgatcccctctcaaggaagcccgaaccctctagttatccatcaccctgctgtctcccgtgccctcaaaccctcagccaccagtcggctactgcgtgcctctgtgggtctgtctgttgtgagcatttcctggaaagggagtcccgtggcctgttctgagcatttcctgggagggagtcccgtggcccattaccagcatttcctgggaagggagtcctgtggcctttgtgattggcttttctcacttcccttgttcaaggttcacccatgtggtcataggtgtcggtggtgtattccttcttgtggctgaaacaccccactgtgcacggccgcatcttatatatccagtcatcaactggtggaccttgtgttccttcttgtggctgaaacaccccactgtctgcacggccacatcttacatatccagtcatcgcctgatggacatctggatggtttccgctttggggctgttatgaacacagctgccctgaacattcacggacgagtctgtgtagatgtgtgtgcagttctctcgggggtctgcctgggactgggcctgctggatcacatggtaaccgtttcaccattggaggaactgccagactgttctccagggctgccgcacaccagggttccagtttatccccatcctcaccaacgtgttgttgcgtgacttcccagccgtcctgggggcgcaaagtgatacctggctgtgatttcactttctgtctctggatgccggatgatgccgagcagcttttcatgtgtctattgaactcatagaagtctgtcttcagatgccttgcccattgtgacactgggtcctcataggagtctgtctgcagacgccttgcctattgtgacactgggtcgtttgctgacagtgcttcatgtgttgaggtgtaagttcttcgggtatagatttgcagacattttctcccattctgtggcttgtttttgcctgtcactggcgtcctttgaagcacaagagttcttagtttggatgaagtctgattacctgttattttcttttgttctttgtgctttgggctaagaattctttgttaaatccaaggttaggagggtttcctcctctgttttcttccacaggttttacggttgggctttgcgtgggtcttggatccattgttacttagtttttgtttatggtgggaggtggggcccagcttcattctttggcatgcgccagcccattgtcccagcagcatttgttgaaaagactatttttccctatcgaaaggtcttaacacctttctcagaatcacttaacatgaacgtgtggttggttcctggactctccactgtgttgttggtctgtacgtcggtcctcatgcccacaccacaccatcctgattgcagtggctttgtagtaagttttgaaatcaggagactgagtcttcctcccgtgttccccctttgcaagcctgtggtggctcttctgagcccctgcagttccgtgtgagtttcagaatcagcttatcagttcttcagggaggccggctgagtcctgggattgtacagaatgtgcagatcagccctgggagtctctggtcccgacagcgccgggtcttctgatccgagacatgggatgtttcctaatcacctagatcccgcctagtttcctcccatgctgttttgctgcctgtgtgtttgaaatggctcctcttggtggggtgggtgcaggagtggtgctgtttgtataggacatagggccgtcctcccatcccgacactcggctgccctggagacgggcctcagcacagggctcccattacccctgcacttccagcacctgctgaaatgtgtggcgcgcgggctccgaggcatggaatggtgtgcctgactctgcgctgcccaggctgtggtcacagcagcaggctggaagtttggctgtcgcccccagccaccttggggcacggtcctgtctcacctggagcagaggtcctgggcccccaggggctcaggcgtggcctccttctggaggggccgggaatgtcccctccacttgctgagtgttggcccaggaggctcctctgtgggatgccagctgctcccaccatgagtggcagctccacccctgtattcacagctgtgctgagggcatccagggcctggaaatcatgtcagatggacagacaggtgtgcgggtggatggactaagggaagaaaggaaggatggcaggaacgaacgcgtggaggtcaagagcctggcccagaatcacggtggggacgtgagcgggtgggtggtgcccagtctgcccctcccgtgctgcctctaggggctctgccttctccaggcgttaggcagggaaagtcccctgaacttacagaaagacgactaggtgcctggaatgttgccatctgcacagagccctagcgcctgtcctcccacttccctcgccctcctgggaggtgggttctccacgccaccagttatggagcccaggcttgttctcagccctggtcagcggtgccatcgcaggtcgctccagccccagccgcaggtgcccagtgaatgctctccgtgacccagggcctcctgctgcaggtggaagccgggccacgggaacctgcgccgaccttggcctcacactgtggctccgggagagcaggacctggtggtgcatgcgtagcggctgaggaggacaagcctgggggctggtcccagcccggacacggtggctttgcacacaccaagccttcgcccccagcggggccagcagtgcagggcgctgcactgttgggggccagagggtgacaggattggtgtttaagaagaacttctcagttttatcttttctctgttttgatttggtttccttcatctctactggcttgggcttttggtccttaaatcctctaatatacagaattgtttcctggacctcaagccccccatcaggggggaaacctcatcccaggatgatgggccggtcgtggggcaccctggctgggggctgggggctggggctgtgctctggctctcgttcctgcccgtggaacgttgaacgttgccaggacatccaccccggggaacttgacgtcctcaggcactgctgggtccaacgccagcgctgggcgcaccaccgctgacccccgacccctcctgcaagtccccctatctgctaagtaggaggatgctggggccaggcgaggccttgctgggcagcctctaggatggtcactacctcctcccacctggaggtcccttcaggaggtccgcggtgttgaagcctggggaggaagaggaggctgaggcctgggagaggaagaggagggtgaggcctgcggggggaggaagaggagggtgaggcctgggggaggagggtctcactgctctgggtcagaggagggctgagtacacgctgtgcggcctggttcttgccaggggtcagctgactacagccccgccttctgtgcagcccctcaactaagaaccgttgtacatttttgaagggttgaagaaaatcaaaagaagaatattttgggacacacgcgggttatctgaaattcagattcgtgtttccgtgcccgcagctccgtcagcggggcccatgctggccttgtgtgccctgcggctttctgggtgcagttgcagcgctacgtggttaggacgggggcagggtgactgcacagccccgtgactggctgctctccgcaggaggcggccccaccctctgcccacatcctccctggctcctcgaggctccgtaggatggtgaagaggttgagatgctgtccagcccacagaggccccggaaagccagtgccgcccgtcagaggggtctcctgagtgcgtgtgggtggctggattctgcatactgggttatcttaaccccggctgtgaaaactggatgaagtagcaatcctttcaaccccaagagtctgtgattcagccagagttacaagatgtctcttcatcctctgaggtttacaaggttctcagaaaacctgtgaagagctgcgcggatcctctcctgccccggcccagcggcagggctgccgcctccctctcccctgggcctgagtgggtggatttcccctcccctcctccttcccaggagaagcacagagggagcggccaagcgagccgtgtctgcaaaccccgcttccctctgcggcggcctctgccatcgtgccatggggccggaggtccctggtccaggtcagcatgtccatctccactggcctcttccatgaggggggtggcagggccagcagttagcttgtgtgacgtgacgtcagggggatgtcttagagtccggggtggcaccaggaggggtgaggtctcttcccttcttccccatcctctcctctctccctgttggaggcacattctgggctctgggaccacgattgcccatggctgatgagctccagcccaagtgaggtccccagggtacagcccaagccaggcctcgccgtccttcggggacttggagagcagtggcccacagcagcctgagctcttgggaggctggaggcttactgcgcccggtctcttcaccccgtggggtgtgtccacaccggcctctcctgagagcgtggggtgatctgaacacaggatgtgtttccctgttcccctctgggagataggagagtgcgtgggcagaagccccaagggtggcaggaactcattgccaaaggggaggaggccattgctatgcgtggtgctggcctggcttgctgggtcatgtctgtgcctgacatgacccatgtcatgaccatggtcatgtctgtgcctgacatga

SEQ ID NO: 2467 - DNA, 6000 bp, Homo sapiens
ttttttttttttttttttttgtttatagagcctcactctgttgcccaggctggagtgcaatggcgccatctcggctcactgtaatctttgcctcctgtgtttaagtgatttccggctaatttttgtatgtttagtagagatgaggttttgccatgttggccaggctggtctcgaactccaggcctcaggtgatccgcccgcctctgcctcccagcatcctcgaggtgcttcctggtgcttccatcgtggtcagcctgaaagcctttttattgtttttcagctcaacatttattgactaaataagtgaatttgtgttggaaatgtcagttccttttctcattgctgagcttatcaccgtggagtcctcctagtaactgatttcagtggtttctgttcccctaagtgctcttgagatgaagcaggagagtggcccagcgtgccttgtaggaggaagtgacagaaggagagagcgtgagcgtgatctgcctgggcttgtcctcccggaagtcacaagcatgcagccaaagctgtttgccttcggtggaaatttccgaaggttgtaacatactggatattataggagtgaaagctcaggagcataaagtgaggcgtgaggccgggcgcagtggctcacacctgtaatcccagtactttgggaggccaaggggaggatcacctgaggtcaggagttcgagaccagcctgggcaatatggtgaaacccccgtctctacaaaaaattagccaggtgtggtggcatgttcctgtggtcctagctccttgggaagctgaggtggcaggggtcgctcgaacctggggaagtcaaggctgcagtgagctgaggccgtgcaacggagtgaggccttgtctcacacacacacacacaaagacacacaaagataacttgctgatatttgagtaacaccagtttgctaaaactaaaaagatgcctttgtgtcaccttacgtaaaacaagacttgttgcctataactgatctcagcatctgcctccccctcttctcactctgtacctacattcaaagccccctcttcacaagcccaacgcccccatctccccaacagtcccctccactgaggagggccgtagttctgttgagaaattgtcagagttgataagctaagggtacagtcacagattttcttgttcagtctgcttaacagaaaggctgttccaacggtagggggagagaaagggaccgtgtttcattcctagtgtaaacattggaagtccaggtattttgaagattacctcatttttcaaaggcgaaacccctcagtcttcaccccaggaaaatgggacgcctcacgcctcattttagctgggtctcctgagtagctgagactacagctaatttttatatttttttgtagagacaggatcttgctatgttgcccaggctggactagaactcctgggctcaagtaatcctcttgcttcagcctcccaaagtgctgggattttaggtgtaagccaccacacctagccgatatcagtttttgtacgttattttatatctgttcattttcctcatctcttgacttgtttccagtagtttctacattgaaagcaattggattaagctggagaatggatttcttgatttaatccagaggcactttatgtactagtttattattttctttttctttttctttttcttttgagatcgagtctcgctctgtcgccaaggctggagtgcagtggtgcgatcttggctcactgcaacctccgcttcccgggttcaagcgattctcctatcttagcctcccgagtagctgggattacaggcacgtgccaccacgcctgcctaatttttgtatttttagtagagatggggtttccccatgttggccaggctggtctcgaagtcctgacctcaggtgatccacccgtgtcagcctcccaaagtgctgggattataggtgtgagccactgggactggcctattttctattttagtttatcaaaaagagcactcagagataagaaccctttcacagagagtgagccttgggtagtgaaatgataccagatttggaatcagaagtcctgatgcctggcacaggtctgcccatggctgaggatgactctaggacagtcacttcctgtctgggcctcagcttctcagatgttaaggcccgccatctccaccatgtgtctttataggatgtatagatagagaaggcctgtgtttacctatttgcacattagctctttgccttggtcttgacattttatttttatttcatcactttgttgcatgtactgtatttttgtaaaaagattcagggtgtaaataaataacacattcaccatttcttccatagatcccagctctcctgttggcttcgtgcttggggtagatcttcttcacatattccccctggaaggagcaacttttctgtgccctgctgacgtgactgacccgagaacctcacagagaatcctcgaggtgcttcctggcaggagagcagatgtgattctgagcgacatggcgcccaatgccacagggttccgggacctcgatcatgacaggctcatcagcctgtgcctgacccttctcagcgtgaccccagacatcctgcaacctggggggacattcctttgtaaaacctgggctggaagtcaaagccgtcggttacagaggagactgacagaggaattccagaatgtaaggatcatcaaacctgaagccagcaggaaagagtcatcagaagtgtacttcttggccacacagtaccacggaaggaagggcactgtgaagcagtgaggatttcttgtgccattttcataatggtcattagctccttttaagctagaaacgtagcctgagctcctgaagagttcctgggagatttgagctgattttggagatggagcaggacaagtggggagtctctctctctctttctctctctctctttttaaccaaaaagagatgacaaaactaagttcaggggccatggaaaatgaaaaagtccgctatattgtgatttgggaagagaaagttatcaagagaaagaggtgaggatggaaggatggagaaaaacagactgtgggaaggatcagaaggaatccgccgaggcagggatgggtgtgcccatgtgtgccttgacgggacttcatcttatagactgttaaactgtcacacacaaacaggctttccacccctgctctgagagcaccacgcacagatttccagttcttagtgtggctgtttaaagtagaaaatctgggggctgggtgaggccactcatgcctgtaaacccagggctttagaaggctgaggctgggggattgcttgaagtcaggagttcaagaccaacctgggcaacatagcaacaccccccatgtctacaaaaatgaaaaaccaaaaagcaaaccaaaagaaaaatctgaaatttccatctggggattaacttctgtctttctggtgaacaatatagcaattcacgcattcttcaagcagcaaaagttcccggaacaattagggaagacgtatggtctgaatttatccaggcagtgggtctgctttggtttttgctggaaatttatatcagtgtctgggctcccaagaacataaatgtaattgccaaagcaagcagtgatgtggtgtgtttattttcttttactcatctaggaacttgacgcagctttatatttaataaaataatagagattgcattattttaaggtactttcatgctttgaagttttgttttttttaaactggcttcctcaaagccatttcctggaggtgtactcatccctcaagaagagtttgttgactatgattaaattccaaggaccagtgggggaagtctggaaacccaggaatctccatcaggaatctggggctctgtccagctccccgaaggaaactgcgggtcagatgttttgatttttttttttctttgagaaacagaatctcactctgtcacccaggctggagtgcagtgaagtgatcttggctcactgtaagctccacttcccgggttcacgccattcggcctcagcctcccgagtagctgggactacaggcgcccatcaccacgcccggctattttttttttttttttttgtattttcagtagagacggggtttcaccgtgttagccaggatggtctcgatctcctgacctcgtgatccgcctgcctcggcctcccaaagtgctgggattacaggcgtgagccaccgcgcccggccgccagatgttttgacttttcattttatttctggttgcagtcaggttgttaagtccagggactcttgccctactccacctcgttctcttattccatttcattcccggggcacacaacttggaagtctttctctgaaagaaggaaaattcattgcagacccttaggaacagcatcttcttagagggaagccaggggctgggcagagacgggaggaggagaggaagagaatatggaaacgagtaaggcacactcttctcaggaaggctccaatttgaaggatagacaaaggttaccataataatggtggggcctgacctcaccccattggatgctgtgccctggcttgcagagcactgggaaggtagcctagtagcataaattgcatttctagtgggcccagaaaaaagcaaaataacggattgattcaagctgatactgagtagcaaaattttgggaagagtcaacggtgcaagtttgtccgaggaggctgccgtgggcgcggctattccacacattacggcgcgaggcgaaagccttagtggaagcgcgtcctgcgcaaagccggggggcccccgactgcgccttggctcagccttcggttccgagtcctttccgtgcggagtctcccaggggtggcggctccgggtgcggacgcggagtccccaggatcagccggtgcgcagactcggttctttacggcccgattgccacgcaggtctcgcgagagcgcaggcgcaagtgtcgcgataaatgggcgccggcggagcggagggagatccgagcggcggcggcaagctggctgcgagcggctgaggtaagcggcccggctcgcgcgggcggcggggtcccggggtcccgggggtcccgggaatggcaagggaggggccgagggcccggaccgggtgtgctcgccagggtggggcacaacgacccagaccccgtgcctcaggaccccgcgcccgccccgtctcccatgggcgcgctctcctctctgtgctctcccctcctctccccactcccctgtccccactccccctttgggctgtgctggggacagcgggcccctcgcctgggtctccgcagccgtcccttgtgccagggcgggcggccgaggggcgcgtgctcgtggtcccagccccggggtcccgctgcctaccgtgtgggtccccgggctagggtgccggcgcgccgaggaaggggcctgagctggcgcctggtggagaagtcggggctgcaggggctcttggcatcctggtggctcgcgccggtccgctctcaggaagggggcgtgtgggcccggtttcccctcggggatggcaagggccaccctgatctcgtttgggcaatggaggaattgggctgtggagcctccttccaggcgggcctgcctctgcggggctggcagcctggggagctcaggcctctgcttgcaccaggccaaggttcttgttaaatggaaactcagaaactgtgcagctgcagaagttctacctttggcttttaaacgcgcttggctgttccctagttgtggctggtgggccggcctgccatgagcccatagtaagcgccggtgttgggggtgcaaagttctttactgcggtttgtcttcagccttccaaagccagacagacccaagttccaatctccgttctgtaactttttgaagcttcggtttcatcatctctagaatctgtgtaaaaagacctaattcaccaccctgttgagactgagcttacaaatatagtgctggtcaacctgcagccgtattcccatc

SEQ ID NO: 2468 - DNA, 6000 bp, Homo sapiens
tcttacgtaaaagctgggtgcctaatatgtatctgtcctgacctcccatggaaacaattatcaggcttcagatattttgtctctcaattttttaacttgaaagtacatggctatttatttttgcacttattttttgtttttattgtgcaatttttcaacatatggcaaagttgaaagaataccacaaatgtttgtatacctttcataattgtgtatatgtgtatgtgtgtgtatatatatatgtatatatgtatatatatatatgtatatatgtgtatatatatatatgtgtgtatatatatatatatatatatacatatatatatatgaatgttgcagcatgcatttcctgagaataaggatcttctctttattctagaggtatatacctctacaggtgatagaggtatataaccacaatacctctatcacctgtaaaatcccgattccaggacacaacatagataaattaaataaaaatttttgtagtggagccaaggatccgtaatttttacagttctcaagtgactacaatatgcaacaaatgttgagaaccactgtccacacattaattaaatttgttaaatattttcagtaaagaatacattttgtttcttaatatgaataagaatgatagccttttaaagtttagcaaatctaaattatatattttaggtcagcattttacaataatttacatttccttaagctgttcttatcaagttaataattttctttgttaaataaatgtattttatcttaatttcagtttcttctatatcatgatttaaaatgcagaaagtatgtattatgtagttttcaaatatatttatctccaaagttaaatggattttagtaaaaatgatatttatacatatatattttaataaaatgtttaataaattagacatgaatcttagcatgtgaaacataaaacttttttataactttccccataatcaaacttcaaattcgtaagaattaaaagtccggaaagaaagaaatcgaaatccaaacttactgcatgttaacattttaataatgtactttcatgtgttaaaaacctaaatgtttcttgcaacaaagcattatccataagtgaataaaaataattttgactaataacaaattattcctatcttgtagtttctttgtcagaattaagattagcattatctattaattacttctctgtggcttctatgacattgttgtatccaagcaagtaaagaagacattaagcatttagaaacagcccttagatgtctatgtctgttcttcagtgttaggagtaaaagcaagcaatgtgtaaactgattatttttaataaatgaatcagaacagttcaaagtcagataagttatacattttagactggggcagaagtcacaagacccagattctaggctatgattagcagggcacttgatctctctgggcctgaagtttctcacctgttaaatgaaggatttagttatgccaaaggtcccaaactttctcagttcacagcattcctagtgtctcagtaattttttcatggtgttgcaagctaaaagaaacacctaacagttccatttattaaacagttaaacccaaacttatgtttgtctatcctaacaacttagtagctatttaaaaaataatatacattaacattttttattcttaatgggatgtgcacatctgttgggcacttcataacttctcaaacttaggaataaacttggaaaccgctaccctcattcctgttctacagtaattttcccatagtccttgtgttttattacagcaatttacaaaaacacagcctcacaaagatacgatgtcaaaaggaatgaagtacaatttaatgtgtagaagttctgaactacctcaagatagtggtttgcacggtgtccaactgatgtcactgtgttggccttgaaaatttaaaatatcccatgatagtgcccctgtgagtttgttgtggtgctcctggggtgcctcagtacatagtttaggaagcatggactaccctctgtaaaatacttcatatagctacaatgtgtgttgtaaactgtaaaagacaattctgagggcctgaagtaaggagctgcagaattgaagaggagattaaaaagtgatacatgttcagtctgcatgaaattccccttcctccccaggtcacctataaaatgcctacctatgcctacctataaaatgcctacctatgcctcaaaactcagctcaagctccctcagggaggttaccaagttacccttaccaagttaaatccacctattatacattctcacagtattcatttcacagtacttgtcccagttgtaattatacattcatttgtgtaactatctggttaattcttgtctctctcattagaatgtaagctctaagaggaaagaacatgtctgatatcactactgtaacccacagtgtctggtatattataggggctaaaatcttgcttagtgaaatgaactgtgatagaataggtttagcattcattttgattattttcctttattcaagaacagctgatatttataatagcattcctaaaacatttttctcatactatttcgcaggagaaagaaacccatacacatacagctgcatctgaaacctcagaaactaagctcaacccaattgattaaaaggatgttctttggataaggtaatcaaatgttcaccgactcttatagccaaattaattattatgagataaaaatcacgtaactacaaaaaaaaaaactgctcacaaaaaagtttttaaatcttagcagatggacacaaaccatactttgagaaccatgttccacagtgccaatacaggaagtttctagataatggcagctcattttttaaaaatggcactacactatactgtattcacatgccagcaaaactgttaaggtaagttcatgtcactattaaaataaaatgaattctgggaattttgttgatattcaattttaatcttaattatgcaaagatctgttacttaactaagactatgtaacataatatagcatatgacttctggataatgaaaataatcctaaacttaaccataaaaaaataagggtatgaaagtcaaaataaggtagaaaatgactgcaccaaatagccaacaaccttaaaaagggtaggatttttttaaatcactaaattaagattggttcattgcatttagtacatctcttttatgaagaggagttataagctacagaatcaataaattatgttttgatataaatttttcacccttaaagttcctagctaggaggaaattattcttttacacttacacgttttagatagaatggctataagtaagcacagataaatgaagaaatgaaagagaagggaaaaatagagatggttgattctgcctctgcaattgctaattcataaacatcaaactttcccagtgtacactgtcttctttgggaatttgctccatctttttccttaaactgaaaggtggcttactgaggctatcactttcctaaaggtctccccaatactgcctaattattttctcttatcacaggatacagggtggatgtccatctacttccttgttgtcacttcccagatcactttcactttatgctcttctaaaattaaaacaaagatcatcgaccacaaaacacaattgttcttttgtagctcatgctagaataccctctttgttacatctccttcatttttctgatccaaaatttagtagcctactatatctcacccactgtccttctttcctccagctatggtagagaactgctcctccaactttatgtacatttgaatcacctgggagttcctgtgaacttcgggttctgatttaataaggacacccaaagagtctgcatttcctgtaactctcaaaagaagctgtggagtactctgaatagcaaagcactgtaagtgctgtttctgttagtatctaatctattagtcctaatctcccatttatgctttggcactcattccctcctgctttcggtatcttaatatctatcattccttcactcttccctcaggttccctacatagtttatctctaccccctctaagccgctcagtatcgcccattaaagaactaaaccaaaactagaaaaccctcatttaacccttcactccccctacatacaatctgatgtgtctctcatccacagctaaacttggaagaaaaattgcctgcttgaggatgccattttgttatcttcagctcaatcctgtacccacttcaatgttatttgcaggcccattaccccaacactgcattcacgaaagtcatcagtgactacacattgagaaaacaagaatgacattttcagttctcaactaatttgaatttctcaacagtattcaatattgttaattactcccaatatttttccacatggtcctccatgacacaatacataatagtccccttattatctatattcctgtctattgtaaagacttcccccgcacaccaaaaaaggtcaaggaaactcctagccttcaagtctcaactcaaatctggccttctgaagccttcccaactaggaaaatatacagtcccattggttgtctaccagttgtctaccagttaattgtaattcttagccacaagttagctgacccaccgtctctcaaacaggtgaagttaagctcaatatttggcatatcttgatatactttgtacagtctagctacaataagtttgcctatgcacgaagatggctaccggcgggggggggcgtccttacgtcctacgtcatcacgtgccgggatgagggtggggccctcaaggaagacggaatggaatccagatgggcgggggcaagcaggacggggcggggctacgcgggatctgggcggggcggggccggtgaggggtcgggggtgctcctgctattcagccggtgcgcgcggcggcgggaggcagtggctggggagtcccgtcgacgctctgttccgagagcgtgccccggaccgccagctcagaacaggggcagccgtgtagccgaacggaagctgggagcagccgggactggtggcccgcgcccgagctccgcaggcgggaagcaccctggatttaggaagtcccgggagcagcgcggcggcacctccctcacccaaggggccgcggcgacggtcacggggcgcggcgccaccgtgagcgacccaggccaggattctaaatagacggcccaggctcctcctccgcccgggccgcctcacctgcgggcattgccgcgccgcctccgccggtgtagacggcacctgcgccgccttgctcgcgggtctccgcccctcgcccaccctcactgcgccaggcccaggcagctcacctgtactggcgcgggctgcggaagcctgcgtgagccgaggcgttgaggcgcggcgcccacgccactgtcccgagaggacgcaggtggagcgggcgcggcttcgcggaacccggcgccggccgccgcagtggtcccagcctacaccgggttccggggacccggccgccagtgcccggggagtagccgccgccgtcggctgggcaccatgaacagcagcagcgccaacatcacctacgccagtcgcaagcggcggaagccggtgcagaaaacgtgagtgtcccgagcgcgtcctcatcgcgggggctgggcgctcaggcacgcgggtgcgggaggcagccccaccccgcccccaaatccctgcgatcctgggattaggtccattcccggcactgcccgtggaatcgaggtttggaggccggctgggagacagaggacttggattctcccgttttcaatgattgcattttaaaaattgtcctcccacccatcctcttcccccgcaccagtgcatacacaccctctcacatttgcaactttgttctttctgatttggtcctgatttgttgacagctctgatctgccttgggctaatggattagttagtataaacctgtcttgaaatctccttccacttttcatatccgcatgggtt

SEQ ID NO: 2469 - DNA, 6000 bp, Homo sapiens
catgtagaaatattgttgtttagttattaaaaaatgaccattttggcccatgaagttttgcttgggaattttttaattacatcgttatcaattcataaatctatgttaatattgtaacaataatagtgttaataattctagtttaaaattataaagtattaggctgtaggaaaatattccctatttaaaatgaaaataattttttccccaacttatgttctctctatactttcctgtgttactagaattgtttggtacataatcttccctttaacatttaaaataataaatttaaaacaactctgaaaaactatttccatgccttttattattttttgtttaaaatttattgtctttggggataaaggaaatacatccagaactatgtcacaagagctttgttttaggaataatctttactatattgatttgggggtttgataatttaattttttaattttattttagtgattaagactggagaaagtggcatgatagttttccggcttcttacaaaaaacaaccgatggacttgggtccagtctaatgcacgcctgctttataaaaatggaagaccagattatatcattgtaactcagagaccactaacgtaagcacaaataatgtttcctgttttaacagttttgttttcataagtcctcttatgtgaaagcataaaaataattcaagcagactttagtctgtaaataaaaattgaaaagtttaattcatctagaaagaagagcacaggtgagagacattgagaagatagaattgacgaacttgattgagagctacatgtgcagagctatagaaagaataataaaactctagggttttatcttgggcatatgaaagacacatgaaaagctagtgtcattggtaaaaaagaagaaaaatataacaatgctttatttagaatatattctctaaacccagcagtgattttaagagtttcttacacatgctgcagatgagtcctttatcaaatatttgtattgcaaatgtttcctcccactctggagaattgatttttgtctgtagcttgaggtaaggattgattccccccagccattatacgtatacccaattgaccagtaacattgaaaagatgatttaccgagaaggtcattgtttcccggctgcgctgtattttgatcaggggattttgtctgtggttctctgtctggattgtgttgttctattaatagctccattagtgcagttgtctattttgtctagcattacactgtcttagttattctatctttattatatatttctatgtcagagtgtgtcattttgtttgttttgccttttttgttctccttcaagattgccttggttcttctttgccctctataattccatatacattttagaaagcagttgtctgaaaatctgttgagattttgagtgcaattaccttgaaactgtagatcatttggggagaattaacatctttttaatactgaatctttgagcccatgaacatgatgaatgtatgtatgtgtataagtacccatggaagtacatgagtatgtgtgtaccatatgtatatgagtgcatgggtatgtgtgtacctctacaaatttgtcacttctcccttgatcaatgtttctagaaggcactttttttaattagattttattagtctttattaggatccaacttttggtttattgatttttttctattttatacatttgttttcaattttaattatgtctgctcattattattttcttccttctactttctttgggtataatttatcattttttgcaacttttaaaaaatatatacttaaacatatatatcagtttccctttaagtacagcattacaaccctcatcttttgctatcttatttttattatttaattgaaaatactggctaatttgtttttatttttattcatgaattatttagaaatacagtgttactgtactttttggtgtttggggatttttctagttgcctttttatgattgacttttagcttaattccattgtagtcagaaaatattctctggatggatttcagtttttttgaaatttgtggtgacttattttatgatctaatacatggtctatgttggtaaaatatcccatgtaatcctatgaagaatacatgttctgtagtttgggagtatcttatttttatatatcagaagtctagtttgttaattgtgttcatatttgtatacatttgttgatattttatgtgcttctgttagttactaagacattttgttttcatttattactgaaggggggcatctttttacatctttctgttttttttttttttttgagatggagtctcgctctgtcgcccaggctggagtgcagtggcgggatctcggctcactgcaagctccgccacccgggttcacgccattctcctgcctcagcctcccaagtagctgggactacaggcgcccgccactacgcccggctaatttttttgtatttttagtagagatggggtttcaccgttttagccaggatggtctcaatctcctgacctcgtgatccgcccgcctcagcctcccaaagtgctgggattacaggcgtgagccaccgcgcccggccctttttacgtttttctatgacatttttcttttataaattacatttgtatcatttacctgtttttctgttgagttgtttgcctctctctcagactctattggagctctttattatggatatgaaattttataagtatattaaattataaatacattatgttacaaatattttctttaaaaattctattgcccgaggcgggcggatcacgaggtcaggagatcgagaccatcctggctaacacggtgaaaccccgtctctactaaaaatacaaaaaattagccgggcgttgtagcgggcgcctgtagtcccagctactcgggaggctgaggcaggagaatggcgtgaacccgggaggcggagcttgcagtgagccgagatcgcgccactgcactccagcctgggcgacagagcgagactccgtctcaaaaaaaaaaaaaaaaatctattgcaaaaatacaaatactttaatattaagtaattttcatattattatgccaatctgtctttatagctgctgggttttattatagaggttagttgtttcagattcttaactttctaattcctaatttttttatttttttattattattatttttgagacaggatcttactctgtcacctatgctggaatgcagtggcacaaatgtggctcactgaagccttaacctccaggctcaggcagtcctcctgcctcagactccagagtagctgaagactgtaggcatgtgccaccatgcccagctagtttttatttttttgtagaggtgagggtcttgccatgttgcccaggtttgtctcaaaatcctgggctcaagcaattcacacacatcagcctcccaaagtgctgcaattacaggcatgcaccaccatgcctggcccctaaattctcgtagtctgtttttatgtgtagatatttattccacacaaatttattatttttttctttttttgcagggtgtcaggtagggatgtaacctgaccatggaattaactaagttattttttaaaaattaaatcatttaaatatgcttgtctgaaaaacaattttatagcaccagtcatgagaataattgaggtgaaaataaaatatgtccctttctgaattcaattacaatgtattttgctttatgtttttcttttttaaattatttttattttaaaatgtttgatagaatttttttctaagacttttttgtacacaattttagagatgaggaaggaacagagcatttacgaaaacgaaatacgaagttgccttttatgtttaccactggagaagctgtgttgtatgaggcaaccaacccttttcctgccataatggatcccttaccactaaggactaaaaatggcactagtggaaaagactctgctaccacatccactctaagcaaggactctctcaatcctagttccctcctggctgccatgatgcaacaagatgagtctatttatctctatcctgcttcaagtacttcaagtactgcaccttttgaaaacaactttttcaacgaatctatgaatgaatgcagaaattggcaagataatactgcaccgatgggaaatgatactatcctgaaacatgagcaaattgaccagcctcaggatgtgaactcatttgctggaggtcacccagggctctttcaagatagtaaaaacagtgacttgtacagcataatgaaaaacctaggcattgattttgaagacatcagacacatgcagaatgaaaaatttttcagaaatgatttttctggtgaggttgacttcagagacattgacttaacggatgaaatcctgacgtatgtccaagattctttaagtaagtctcccttcataccttcagattatcaacagcaacagtccttggctctgaactcaagctgtatggtacaggaacacctacatctagaacagcaacagcaacatcaccaaaagcaagtagtagtggagccacagcaacagctgtgtcagaagatgaagcacatgcaagttaatggcatgtttgaaaattggaactctaaccaattcgtgcctttcaattgtccacagcaagacccacaacaatataatgtctttacagacttacatgggatcagtcaagagttcccctacaaatctgaaatggattctatgccttatacacagaactttatttcctgtaatcagcctgtattaccacaacattccaaatgtacagagctggactaccctatggggagttttgaaccatccccataccccactacttctagtttagaagattttgtcacttgtttacaacttcctgaaaaccaaaagcatggattaaatccacagtcagccataataactcctcagacatgttatgctggggccgtgtcgatgtatcagtgccagccagaacctcagcacacccacgtgggtcagatgcagtacaatccagtactgccaggccaacaggcatttttaaacaaggtaagggtgttatcaaactgaattaaatctttcagtgattctttttaccttatagacatgttacacattttttatgtcagctgattttaatcggttatctacagcattcatggagacagcattttttattatatctgtgactaccttttttttttttacaagcctgtactttttccagtatgttactaatatatcattcacctgattcatgagggagaaagatatcaaggaatgaagcaacatgaatgtgtccttaatataagatgacctaaattaccaggtgaaattagtttttagaagtattttgtttaaaatagataatttggtttattctttctggattctttaaaaattatatggctatttaaaaattcaagctttaaaaaacgtattgcaatttttaagaataatttcttcaaagctctatttttttatatatgtttgaaattgagttaaactcaaatttaagtgtgctttcttacaatgcctctgaaaccctagattaattatatccctggaattcagtcctaggcacctccatgttctctagctattcctccacattacctcccctatcctcatctcatcctttaaggtagaatggctttcttttctggctttcttaaaagaggtaactcagctggctttctgtcatggaaatcaagcttgatagtgcatttttgttgtttaaatgtgtcatcagaatccgtctggcagtgagcacactttaaatctaaaaatgatcacttaaaaaaaaaaagttaacataatgtcagtaactgctgtctctggccactcaggaatacatcatgtttgcatttatgctttttccattagaaaatatttagttcattttaaagtatatttaagtttagttttaaagaatatcttgactaaaattaagctccttgacccctgtttactctgtattagagtataataattaaa

SEQ ID NO: 2470 - DNA, 6000 bp, Homo sapiens
aattaaatcatttaaatatgcttgtctgaaaaacaattttatagcaccagtcatgagaataattgaggtgaaaataaaatatgtccctttctgaattcaattacaatgtattttgctttatgtttttcttttttaaattatttttattttaaaatgtttgatagaatttttttctaagacttttttgtacacaattttagagatgaggaaggaacagagcatttacgaaaacgaaatacgaagttgccttttatgtttaccactggagaagctgtgttgtatgaggcaaccaacccttttcctgccataatggatcccttaccactaaggactaaaaatggcactagtggaaaagactctgctaccacatccactctaagcaaggactctctcaatcctagttccctcctggctgccatgatgcaacaagatgagtctatttatctctatcctgcttcaagtacttcaagtactgcaccttttgaaaacaactttttcaacgaatctatgaatgaatgcagaaattggcaagataatactgcaccgatgggaaatgatactatcctgaaacatgagcaaattgaccagcctcaggatgtgaactcatttgctggaggtcacccagggctctttcaagatagtaaaaacagtgacttgtacagcataatgaaaaacctaggcattgattttgaagacatcagacacatgcagaatgaaaaatttttcagaaatgatttttctggtgaggttgacttcagagacattgacttaacggatgaaatcctgacgtatgtccaagattctttaagtaagtctcccttcataccttcagattatcaacagcaacagtccttggctctgaactcaagctgtatggtacaggaacacctacatctagaacagcaacagcaacatcaccaaaagcaagtagtagtggagccacagcaacagctgtgtcagaagatgaagcacatgcaagttaatggcatgtttgaaaattggaactctaaccaattcgtgcctttcaattgtccacagcaagacccacaacaatataatgtctttacagacttacatgggatcagtcaagagttcccctacaaatctgaaatggattctatgccttatacacagaactttatttcctgtaatcagcctgtattaccacaacattccaaatgtacagagctggactaccctatggggagttttgaaccatccccataccccactacttctagtttagaagattttgtcacttgtttacaacttcctgaaaaccaaaagcatggattaaatccacagtcagccataataactcctcagacatgttatgctggggccgtgtcgatgtatcagtgccagccagaacctcagcacacccacgtgggtcagatgcagtacaatccagtactgccaggccaacaggcatttttaaacaaggtaagggtgttatcaaactgaattaaatctttcagtgattctttttaccttatagacatgttacacattttttatgtcagctgattttaatcggttatctacagcattcatggagacagcattttttattatatctgtgactaccttttttttttttacaagcctgtactttttccagtatgttactaatatatcattcacctgattcatgagggagaaagatatcaaggaatgaagcaacatgaatgtgtccttaatataagatgacctaaattaccaggtgaaattagtttttagaagtattttgtttaaaatagataatttggtttattctttctggattctttaaaaattatatggctatttaaaaattcaagctttaaaaaacgtattgcaatttttaagaataatttcttcaaagctctatttttttatatatgtttgaaattgagttaaactcaaatttaagtgtgctttcttacaatgcctctgaaaccctagattaattatatccctggaattcagtcctaggcacctccatgttctctagctattcctccacattacctcccctatcctcatctcatcctttaaggtagaatggctttcttttctggctttcttaaaagaggtaactcagctggctttctgtcatggaaatcaagcttgatagtgcatttttgttgtttaaatgtgtcatcagaatccgtctggcagtgagcacactttaaatctaaaaatgatcacttaaaaaaaaaaagttaacataatgtcagtaactgctgtctctggccactcaggaatacatcatgtttgcatttatgctttttccattagaaaatatttagttcattttaaagtatatttaagtttagttttaaagaatatcttgactaaaattaagctccttgacccctgtttactctgtattagagtataataattaaaagtatgacctgaagctttatctttaattgtattttctggctttttcatacattttgcttgtctaatcgtatatgagctttttaatagaaaaggacagtgaaaatttttcttattccttacatccttcaattatattaaaattgaataatattcagttatagtccgtctcacaaaattgctatgaaagtatattttactcttgagtaaagcaaattgtacagaagttaattctgtaaaattacattttgaataaggagttgcatgagtaccacataagttctttgcagtgttttcccctcactacttttcactgcttctttgtaaataaccaaataattctatagacctacatatgttccagagtacatgttattgagctaagacactcaatattgagccactgagtagctgttcagcacttgaaatgtggctagtccaaattgagatgtgctgtgtgaagtacacattggatttttggattttgaagacttggcttgaaaaaagaatgtaaaatatctcatcttttattattgatttcatgttgaaatgattagttttttcagtagccgcattacaaaagtaaaaagaaacaggtaaaattaactttagaaatgtattttatttaatctactgtagccaaaaatttaagttctgtatgtggctcacattatatttctattggattacactgctgtgtacagtatgtttaaagagaatggtgacatgaattgtgttatgagtaatgagaaaaaatcattttaaactcaccattatctggccaggtaatactaactttttatttaaagaatttacagtgttgccattcattgaagatacaggttatatgatttttactatagattttatatatgttttggaggatctgtgaagtaattaacattttgattactgaagccagttatgtaggctttacaaaggtagattttatttgaagcaattaaggatatgattttaatctgttttaaagtttccagaacgtccactaactaaaatataaaggctctgtaatctataaaactctacagagctatacatcttcatgtccttcctttttatttttcttttttctactagcagttatagaaaccagattcattgcagtgtaagaaaacaagacagagcattttcttttggtaacttgattctgtaattagaactatgctttcagtagtattcattaattaaaagtatattatgaataagaaatcggttaagaaaatcatacctgtggtgtaatattttaggaatatttagaaacatttagaaaatcagaagctgccttttttggaaaagttttgcattccagtgtaagattcctgaatataatcaattcattgatacctataacttcaaacctggtcaaagcaaacctacttatgatagagaatatttaactgtaatttgtgacttgtgctgtttgacccatcaattcctacctgacccaaaggcaatctgaaatgagacagctgcatcactcatctgtaccatgttcaaaatttcctgtcaaattaatggaaaaacaggttataaatgcaactaatacataatatgtcctcagtatgtcttcactgtgtgaaagatttaaaatttagcaacagtaaaggaacttgaagtttacaactctcaggggtaagattttaaaaatacatgttaatgttatttactggcttaagatacttggaagatctattccaataagttgcatcaccatttttgttttcagtttcagaatggagttttaaatgaaacatatccagctgaattaaataacataaataacactcagactaccacacatcttcagccacttcatcatccgtcagaagccagaccttttcctgatttgacatccagtggattcctgtaattccaagcccaattttgaccctggtttttggattaaattagtttgtgaaggattatggaaaaataaaactgtcactgttggacgtcagcaagttcacatggaggcattgatgcatgctattcacaattattccaaaccaaattttaatttttgcttttagaaaagggagtttaaaaatggtatcaaaattacatatactacagtcaagatagaaagggtgctgccacggagtggtgaggtaccgtctacatttcacattattctgggcaccacaaaatatacaaaactttatcagggaaactaagattcttttaaattagaaaatattctctatttgaattatttctgtcacagtaaaaataaaatactttgagttttgagctactggattcttattagttccccaaatacaaagttagagaactaaactagtttttcctatcatgttaacctctgcttttatctcagatgttaaaataaatggtttggtgctttttataaaaagataatctcagtgctttcctccttcactgtttcatctaagtgcctcacatttttttctacctataacactctaggatgtatattttatataaagtattctttttcttttttaaattaatatctttctgcacacaaatattatttgtgtttcctaaatccaaccattttcattaattcaggcatattttaactccactgcttacctactttcttcaggtaaagggcaaataatgatcgaaaaaataattatttattacataatttagttgtttctagactataaatgttgctatgtgccttatgttgaaaaaatttaaaagtaaaatgtctttccaaattatttcttaattattataaaaatattaagacaatagcacttaaattcctcaacagtgttttcagaagaaataaatataccactctttacctttattgatatctccatgatgatagttgaatgttgcaatgtgaaaaatctgctgttaactgcaaccttgtttattaaattgcaagaagctttatttctagctttttaattaagcaaagcacccatttcaatgtgtataaattgtctttaaaaactgttttagacctataatccttgataatatattgtgttgactttataaatttcgcttcttagaacagtggaaactatgtgtttttctcatatttgaggagtgttaagattgcagatagcaaggtttggtgcaaagtattgtaatgagtgaattgaatggtgcattgtatagatataatgaacaaaattatttgtaagatatttgcagtttttcattttaaaaagtccataccttatatatgcacttaatttgttggggctttacatactttatcaatgtgtctttctaagaaatcaagtaatgaatccaactgcttaaagttggtattaataaaaagacaaccacatagttcgtttaccttcaaactttaggtttttttaatgatatactgatcttcattaccaataggcaaattaatcaccctaccaactttactgtcctaacatggtttaaaagaaaaaatgacaccatcttttattcttttttttttttttttttgagagagagtcttactctgccgcccaaactggagtgcagtggcacaatcttggctcactgcaacctctacctcctgggttcaagtgattctcttgcctcagcctcccgagttgctgggattacaggcatgtgccacca

SEQ ID NO: 2471 - DNA, 6000 bp, Homo sapiens
ccacatccttgattttttttcttttgaaatgattcctagaaatagaatcactcttaaggagtgtgaacgttttaaaagattcttgatatagtgtgacatttttttccctgggaaaggtgtaccaatttacactcctaccagcagtgtttttcacatcatgtgcttgtcattatctattagcatcaatgatatatgaaaatgttaatgtttcataatttacatttacttgcttaccagtgaagttgagtgttatgtcttatgtttactagagaagacaggcacactggaatgctccttcttttcagcaagtacatatttagacactttgtgttccagtggtagtttttctcatttatttgaatatatgtcaataagcaaaatcttggctaaaaataatcaccttagcactaaatttagtcaagtgtcaaaggcattttaaagagactaaatttgggatgcatctcagaaaaacatactgcatgatactatgctaatgagattttctttttatgctgggcaactggtaattttgttgttcaccctgagttccccaacaatgttgaactagcaattttcaaacctgtaaacatttgcttttgtagtcaaaattgaaagatacaattgaaaggaaagatttagttcacaaactgtataatcttctgattctgcagaattgaaatgaataaacttgaacacatatttaagaactcaagctctagtcagcatataacttaagagggaaaaggttgaatttcctttcaaaataagcaccgtgcatgaccatgcttcctaagaaaaaaagaaaaggtaatatctctaaaaattgtatcatcattattttcataccagttaccatggttcaattagtccctctctatccagtctagtggtacatttttctaaattgtgaaaattcaataataattacatatatagtaatatgtatttatataatattatataatatgtaaaataataattatagtttatataaatgtgtgttttaagtggtcttattatgtatgatatttcaaggtgtaagcttatttttcaggatattgtgttttggtacctaggaggatcagctttgaatcatttctagttacatatttctaatttgggggaaaatcagtttttataggaataaaatgtggtccaagtctttagcagagtgaaggataagactgaattataaaaagagaggtttaataaagtattttttaagccttagaggaagttaataaaataattttattgaattccatcatgactcatcttctaatattaattttgtaaataggaaaaaggtaattaaattactaaagcaccttcattttaaaggttaactttattattattgctcataggaaagtttattttttaccacttttagaacactaggtctttttaaattgatgcacaattcatttgggtgctttctatgacacgcagtcagacttgcctccttcctgtgtgggctctgactatctaataaaagagataatgtaatgacttacatatctagaacacaaggtaatgattccattaccaggcatatccctgttctgatttgcagacagtttaatttttacatctgatctttaactagtgcttcagatgaagcagaactgggtatttgaaaggaatttaatttgttttgcccattttaatggtagttttttctgagtgtatttaaagagctttttataactaccatcttccaatttttaaaatggaaatatattttctattgcttatttttttttactgcaaagccttatttgtttattttagaaaaattagaaaatactgcaaagaaaaaagaaaaatgaaaaaataatatattcttagagaattctcattaacatgttggcagatactccagtttattctatataattcctatatacaataggggatcaaagtacttgttacactgaataccatactctgacattacatattttgtaaatgttgttatatgtttttgattgagcaaccagtaatcatgttagcctgaagacaaactttgcatagttcaaagagtgtttgccaactcttttttaaaaaggaggtttcacataaaaatccagatgtccaccttctcttgatagatggggattctgtgctgctggggctcagaatcctggttggccacagttgagagcagatggccacagttggccttagccagccagagcatgcactctgcattcagcgcattcctgccctggtctccttcacatcttgatgtgcctacctgactcccaaagccagctgtttgaagggtagtagtttgtctagggtagtgcttttcaatgaggctgtactggcccctaagggaagactggaaagtgttttctggatgccgcaatgcttggagagcactactggcatttagtggactgcagtcctgttatgtgagaggactggacccggaagttgtgtcctgcattttcaacaatccctttgggtagtcatataggtgaaacacctgtttataattatttgagcctggaaacaaaactggttgcacatataaaaattgctttaattcaattttagtatacgttgaatttcctaagactacagctactgtataatttcaggtaaaattgttctttgctttggaaggtttactgtgcattgttcaccatttggaaaaccatgttgctgacaacaaggtggctcatggtatttgaataaccaacacagtgcagctccatcagtgctcatttgtagcacccttgttcaatacaacaaaaagcaaaattaacactcctttaacattttttatgaataagaaataaatatcagatcttatgagagaatattaattcttctttgtgtgttctttacttttaccatctataatttgccttggcatgttatctagacttcagttactcttattttccttttatcacttgcctgtaagcctgctttattgtttcttattctaatactaaattttagcctaatgtccatgtaaccactcaaccctccagtctttcactttcttactcttcttgaaaaagtactggctgcttattacttctctttaattcatatttacttgttggtagtagggcaggcatcagatgacttcctcaatatgtaagttatgttcatgcctggagcactttatgattaaaaagaatattatgtatagaggttgtttgtataaactatgagctttgtgttaggttagtaaaagcggcattacaaaatacttgtttttaaaagtgaagctttgtgcttgagcagcttaatgctctaggtgaccatcgagaatatacattggtcctaaagaggcttacaggcttctagaaagacattacatagaaataagttatgcctagactgagaggatgatgaaatatgctccaggatttcagagaggggcaagtaggtgtgtttgaatggatgaggaaggcctgtggatgaagccgaggaggtgccaccaaacctagatgcttggggaagctgttaagagttttggagaaggggacaatgaagcaaagttctctccctttctttttcacttccccctcttctttttcttctagaactgtgtcttttcttctttctttcctgaagatgcaaaagccacagatgtaagtgagagggactaaagccagagtcatgactatgaagtattgatttcaggtgtttgttctcaccttaaactcagaccaaatataaaaatatgaccttgggggcttagaattgtgcagtttttgttcttcaagagaaactattggagagatctcagagcaaggcattgcttgtatttcccttcagtgtagtacttagattttcattttcttagatctaattataaaagagacttaggaggtggaaaataaattcaataagtcttcaaagtttttcctttctttattttataagctaagtatcactgcattgggggtatactaagaagggtatcaatgacagaattgctagtttcctcaacctgcctcagcttaccaaatttaactctttttgtgaaactattaccacatgtaaatatattttaaaaattagaatttctttgaagaaacattttcctagccaatcaaaagcaagagctagtgaggcttcaggatgatttggttttcagactttttttttctaatgccacaatccttagatatggtgggaaaggcacttcaaagtgagtactccagatttaattcaaatgcacccatttaagtagctcagaaaattgcatcatctagggttctggagtgacagtgttttatatgttgaaatcttttggagtgggattgaaacagcaaaatcattttatttcattaaaatcggtctcagcctcttctttttcctctcattcaccgcaggcctttccatctaagaaacaattcatagctgcttcttcagaggatgtctaattttccctcattcagagggacacatttggtactttgccctgtgttttaattagtaagcttcagagaaagaaagtcgtcagagccagggcccccagttgtggaagtttctatatccggtaaattggatccattccagggcagaatcatttatcaacaaatgaaacaccagccacttcccacacgtcctctgattgcattaaaaaatcactccccttcctacccaaattgagtatacttagagtatggagctgacaaacattctctttccttctcctcctcctcctcctcattctgttgaattgctggtttctgtagtctattaggcttcttattaatagtaataaaatgttcattcattaactctctcatgcctgcataccagctatagtaactgtctttgcccccaagttatgcagtctttataaagtcgttcagtagcagggcaatgagttgggaaaactgatattgcatctgtagcatcaggtactatttaaccagtgggagggactgataaaattagcaagttgactaaccacttcccttccttgtggctctttaatattataacggatacagaaaagttcagaaggactgagctagtttgcgaaaccacagcacactttggcaaagagggaatgcacaacaaaacgggtaagtttctttattttaatcttttaagagaactgtgaaaaagatagtggggtagatgtttttaagtctgactctgcaaatcgtctttaataacttgtaggctgtggaaagataaacttgtcatgcggagggaagcaaaaggttttccaatcagtaacagtagcaacaacaacaacaaaaattacattgagcaaaaaattcaactctgagaatgcctttattatttcagatagacaagactaaagtattttggggagagggttcttgaattaggaaaaatattgatgaataagttcctgtactctgattttttgaaatttagcccggaattgtcagcaggggcattatctactgaagctgaatgtccgcctagatcctgaaacagcttagtcttctgttgtcttctttgtggttgaaaatgtttgttgcttttaactccttgattatcaaaaatttcaaacacaagcaaaaatagagtgaatagtatagagatttcccatgcatctatcacatagcttcaacagctatgacttcagagcccaggttgtgtaatccacacctctgtggtacactccctccttcaatctagttgaattgcagcattttgaaatatgcctattgtgaacattaaataaaagaggcctaaagtttcctaaaggctcataccagctcagcaatataaagtttagagaaatattattacataaaattgaattatgagtcatagaaagcacaagtgagtttccactggttgttttaccagtgggagcaggagtagaggatagtagatattaagactgtagtctctggagccaaactgtttggggtcaaatttggttctgtcacaatccagtatccttaagaaaatttcttaacctttctgtgtctcagtttcctcacctaaaaatgaatacaatagcactgatctcctgag

SEQ ID NO: 2472 - DNA, 6000 bp, Homo sapiens
agttttattgctttaacaatagtttgaggaatgtgaggttgggagaagaggtaacatcaatgagtgagtgagtgagtgagtgagtgagtgagtggaggagcagcagttattggtgagtaatttgcagcatactacaattgtagagcacaaattcggtatttgaggtaattaagttttaaatcttacttcatttacattccagaatcatagggtttgttaatacatgaaaagtctctgcttgattacagatgaactgatgatatatcattgtggtagaataaattgggttacattacctcctttgcttgtttccagttatcaactgagattgattttagaagaaagcctattataatccagaaaaatacaacttgaactccataatctcaagtgttgaaatcccaaaagatgaaaatataattctgaaagaaataataaaacattctttatatttatttacattttaaaagggggtttatttgagaaaaattaaaacaaaacaatacactgtacacgataaaataaataatggcacatatttttacaagcaaaaacactcaggtatactagcaacagtcacaccagtataacagttatgatgcagacaaaccgtatttataaagaaataggtcaaaaatggaaatgtataaatgcatatcactgtggttgataattgtgtgcacccagctttatataactgtagtcatcttaaatttccggatgaagaagctaagctttttggcaagatggatcaaaaaattcagtgggtcaacaacacgcatatagttacccaaagaaccgagatcctgataaattttctttcacaagcgcagatgtacaaaatctttctttcatttattgaagaaatttcgacatgtttgggttcagaagtactgcttatatgcaaagtcaacgttgtgataatgcagttctcgtggaatcaaatttctgatgtccaaggcattcgaagagaagcctgccctagttctcagacagaaaccagttcacctcctgtgtctgttctatatgggtccccggcagatcggatggtgcctgctaacattgaggggagatcttcttcacctaatccactcaaactcacactaatgtcatctggaagcaccctcacagacacacccaaaaaatgctttaataggtttctaagtatttaatccagtgacatctcaaattgaatccacaggtccaccccttgtcaacttggctcccgtaagtctctccttaaccatacttaatttccaagtaaagactgtaacagccgcctaacatgatgcaactaacatgatgcaataatcctgcatacgaccaaaaactaatcgcttcaccagaatgcagctttcaagatttcatatttgagattttaatatttcgagattgttattttcaggattgtagacgtgagagattttagacctaagggatttagaccttagggattttgtatcttttcagatttcaacattcaggattatggcatgtgggattgtgtctttcaggattgtgatctaaatccattttagaaaaggtcattgtgagctagaggtctgaggatatttctggaaatattttggtgccatacaggttttttaatactttttttttgcttatatgtctgcatagaaagaaattggattatggtaactttgaaataacattttacattaggatttaattcccactttcatttactattaaattgagaacctgagatttttttggcccttgttactttttttacctttttctttgacctatgtgtatataacatataatatttggattagtttgcaataaatgcttacttaattgaatttgaatttgttacattgaaactttttaaactacccatctacctagcctgacatttgtattagcttgttatagttcttgtaatagaacatatatctttttcccccacattagtaaactgtagttttataaataccccaaaagaaactgagtcacatttctttactaacattactgagatgatgtgggaagaattaactcaacattcttaataatggaaatatggtaatcaatatagttgatggttgttttgatgatacttatttttcttctgagaaacaagtggggttttttgtaagtatccaatgtcttttcactctaaaatattttttcattatcaagagttaaataaaagagaagatggctgatggaaaaacatactgcaagaatgcagggatgaaacgtaaataaacctcatgttaaataatggtcaaaatgaagaagacacattatttacagtattttatgtggaatgccctttcctggatcctttaagaactaggataattactaactcagtcttctggagttttattctattttttattttttattataaaagctgagagatctttttttatcaattgttgtttgaaggtgtaatttaaacttaaaaagacaaaagatgcataggcatattgtatcaatatggtgattttgttatctcttttgtatattcatcataaatttttgtattctgttaaaaatcactctgaaacagacagtgggtccatttttcatcagtagatcatattaaattttatttggaatatctcagataatgatttgtatcattttggtaagggacaagatggtgagactggataatataaatgctagacctatatggttagttattaattacctgtatttccttaagctactgtctttaaagcctgactccaatagtgagtccttttgtaatcaagcctccttcgtttcctcatgagtgaatttcaatgattgtttttcttaatataagaagttcttgttctgatctcaccacaaaaaaaatggtaactagctgagatgatagatttgtagcttgattatggtaattatttcacaaggtataggtgtatcaaatcatcaaattgtacacctgaaatataaagaatcttgatttgtcaaatataccgcaatttaaaaaatgttctttacataaatgttttgtagaataaaaaaaaaaaaagttcttcaaaagaaatctcaaatctccaaatggaaacaggtaaaagtggagctcccctggttccacggagaaccttttttgaggaaacttaggcaactcgcaggtaccttatgtcatgagacagagtttgaaaactacaattgactatctctaaatttcctcccaggtctaaaatgtgatgatagttactacttcagtacatcatccttaaggaaaattattaggtccacactgtttctatcctttgaattttacacataaattttgtaatcaaaagtttatttgtaatatcagatggaatcagataattgctttttgttttttccactgacaggaacataagattttgttgtgtagcttaagtcaaacgcagtttggaatatatattttttaaaaattgtaacttacatatccaaatacaatttttcaagaagtagagtattcagtagaaattaatctgtgaaagaagaggaattcagcagtggcctatttgatgaatgatttaacgtgcttatttcttccctttcatcaaaactctgtgtccccttgtttgccccctctgacttcatactctggagttgaccaagatccctcttccatcggattgttctgggaattttgaaataatctgctttttcctctctttcccctgttgcttctgatgccttagaattacattttcctcgctgatttagtttagaaaagagaaaagagcttccatgactagtagattatcacttttgggtttgctcttggaagtgacaagatgctaggatccctctttggaatgtaaaatttatctcttatatagaaaggatataaatgtagcaccagagactataaaactctgatactatctactgtactgtatagctgaacgccacaatgtgtctggtaatctattgactatcataaatgctatttctacagaaaagttaggaggtccatatttcgggcaaccaatgtatagctgaatgcagaacagtcatagttgggtactaaccatatatatgatttatccatcaacaggtgcatatgctcagaaattctgtatccataagaaatcagactactttcttttccttttgcaagtaaattgaatttagcctgagaggctgaggggaaattttcacatataagccacggttttgtgttttgtgttttgttttgtttatagatatagtactaactggatggatgcgataaaattcataggtggtactaagatacaataggatttgtgaaatggacaattgtcttgcataaatagcaagtaaaaaatcaagcctgtccttcataaaaattttattctggggtgtgcttgttttccaaaagtacctctgctaaatctcctgttagtcctgaaactagaaggcagaaaagcttctagtgctacagccaactgcagtgtagcctgagaaacaggcaacaaaaatagaacaccaggattgctgtgcgtgggtgaggcagaaaccacattatgagcaaaagcttccagtattattttagaaccaatacagagctctgtacttctctcctctctcttccaaaaacacatactacaaaaataaaatgaaatgaaatgtatgtgcatttgccctcttagaattatgattcttaattttttttcttgccttcctttctttggaagcgaatcgccagtatggaaacacagtgtgtaaagcaagcttcgagagaggaaagagttaattggttttaaggccctgcgatagagaattatggttggaaagatagaggctggacagctgggtttgctggggtatttttaaatgcattaatgcaggctccaatcactcggccatgcttgacctatttttggctcaggccgaccattgttctatttctgtgcctgtgggccatgctgttgttgattcatatgcaaatggattatcactcgctttagccaacttgagctgagagagactgagaaagggggaagagaggcacagacacagataggagaagggcaccggctggagccacttgcaggactgagggtttttgcaacaaaaccctagcagcctgaagaactctaagccaggtttaattggtttctttttctcgtgggtagacttaataattttctacgtattctgacaaagaaataaccccgaagcacgttcctatttcccacctgcttgtagtttccgggataacctaaactccagagagctatagcatccactctgtcctttctgctttgcacacaggttggtaacatgggaaaagtgtccaggtctttttaaaagtggatgcccatttgagcagaaaggaaatcattgtcgaagttgatcctctgctgcttctcctcagggaggagggagaaccagcgagggtagctcctggggccggtgcactgagcagtgatgaatgtttcatgtagctgaagtaagagtgactggaatatgctgcagacaatttacgagagtgactcctgtttttcctcagatggggtggctggacgagagcagctcttggctcagcaaagaatgcacagtatgatcagctcaggtaagatcctctttcataactgagacgttttaggtttgaaagggggctggcttgggaaatgcagctaagaaaagcacctctcttaaggaaattgctgctttttcgtgttgatgttgctattttcttggtgcgtctgtagggtttaacttagatcccttccattactgtttctgtgcatattcagtctgcttagggacagcagcttctgaatgaaattgcaaactattgcttctgatgaaagatgagactgagataagtaaaatgtagttgggggtgttttgcctttactatgcaactagaaaaaggagctgtgtactgattgtaagcctattctaataggactttaaaaatcaggtaagttcatattggggcttcagtttaaactgcagccccgctagcctgacgattttatatttactctgtgcctacagaagcacatctatttatag

SEQ ID NO: 2473 - DNA, 6000 bp, Homo sapiens
tggcacatatttttacaagcaaaaacactcaggtatactagcaacagtcacaccagtataacagttatgatgcagacaaaccgtatttataaagaaataggtcaaaaatggaaatgtataaatgcatatcactgtggttgataattgtgtgcacccagctttatataactgtagtcatcttaaatttccggatgaagaagctaagctttttggcaagatggatcaaaaaattcagtgggtcaacaacacgcatatagttacccaaagaaccgagatcctgataaattttctttcacaagcgcagatgtacaaaatctttctttcatttattgaagaaatttcgacatgtttgggttcagaagtactgcttatatgcaaagtcaacgttgtgataatgcagttctcgtggaatcaaatttctgatgtccaaggcattcgaagagaagcctgccctagttctcagacagaaaccagttcacctcctgtgtctgttctatatgggtccccggcagatcggatggtgcctgctaacattgaggggagatcttcttcacctaatccactcaaactcacactaatgtcatctggaagcaccctcacagacacacccaaaaaatgctttaataggtttctaagtatttaatccagtgacatctcaaattgaatccacaggtccaccccttgtcaacttggctcccgtaagtctctccttaaccatacttaatttccaagtaaagactgtaacagccgcctaacatgatgcaactaacatgatgcaataatcctgcatacgaccaaaaactaatcgcttcaccagaatgcagctttcaagatttcatatttgagattttaatatttcgagattgttattttcaggattgtagacgtgagagattttagacctaagggatttagaccttagggattttgtatcttttcagatttcaacattcaggattatggcatgtgggattgtgtctttcaggattgtgatctaaatccattttagaaaaggtcattgtgagctagaggtctgaggatatttctggaaatattttggtgccatacaggttttttaatactttttttttgcttatatgtctgcatagaaagaaattggattatggtaactttgaaataacattttacattaggatttaattcccactttcatttactattaaattgagaacctgagatttttttggcccttgttactttttttacctttttctttgacctatgtgtatataacatataatatttggattagtttgcaataaatgcttacttaattgaatttgaatttgttacattgaaactttttaaactacccatctacctagcctgacatttgtattagcttgttatagttcttgtaatagaacatatatctttttcccccacattagtaaactgtagttttataaataccccaaaagaaactgagtcacatttctttactaacattactgagatgatgtgggaagaattaactcaacattcttaataatggaaatatggtaatcaatatagttgatggttgttttgatgatacttatttttcttctgagaaacaagtggggttttttgtaagtatccaatgtcttttcactctaaaatattttttcattatcaagagttaaataaaagagaagatggctgatggaaaaacatactgcaagaatgcagggatgaaacgtaaataaacctcatgttaaataatggtcaaaatgaagaagacacattatttacagtattttatgtggaatgccctttcctggatcctttaagaactaggataattactaactcagtcttctggagttttattctattttttattttttattataaaagctgagagatctttttttatcaattgttgtttgaaggtgtaatttaaacttaaaaagacaaaagatgcataggcatattgtatcaatatggtgattttgttatctcttttgtatattcatcataaatttttgtattctgttaaaaatcactctgaaacagacagtgggtccatttttcatcagtagatcatattaaattttatttggaatatctcagataatgatttgtatcattttggtaagggacaagatggtgagactggataatataaatgctagacctatatggttagttattaattacctgtatttccttaagctactgtctttaaagcctgactccaatagtgagtccttttgtaatcaagcctccttcgtttcctcatgagtgaatttcaatgattgtttttcttaatataagaagttcttgttctgatctcaccacaaaaaaaatggtaactagctgagatgatagatttgtagcttgattatggtaattatttcacaaggtataggtgtatcaaatcatcaaattgtacacctgaaatataaagaatcttgatttgtcaaatataccgcaatttaaaaaatgttctttacataaatgttttgtagaataaaaaaaaaaaaagttcttcaaaagaaatctcaaatctccaaatggaaacaggtaaaagtggagctcccctggttccacggagaaccttttttgaggaaacttaggcaactcgcaggtaccttatgtcatgagacagagtttgaaaactacaattgactatctctaaatttcctcccaggtctaaaatgtgatgatagttactacttcagtacatcatccttaaggaaaattattaggtccacactgtttctatcctttgaattttacacataaattttgtaatcaaaagtttatttgtaatatcagatggaatcagataattgctttttgttttttccactgacaggaacataagattttgttgtgtagcttaagtcaaacgcagtttggaatatatattttttaaaaattgtaacttacatatccaaatacaatttttcaagaagtagagtattcagtagaaattaatctgtgaaagaagaggaattcagcagtggcctatttgatgaatgatttaacgtgcttatttcttccctttcatcaaaactctgtgtccccttgtttgccccctctgacttcatactctggagttgaccaagatccctcttccatcggattgttctgggaattttgaaataatctgctttttcctctctttcccctgttgcttctgatgccttagaattacattttcctcgctgatttagtttagaaaagagaaaagagcttccatgactagtagattatcacttttgggtttgctcttggaagtgacaagatgctaggatccctctttggaatgtaaaatttatctcttatatagaaaggatataaatgtagcaccagagactataaaactctgatactatctactgtactgtatagctgaacgccacaatgtgtctggtaatctattgactatcataaatgctatttctacagaaaagttaggaggtccatatttcgggcaaccaatgtatagctgaatgcagaacagtcatagttgggtactaaccatatatatgatttatccatcaacaggtgcatatgctcagaaattctgtatccataagaaatcagactactttcttttccttttgcaagtaaattgaatttagcctgagaggctgaggggaaattttcacatataagccacggttttgtgttttgtgttttgttttgtttatagatatagtactaactggatggatgcgataaaattcataggtggtactaagatacaataggatttgtgaaatggacaattgtcttgcataaatagcaagtaaaaaatcaagcctgtccttcataaaaattttattctggggtgtgcttgttttccaaaagtacctctgctaaatctcctgttagtcctgaaactagaaggcagaaaagcttctagtgctacagccaactgcagtgtagcctgagaaacaggcaacaaaaatagaacaccaggattgctgtgcgtgggtgaggcagaaaccacattatgagcaaaagcttccagtattattttagaaccaatacagagctctgtacttctctcctctctcttccaaaaacacatactacaaaaataaaatgaaatgaaatgtatgtgcatttgccctcttagaattatgattcttaattttttttcttgccttcctttctttggaagcgaatcgccagtatggaaacacagtgtgtaaagcaagcttcgagagaggaaagagttaattggttttaaggccctgcgatagagaattatggttggaaagatagaggctggacagctgggtttgctggggtatttttaaatgcattaatgcaggctccaatcactcggccatgcttgacctatttttggctcaggccgaccattgttctatttctgtgcctgtgggccatgctgttgttgattcatatgcaaatggattatcactcgctttagccaacttgagctgagagagactgagaaagggggaagagaggcacagacacagataggagaagggcaccggctggagccacttgcaggactgagggtttttgcaacaaaaccctagcagcctgaagaactctaagccaggtttaattggtttctttttctcgtgggtagacttaataattttctacgtattctgacaaagaaataaccccgaagcacgttcctatttcccacctgcttgtagtttccgggataacctaaactccagagagctatagcatccactctgtcctttctgctttgcacacaggttggtaacatgggaaaagtgtccaggtctttttaaaagtggatgcccatttgagcagaaaggaaatcattgtcgaagttgatcctctgctgcttctcctcagggaggagggagaaccagcgagggtagctcctggggccggtgcactgagcagtgatgaatgtttcatgtagctgaagtaagagtgactggaatatgctgcagacaatttacgagagtgactcctgtttttcctcagatggggtggctggacgagagcagctcttggctcagcaaagaatgcacagtatgatcagctcaggtaagatcctctttcataactgagacgttttaggtttgaaagggggctggcttgggaaatgcagctaagaaaagcacctctcttaaggaaattgctgctttttcgtgttgatgttgctattttcttggtgcgtctgtagggtttaacttagatcccttccattactgtttctgtgcatattcagtctgcttagggacagcagcttctgaatgaaattgcaaactattgcttctgatgaaagatgagactgagataagtaaaatgtagttgggggtgttttgcctttactatgcaactagaaaaaggagctgtgtactgattgtaagcctattctaataggactttaaaaatcaggtaagttcatattggggcttcagtttaaactgcagccccgctagcctgacgattttatatttactctgtgcctacagaagcacatctatttatagacctaccttctaaaatgtgtttgccacagagttataaaggtagttttcttttttccattatgtggctttttctcatcagccccaaatgaaactgtttaggatgaaataaaattgttattagcagatgcttattttaattttcttcaaaaacatgtgggaagtctagcattgtcaggcagatgtgatggcataacacacatgtaaatgtgttaaaagcaggtgcagcgttttaaaggataataggaacagattctaatttctagtttctcaaggagatgagctggtgggagattgagcttgtcagccttgtcaatttatacttactaaatgaacatactctccaggcagtatcacttaacgtgtaattattgcctttcatatttatttcctatggctatttcctaaagctttgggaactctttgtttctgtcctcttctgaatgtttcaacctaaaattggcttaaagttctcacttagatcccacttcccatgtgggcttaatcgtaattatagatcaccgcctagatt

SEQ ID NO: 2474 - DNA, 6000 bp, Homo sapiens
gttaacactggcctaaaacataatactgtacataaactttagcatgacagtctgttgctgcagcatagtttaacctagtgctatgcaaagtgtggtctgtggaccaatgagccagtctgtgaattatcagtttatgtcagagaaacacaaattgagagcacaaaaatggaaaatttaatagcagaataattttatgtctattgaaactaataataaaaaattggggcttatagtttatctttcttattccatttccactttttttatttgcagtatagtcatgcagtatgtccaacgtttggtcaacaatggacatttatgacagtagtcccataagattactatggagctaaaaaaattcatatcacctgtgatgtcatagcagtcacaagttcatagtacagcacatcatcttttctatgcttagaagcacaaacacttggccgggcgtgatggctcacatctataatcccagcactttgggaggccgaggcaggaggatcacttgaggtcaggagttccagaccagcctggccaacatggtgaaaccccgtctctactaaaaatacaaaaattagctgggcgtggtggcgagtgcctgtaaccccagctacttgggaggctgaggcaggcaagcacctgtaatcccagctactcgcgaggctgagacaggagaactgcttgaacccaggaggcagacagaggttgcggtgagccaagattgcaccattgcactccagcatgggcagcaagagcgaaattacgtctcaaaaaaaaaaaaaaaaaacaaaaaaagaaacacgcttaccatttgtcataattgtttacagtagtcagtacaataacaagctatacaagctcatagcctagaagcaataggatatagcccaggtgtatagtaggctctaccatctaggtttgtgtaggtaaaatactctatgatttctcaatgtaccgtattgttaacaacgcctaactgtagtttttaaaattacaatctaacctactctgactggtgtatctattgagtagcaaagccaagatttgcatccatatctaacatcaaagcccatgttctaaatcattattaagattttgaactcaaaccccaatgtgtaatccctacatctggatagctggactgcaccaagtgtaagtcacaaggatttagtgtgtgtctggtctacggccttcaacacttaatgccagccaagctgcctctttggcccctcttccccaagcccatgctcaaagcttagtctccagatctctgatgatgcaaaaggacacaggaagacaaaaacaaagaaaagattcatcctcaaggcctaaagcagagtcaccgaatgctacccttttcttttggaagccaccctggtttctggctatgggggataacatcctctcaaataggagtaggcctcagatctctctaaccatgcgagctacatggagtacaggataaatgaatccaaagtaagaaaaagccacacggacttaacagtctttaattttaaagtcttccttcctcacaccaagacctccaacccctaacataaggttcgaagaccttagatttgactcatccatactgtacattttgaccacaatccttaaaaaaaattacttccccacctagtacacaatacctgaaagaaaatttaatctccctcaaaatattaagtgcaatgtccactaatgggtcacaacctgcagtcttcaaaacactgctgtagagttcaatggtctacatttaacagtatgctctcatatagcgaactaaacccataatcaaactaccttacaattctgctccttaaaaacataatttttcttcagtttctattgtataataaagtttatctttacagtccaaacttagtacaaaaaaagaagtatacaaaaagttttgtctcaaaacttagtaaaagacataaatcattagtttaaaatgttcaacttataatcaaaaattgaagatagcttattaattcaaaatgtgaaacacatttctcagcaggcaatttagtcaggtaggaattctctatcggcaattcccagaatacagtctacaatgaatatgtatatcatcaaattatacaaagtctgaaactaatctgctctaccactatccttattctgactggtccctcatctgatcactctccattactgagaccttagaagccatagatgtaactcttcttcctccctcttctcccccaagctttgttgttgttgttgtcctagcatattcctctaaattctcctaggttctgtaaggattcctaacttgcctcagacttgttcagaagttctggcatggatttacttaaaatgacttctacgggacaatgtgcaaatctgaacaaccaattttatcacaaacttctgaaatacaatcttttaacactacctttcatgtattatgtatgcatcaaatatctccaaaccaaagcctgcaacaaaaattgttaagctacattagaaaaagacaatatcctttctttttaaaggataagaactaattaaaatcaacttaacatttctgttatttgttgtgaatttgaattctgtaagcctaagatgtggtaaaatatgtatttttaataactgtgttatgaagacctggttccatcatgttgtcccatcatagaataagacaatgctaccatgcaaatcacctatgtagcttccacatttatttcatagcttcactcaactcttatctcctttagtcccacccactgaacagctgaatgagatgaaagattgtttactgctctcccgccacgaccgtaccacccccccatcaccacccaaccaccccttactcattcccttgcagtctgaagaaataaagaatccaagcagcaatagctgacttggtcattgtttatatccccccttcagtctatcaggattccataaatttcatccctacctgtacacttttaagtctaaaatactctcctccccatgtctgcacataaactttagggggaaaaactgactatactcatcacctgcatgtgcataaatatgtaaaacaggttagatgcttagtaatttagatgatctgttcatttacattctcaggggcactaacaaagatattttttcctttcatcaaaataaaaaagccagaagaaagaattcttaaagctgaactatttagcaataaactcaagaaatgtagtaagttattatttcagtaactaagaaaacacctggacgtcacaaattctttcctaggactgtaaaaacccaaatttgaaacagtgtactcttcaaaagtaactcagcaaatggaaatgtcctagaaaaatctcggttgcttatttcttactatacacacagctgaaatggaactcaggagtggaaaatgtaaatgaaatggcctgttctttttccaacatgtgggggaggaaaggaaatgaaagggctcgttaagagaataactgagaatattgaaatattttcaaaaattaatttccctaaacttcgccactccacatctccgctccctcccttttccaaggacccttcccaccctttctatctcctccggggggcgcccttcccaggcgttctctttcccttactcctaaaaattaagcccaaattccaaaccaaactaccgattctccctccgttctcaagactcgcccgccatccaccggccttccgggctgcgcctggagagaggcaaccccgagaggcgggaggaggagcggggaggcgacgcggtgactggagctgcggctgcagccgccgccgccgcctccaccacagcctcagcctggtgcatccttcttcctccctccccgccgccgcccgcccgggttggcccacacagcaccctcgcccgagcgttcacactcgtccccaccctcctagccaggcccactgccccacgaggggacttctgccgacggggatgcggccggggacaggaggaagcggggccgcggaagccggcgggcccgggaggagactgaggaaaggcgaagggacggagagaagcaagggcagggctgagaccaccacgctcaggctgctccggccgcggaggccgcggctctgcgccgggggccagcccgccgcggcacaggaaatgccgccgcctcggctctcctcacgttcaattcaaactgtcaccgccgccgcctcccctccccccgagcccgccgctgccgcgccccgggcccgcagtggcccccatcccggctcccctcgccgctgcctccgcctcgcctcagggcgttccctagctcggtccagcggccgcagagcttcccggcattcggagccgctgaccccaagtcgcggcacccgaagctgagactcacccatggtgctgctgttgacgctcctctcctcagcagcagcggatctcgcactgaccgacatcccctccccccctccgcgaccagccccagcggagcgcagcccgccgattctccaaaggcgcctacgccgattccgcagcgtagccgcccggcgtagctgccttgcttacgcacgctacagcaggcggactcctccacaggctctcgctcgactcccgctccctcctccgtcccccgccccctcagacgaggcttccgggcctagcggaggctggcttccatctcgcgagattaccgcctccccagctccgccgcctcgctccatttcgagcatgacttcattggcgtcagcaacgttttgctgttcgggtttagccgccatgtttaagttggccgggtttcgcaccactgaggtcatggatactcaggcctctttgcgtgtttcttcaacactgcttctaaggttaaccgcgttacatttgttggagaaaatcctgggaacgctgaaaaggactagtgggtggggtgcgagggtggggtcttgcccgaattaaagatggccgcagtcagctctgccccgcgcaatttcacgtcaagttttggagctgcgggagccggccagttggcctcagcgcctccttacggaattggcgtaaggcaaagaggcgcggctggaagaaccagactgagaaagtgccacagggcgggggccgcatccgcccctcggcttctggttactgacccgacggctttgtgagtgaaagtgaagagacacttcgaggcaggtgtctgtgctccccattcatccctgtttccgtggctatcttgactttcggggtgaaaagtgaggttaggccctgtttccccgacccttccctcgcgccatcacactctagtggcctggcacagccccagaggtcggccgctgtagcccccattgcggactcgccacattcatattggctcaccttgtcggtgcccggttcggtcctcttggagctcacactccagttgaggaaatgaatggacacaggaactactgggtaacaaaatactaataaagggctgcgattgtgtgagtttctactgtagcgatgaatgtcgctgtcattggaacgttccccaagtgccttctagtgaaagccttacttcactcggaataacctgtggtcttttcttgaacgtgatggctctcttggttgtattcttcatgcacatgtgttacttttcctgtttaactacatgttaaagaaatgtgtatgttcctgtttaactgcatgttttaaaaaagtatgtgtatttttaagttataggcacgtgcaagaaagttcagagcaaaatagcttatattagtgaaacaataaatgtctactaataggagaatggatgaataagtgtcattgttgaacaaattgacatacaacacgaaccaaaaaatcagtgaactaaagctaccatttttcatatggatagagtcattaacctaatattgaggaagaaatgaaaagacaggttgcggaaagatatatatgacataccataaataaaagtttaataattacaaaaaagtaagatcaaactaaaaattgtataaggaaatgatagataccaaattcagaatactggttgcttccagagatgaacagaa

SEQ ID NO: 2475 - DNA, 6000 bp, Homo sapiens
tgtgctagtgcctagtatccaattatcactcaagaagtaattgtcaaataaagtaatgaataccatatcctgggccaggtgctgaggctacagaggtggacaagacaagagatcttgactttaaggagtttagacttaaatttgtctctcttaaataggagacaagtatttacaaaactctgctactagaactaccataggagaaaacacaagatactatgggaggtgagagggtacctagcctagtttttggtgatcaaggaagacttttagagaaaatagtggttaagctgagacttaaaggaaaaaccaggtaaggaatgcaaatgtaaaaaggagagtgaagtgggagcagcagggcttactaggatttagggtgagcaaggtatagcagattagccagaaatgagggaatgtgtcatgcaagtttcttcaaggaaaattttaagactttaaacaggggactgacatagttaaagtttagaaaggtcactctgggtacgatgtaaaggatgagttgcagtattaccggccagaaaagctactgcaaggagttgaggcaggagataattatggcttaagtagaatagtaatgaagcggagagaaatggaaaattagagttgagaaggaaaaactgatagggctttctaatggctgacagagagagacgggctgagtaaatacccatatttctggtttacaaaagcgggttgatgatacccacttttagagattagaaacataaaagctggtaaaataaagagtttagtttgggatttttgagatatcttggaacatccaggacagatattttgaaggcagtaagacatataggtttgtagtcagaagagagaactggactagaaacttgcattaggagttactagtgtatatacggcggctgaagccatgaaggtgaatgagaccacataaaggataatgtaaaaagtgagatagaaacaaattgcacacaactttggggttcatggatatttgacagccagaagggggtcctgaaaggtaaaatagagacacagagatctaggagaaaaactaggaaagtgtggtttcacaaatcaaggcatatgaatgcagaaggccaagggttctagtatcaaatgctgcagagaggtcaaggaaaataagacaaagggtctactggattgaacacaagaggttcttggtgacctcgttgagaatttcagtggagtggtagttgcagaacccagaagcttgttgaataaagaacccattgactgcagttcctggaaaggcaggaggagtgagaatctagagaacgagcacaaagagatggaatacagggaactggcagagatatgtgcctcagacaggggggcacctaatctaccgtgaagcttgaaagaatgagtatggagacataaaattgttggagttcctgttttttttttctgagacggagcctcgctctgtcaccagggctggcagtggcacgatcttggctcactgcaacctctgcctcctgggttcaagcaattatcttgcctcagcctccctagtagctgggattacaggcacccgccaagacatccggctaatttttgtatttttagtagaaacagggtttcaccatgttggccagactggtctcgaactcctgacctcaggtgatgtgcctgcctcggccttccaaagttctgggtttacaggcatgagccatcacgctcagcctgagttcctctttgatggtttctatttttttctattctcttatttgagaataagtgaggggagtggtttgaaaaataaggagaaaatcagaagtggctgttgtggaaattaagagagagccaactagggaaacaagcattgcttggtaaagttgaaggcccacgtgagtttggacgctgtaaatatgtggtggaaaccatctatatggtctgtccagaatttcagatcagtttttttaaatctgtttctgagtcagtaaagtctaggctatattttattaacaaataaatgcaataaagagatcataaatattgcaaataagtgcaataaagagatcataagatcaatacaattctctttcctcgtgcaccacgtataatttgcataacacatgtatatacattatagaacattggctatgaaacctccctacaaagaaagttcctcagaatatcattatttcattgcctgtaacactccgtataattttttcttttttttttttgagacggaatttcgctcttgttgcccaggctggagtgcagtggtgctatctgggctcactgtaacctccgcctcctgggttcaagtgattctcctgcctcagtctcccgagtagcaggaattacaggtaccgccaccacacccggctaattttttgtatttttagtagatgcggggtttcaccatgttagccaggctggtctcgaactcctgacctcaggcgatctgcctgcctcggcctcccaaagtgctgggattacaggcgtgagccaccgcgcccggccactctgtgtgattttcaatgaaaagtagtgaagctatcatagtgtggggtgaacatgaacaaacttcagacaaggaatttaatatagtttctattaagaatttatccattttcatagcacaaaataacacaattcacctctttcatacccattaagagatcttcctcaaagaaatattatcaatagagatgggaggcaaagatttacttcctttagactattaggttatattaatataagtatttgctttaattttatattttaaaataatctatatttaggtaatatttactaagcattgactaagcaccgtgttcatgtattagtctatttaactcttatcaaaatcctgttagataagtattatctccgtttatagatgaggaaactggatcacaggaaagtttaagtaacttgttcttggttgcaagcctaataaatggagagctgggatttgaactcaggcagtctgactccggaggctatatacatttaccctccttggtacactgctttttttcaaaaatagaaattcaacaaaatttcccaaagtaaaagttcatttgaagtttcagaaacttaaaacaatgattgaacagataagttgcaacagacttcataagcagttcagtaaaaatgtagacttacgaaatggcatatatcaagatacaaaataagttgcttctataagtttcttttcttaaaaaaaattacttggaaatatttcaagtatatagaacagtaaaggaaataattacaagtgaacacccatgtgccctctacttagcttaatgttttgccacattttcaagatatttctggtagaaaacaaacgttatagatacaaatgaacccttcttgttacattcccttctgttcatctctggaagcaaccagtattctgaatttggtatctatcatttccttatacaatttttagtttgatcttacttttttgtaattattaaacttttatttatggtatgtcatatatatctttccgcaacctgtcttttcatttcttcctcaatattaggttaatgactctatccatatgaaaaatggtagctttagttcactgattttttggttcgtgttgtatgtcaatttgttcaacaatgacacttattcatccattctcctattagtagacatttattgtttcactaatataagctattttgctctgaactttcttgcacgtgcctataacttaaaaatacacatacttttttaaaacatgcagttaaacaggaacatacacatttctttaacatgtagttaaacaggaaaagtaacacatgtgcatgaagaatacaaccaagagagccatcacgttcaagaaaagaccacaggttattccgagtgaagtaaggctttcactagaaggcacttggggaacgttccaatgacagcgacattcatcgctacagtagaaactcacacaatcgcagccctttattagtattttgttacccagtagttcctgtgtccattcatttcctcaactggagtgtgagctccaagaggaccgaaccgggcaccgacaaggtgagccaatatgaatgtggcgagtccgcaatgggggctacagcggccgacctctggggctgtgccaggccactagagtgtgatggcgcgagggaagggtcggggaaacagggcctaacctcacttttcaccccgaaagtcaagatagccacggaaacagggatgaatggggagcacagacacctgcctcgaagtgtctcttcactttcactcacaaagccgtcgggtcagtaaccagaagccgaggggcggatgcggcccccgccctgtggcactttctcagtctggttcttccagccgcgcctctttgccttacgccaattccgtaaggaggcgctgaggccaactggccggctcccgcagctccaaaacttgacgtgaaattgcgcggggcagagctgactgcggccatctttaattcgggcaagaccccaccctcgcaccccacccactagtccttttcagcgttcccaggattttctccaacaaatgtaacgcggttaaccttagaagcagtgttgaagaaacacgcaaagaggcctgagtatccatgacctcagtggtgcgaaacccggccaacttaaacatggcggctaaacccgaacagcaaaacgttgctgacgccaatgaagtcatgctcgaaatggagcgaggcggcggagctggggaggcggtaatctcgcgagatggaagccagcctccgctaggcccggaagcctcgtctgagggggcgggggacggaggagggagcgggagtcgagcgagagcctgtggaggagtccgcctgctgtagcgtgcgtaagcaaggcagctacgccgggcggctacgctgcggaatcggcgtaggcgcctttggagaatcggcgggctgcgctccgctggggctggtcgcggagggggggaggggatgtcggtcagtgcgagatccgctgctgctgaggagaggagcgtcaacagcagcaccatgggtgagtctcagcttcgggtgccgcgacttggggtcagcggctccgaatgccgggaagctctgcggccgctggaccgagctagggaacgccctgaggcgaggcggaggcagcggcgaggggagccgggatgggggccactgcgggcccggggcgcggcagcggcgggctcggggggaggggaggcggcggcggtgacagtttgaattgaacgtgaggagagccgaggcggcggcatttcctgtgccgcggcgggctggcccccggcgcagagccgcggcctccgcggccggagcagcctgagcgtggtggtctcagccctgcccttgcttctctccgtcccttcgcctttcctcagtctcctcccgggcccgccggcttccgcggccccgcttcctcctgtccccggccgcatccccgtcggcagaagtcccctcgtggggcagtgggcctggctaggagggtggggacgagtgtgaacgctcgggcgagggtgctgtgtgggccaacccgggcgggcggcggcggggagggaggaagaaggatgcaccaggctgaggctgtggtggaggcggcggcggcggctgcagccgcagctccagtcaccgcgtcgcctccccgctcctcctcccgcctctcggggttgcctctctccaggcgcagcccggaaggccggtggatggcgggcgagtcttgagaacggagggagaatcggtagtttggtttggaatttgggcttaatttttaggagtaagggaaagagaacgcctgggaagggcgccccccggaggagatagaaagggtgggaagggtccttggaaaagggagggagcggagatgtggagtggcgaagtttagggaaattaatttttgaaaatatttcaatattctcagttattctcttaacgagccctttcatttcctttcctcccccacatgttggaaaaagaacaggccatttcatttacattttccactcctgagt

SEQ ID NO: 2476 - DNA, 6000 bp, Homo sapiens
gaattttgggatgatatgtttttagccaaacccatgttttatctttgtacagagtttcttcctcagaagatgttttcctgaaagagtagtcattcagatttttaaaatatctactgtgtgtcagcactttgctaagaacatagagatgaatatgacatggttctctccctctgggaaatcagtcatatgggggaactgacaaaatgtttaaaataattttattttaaaaaatatttattataataattacatgcaaataattgtctactgtaaatcatcctagttactcttctttgtcaccatgttactgagactgctcttattttttaagttaccagtgaccttatttccaaattttatcagtatgtctgtttctgtaatggtatctttctctgtagcattcagcatagttaagtgaatcctccatccctgagatgatcttggttttcttcctgtctccactgactgatctttctctgctccagggctttgcctcgacccccttcttcttttttttgagactggagtttctctcttgttgcccaggctggagtgcagtggcacgatctcagctcactgcaacctctgcctcccaggttcaagcgattcttgtgcctcagcatcccaagtagctgggactgctacaggcacatgccaccaagtccggcccatttttgtatttttagtagagatggggtttcaccatgttggccaagatgttctcgatctcctgaccttgtgatccacccgccttggtctcccaaagtgctaggattacaggcatgagccaccgtgccctgccgacctcctgtttatctatagtctgtctttgggaatccaatcctgtttcaatagtatctgcatggcgatgattcctaaatctatattttcagcaccaaccaaccatgaaatttctcactctgttgtccaggctggagtgtagtggcatgatcacagctcactgaagcctcaacctcctgggctaaagcaatcctctcgccttggcctcccaaagtttggaattacaagcatgaaccgctctggatggctgagagctatctttaaaacagtaatcaggtcacttgcctatgaaaaactctctagtgtcttcctatcatgcctaaaataacatccatatacttcctactttggctgagtcccaaatgatcaggcccctgcttgcctccctgacctcatttcctatcactcatccccttgtccactacttcacttcattatagttcatggaccttcttttttttttttttttttttttttggagacggagtctcgctctgtcatccaggcaggagtgcaatggcacgatctcggctcactgcagcttccaccccctaggcaggttcaggccattctcctgcctcagcctcccgaatggctgggattacaggcacacattgtcagtcccggctaattttttgtattttttagtagagacggggtttcaccatgttgcccaggctggtctcaaactcctgacctcaggcaatccacctgtctcggctttctttttactcttggaaataccaagttcatccccactttagggcctacccctttgcctggaatggtttcccgctttccacaattttaaaataatactgtgtgccaaagactgttcttgttgctaaggataaagcagtgaataagagacaagggcagaccctgagtcatttttgttatacctcttatctgatgagttccttcaaggtgcagtctaaaatactgtattctttgaaactactggtgcaacttgctctcagtagcttccttttttgatgtaccatttatgtaattcattcaatctctgcgttgatggagcttacattgcgggcagggtggaggtcacagtaaacaagttgggtaaaatgtgtgttggataatggcaagagctaagaagaagcatacagcaggcagcaaagtgctaaggtgaggagtggggtcgtaattttaaataaggtgattagggcaggcctttttgaaggtgacatttgagtaataaaaataatctgtggctgggctcggtggcttacgcctgtaatcccagcactttgggaggccaaggcgggtggatcatgaggtcaggagttcaagaccagcctggccaagatggtgaaaccccatctctactaaaaatacaaaaattagccgggtgtggtggcacatgcctgtaatcccagctacttgggaggctgaggcagggaattgcttgaacctcggaaagaggttgcagtgagccgagatcgcgccactgccccccagcctgggcaacacagtgaaattctgtctcaaaaaaaaaaaaactattccaaataaaaaaagcaacaagtgcaaaagccatgaagtgatagtatgcactgtatgtttggggggtagttagggattcagtgttggggaaagtgaagtgagcaaggggaggaagtgtagcaggagatgaggccagaagtaagagtagagccagatcttgctaggctttgttggctagtggctttcattggtacacattggaactacttgaggagctttaaaaaatactgatggatgggtttcgcttgcagagattaatgtaattgatctggaggtgcagctgagacattaggattttataaaagctcccccaagtgattctaagatgctgctaaggtagagaaacactgtaggccatcattgggacttcggcttttacttttgaggaagttcggaagtcattggatgattttgtcatggaataattttgtaattaactttaaaactggggttttgtttattacatttaattaccttaactataaaacggactccagttgtttgaagtgggttgtgatataactcatagatttgtatcagtataaaaatgcacacttttcacagtttggccaaggattatctattttattttctgtgcttcattagttgccttttagttttcacagttcacatatgtctcctctttccatctgtttctgcttatcatctttagcttccttccttttcctgtatctaaatgtctacatttctttaaattctggacttcagtttaattaatagaacttgaaatacagcattgtataaaaaggttttaaccaaaacatttgcatttgtctgatctgagctgtcttaatccagtgactgacaaagcaaaattgcatgaaatttacattttttttcttcttgtaatttaaaacttggttcctgtataccttcctggatctttatacttttgtatcttttctaccatttctgtaaaacctcaactgcagggtgcaataatgggccttattttctatatttcagcaggacagttgctgaaaatgggtttaaactcactggcattatatcccacacaaaaatatattactttgacatgtttagaaaaaagtctgcctttaatttctttgtaatttacctctaatttgttgagttacatgtaagtaacttttttttcccctctgtcttgctgtgtttcaatggatttgcctctcctgtttggactgaatatgtcattacaattcttggaattctttgtttactgttcctctgtggatttcttctgttggaatctggaacactggaatgatggaaatgtgttctttacaaagtagctgtgagtatactacataatttatagagtttttttcagtctcagttaacttaaatttaatttatagttggatgaaatatgagccaaggaaaccttaggtttaatgcatatttctaactccactcatagcagactttcaaatatttgacttaaaaatgttagattctgattagtctcctaattattatgtttatagttagcttttcattttaatgggcttcgtttttaaaatttggcttaagaattagttttatgaaatgaacaaaagagccaaagattatggatggaatatttagctacatgactagtaaacattgtagacttctgttctttgttaaatccaaatgtattgaattgatgttttgatcccatgattgctttttaaatgagaatttaaatgtggcagaaacttttaagagaatgtgtgcctctttttgctattttttaatgttgagataagactgcctccaaagtaaaattaaccaatgagactctgcttattcaaatagtcttaactacggacagcatttctcacccatgggtaagttagaagtcagacttatttactacaccaatttggaagtagatttctttcagttactcacgaaactattgttgaggtcatctaggaataaaaaaccaatagaaaatgaagttataagttactttaaaacctggataaacctgaagataaaggcagtaggatcatgtgaaaccttgaagtgacaaaattggacctggcataacagcttgaatgatactgtagctggttgacactgatcacaagagccttcaagagtttattttttaaaattgctttaaattcaacattttgatttcatttcatgaataagaagacaaatttcaagaatctcatgcctgtggtataattagtcagtgtgatcaaaggagataattaaaaaggattcttaatatgatatgaaggggatttgaatttttttattgtgaagaatcctttgttattttgcttttttagttggttggtcaatcatcttgttactaactactgtcaattgaaatctttgctctgaggcaggttttctaaatttttatttcattcccttggatttttataattaaccattatattgtcagtcaactcatgctcaaataattttgtccatttaagaattgatagttttattgataatgccatgaaagtagtttgatttgctgtgaataatagtataattttctaaaataggttaatgaagggaatttgaaagtgtgattgaatagtactgttgatacatgaataacttggccctttttgcttttgtcagcaacagaagaaccttgaaggctatgtgggatttgccaatctcccaaatcaagtatacagaaaatcggtgaagagaggttttgaattcacgcttatggtagtgggtaagatatgatttcttactaaaatggaactttggtttaagttttaaacgttagtcaactctgaatagatttaagaaaacactggcacagatatctacagtgatcatatctttgttgtattttctcttatgtgcatacattttaaaatttaactcagtggcataatgggatttatgtcttgcctcttattttaaggtagaaactacaagttgagaaatggtgggtgatagtgttggagtggaactctagagaagttatcttcaattcatagtgctacaaaagaaaatagcatctggtggttacttactactccaggatagttttgttttctggcttatatgctatagtggagtatcatataagcatttaacttaatgtgctctgaattttgaaaagaaaggtaggatagaggatcataataatgtagttgattacccttggaattcattaattgaatgtaagcactggaatgagtaaaatatgactctcctggttctctaattcagtctgagttttcttttgtgtgttattccatgaacacattaccctgcctatagtccatttgaaaatactgttaaggataattttgactgtaggttggtagcatcattattaaatatgaagaaacacactgtgtctttcccatctataagattagttatcttcaataacagtcttactcttaaatgactatacagtattttcacctcatataggctgactttagaacctaagttacgaatattgtatagtgtaactttgttgtatttctgttatttaagaaggtgaattgcagggtagtggattagctatccttaacaaagaaagttgagttgatgcttgactttttaggtagtatacatttttgttaactatgtttcaacatctagtatttttattttggtgctgaattaggttaattgaactagctgtgaaatactcctttattgggaggtagaatattttatctactg

SEQ ID NO: 2477 - DNA, 6000 bp, Homo sapiens
tgacctcatgatctgcccacctcagcttcccaaagtgctgggattacaggcatgagccaccgcacctggccgatttctattcttttggttttctttttcttttttttttttttttgagacagagtttcgctcttgttgcccaggctggagtgccaatgcacgatctcggctcactgcaacctccgcctcctgggttcaagcgattctcctgcctcagcctcccaagtagctgagattacaggcatgcgccaccacacccagctaattttgtatttttagtagagacggggttttaccatgttggtcaggctggtcttgaactcctgacctcaggtgatctaccctcctcagcctcccaaaatgctgggattacaggcgtgagccaccacaccctgccgtttctattcttaaaatctcttttatttatctccgctctaatctttgttttttcttgtttttgctagctttgagtttagtttgctcttctttttctagttccttatggtgtaaacataggttgtttttttaaaatcttcatttttatataagtgtttacaactataaatttccttctcagcactgctttttctgtattccgtaagtttcggcatgttgggtttttatttttattttgtctcagggtgtattctaatttcccttgtgatttctttgattcattggttgataagaatatgttgttagatttccaaatatttgtcagttttcctagtttccctccattactgatttttagttttgttttattataatgggaaaaaatgctttgtttgatttcacttctttaaaatttattaagacttgtttcttttagtcattcctgaaaaatgttttacatgtccttgagaaaagtgtgtagactgctgttgttggatgcagtgttttgtctatgtctgttagcttcagttgatttacagttttcttcatatcctgtatttccttgtttattttccgtctagttgttccgtccgttattgaaactggagtattgaagtctccaactattattatagaactgtctgtttctcccattaattctaccaatctttgcgttacataatttaaagttctgatgtttggtgtatgtttttaattgttacatcatcttggcaaagtgacccatttatcaacatttgaagtcctttgtctttgatgatagtttttgacttgagactattttgtctgatattagtgtggcttctctacctttctggttactatttgcatgaagtatctttttccaaccttttactttgaacctatgtgttttcttagatctacaatgtgtcttttacagatacgcagttgggtcatgtcattttatctattatgacattctgtgcctttaattgggagagtttaatcaatttacatataaatacttataaggaagaactaacttgccattttgttttctgtatgtcttttagctgttttgtccttcatttcttccattactgcctttgtttgtgtttacttgattttttgtagtgacacaatttgattcccttctctttttttttttggtatattttatagaaattttctttggttattatagggataatatataatatcctaaagttattacagtctcaattttttataccaatctaacttaaatcacattgaacaactacacgtccactgctctgtccctcttttatgttattgatgtcgtaaattacattattatacattatgtacctattaacacagattcatgattttttaatgcattcgcctttaaaaactcatagaaaatataaggtgaacttgcaaaccaaaattataataatactggtttttatatttgcccttgcatttacctttacgggatctttatatctttatattgctttgagttactgtctagagtccttctatttcaacctgaaggactaccttcagtatttcttgtagtacatgtgtagtgataatgaacctccctcaggttttgtttactggggaatgtctttatttctaccttgtttttaatggtcagttttgccagatacagaagttgcatttgacatttattttcttgtagcactttaaatgtatcattgcactgccttcaggcctccaaggtttctgccaaaaagttggcttatagtcttatttgaggattctgtctatgcagtgagttgcttctcttttgccactttcaagattctgtcttggcttttgacagtttgattgtaatcgtgttggtattggttgtgagtttttcttatttggagtttgttgagatccttggatttgtagattcatcagttacatcacctttgggaagttttttccttcatgtaatctctgttcatttctcttcctctgaaacatccattgagtatatattggtccaattgatttatttcataatctcttgggctctgtttaattttcttctttcttttttctttctgctcagatttgataatttctgttgtcttcagatttgctgagttttttcttttgcctactcagttctgctattgaacctatatagtgaaattttcaattattgtatttttcagctctacagtttgtttttataatttctctttattgatattctcattttgctcattattttcctgatttcccttcacttttttctttagctctttgggcatagttcagacagctgctttaaagtctgtctaataaatctaatatctgtatttcttcaggaatggtttctggaaatttttgttccttggaatgggctatgttttcctataccttgttgcatgccttgtgatgttttttgaaaactgagtatttgaaagagtcacctctcttcagttgcacactggctgtgtactactggggcatttctctgctgattagttgagcatgcccttaacgtagtgatcaccctaaggtgaaagcttaaggtcttcttttctgagcatttgtgttgcctaggcctgtgggtcgctttctcaattcctcctgtatgcatggctgcttttgaatgtcttaatttcccaaagagtctcacctggatactcagatggtctattgtatctacccactgtaatcttatgccccaaacatctattgtgtccccttgcagctttcataaatggtgcccattgcttctctcacccaatgaggtcccagttaggcaaaacaggaatcagttcttctggcagaccagagaggttaaaatgttacaagttaggtctgcactcttgccgctcatttgaagggaatgaattgggaattggtttgctgcctccttgagacccagataaactgcagaaggggtgggacaagatcacagaaaaatgtcacaaaagttttgcatattttttttcttaattgggcatttgcttcattctgtagacctttgtttttcacaggtcctgtaaggttaattcaactaatttctggttgtttttggtgtttctgtgagggaatgaggctttgagctttttagtttgccgttttgctgatgccactcaataatactttttaaattatgaaaatagcagaatcatattgaaggaagtttacagcacccagaagtataacaaactaagaaaaatcatccgtattgtactatccacagagtagccactatttacattttggtgtgttacctttcagacttctatttttcttcctctctcttttccctttgtcctctgtcatcttgttcccccactcctcaccacaaataaaaaggggtaaaaaactaaaaaaaacctctaaacacaatttattgagtacagtgttaattttttaattagcatacttttgtttttaatttcccaaaacattattgtatatactaaaattatcatttatatttccaaaaagaaatattgtagatatttctgataacatccaaatgcttgggttttattctaatctttctgctttcaaggtataagagttaagaaagaatcgagtgtggccaacccatgttactttcctgtgacttagacatttttgcatttttacatctagtaaaaattggcacgctctcagtcaaaggggtaagcccagaccacgtggaaaggatcttacctcttttgagagctaatataaaaagaattcctcctagacataaaaatattgtgacatcagttacttaggctaagcatgcctattattctaagtgaattattaacaataaatactttaactctgtgccgtgttgtcataatatggtttataatttattttaaccttaggttatatataccttgaagccatttatattttcatatacttgtaatagttactatatactagactatgtatgttagactagacatggagagtcaaaaaagagtacgtgatcagagtacaaatcatgccctagcttcccttcatgtctacctcctacctcgagtagaagcaatataaaaagtaattacctaagattttttggattctggtttgggagaagcacccttatatttaggctgatgggtggctgaattagaaagtatgttttgtgatttagaattttatacggagatgttcattgtgattaattctttgtattagcagatttttgctttttatagttgcatgatttcttgttttgatcattcattattgtctattagtaaagaaaaactttatttcactcaagcagcgacatataatccaacttggattttttaataatgacatttttctttgggaataacattactgttaaaaatgtagattattagatacattacttttaatgaatataagtggtataattagaagactgaaaagaatccctggaaacatgagtctgatttgatagctaagcaactgaggacaagatacttattctctgtagcatattttctaatgtcatttcattgtctcaccaagaagtacttgcataaggcaagtttgattatagcatctgttgaatatttaagattgcgtaaagtgggtgagtttaacagatattttcccttatttcttttaggtgaatctggattgggaaagtcgacattaatcaactcattattcctcacagatttgtattctccagagtatccaggtccttctcatagaattaaaaagactgtacaggtatggatattagtattgttaattgataagctggaataatattaatacacacaaagcacatgttgtaacttttattaggcttccttagaggtaagatgcaaatttgtccttagccagtgtatgatggtaaatatgacttcataaaatttaaaaaaaaaagtacagttcatcagaagaattatcttggctagaacttcccaaatttgtctagaggactctcctagagatgacactgtgacatagtaaccaattcccctggagttgtgctatctagtatggtagtcatttgccacatgtttaaataaattaaaattagttaaattaaaaatgcaatttctcatttgctccagatacatttcaagtgctcaacagcccatgtggcaagtggctgccattttttgcagcacgtatatgaagattttcatcattgcagaaaattgcattagatggtgtagagaaaacgtgatttatagaaaagctattgtgatttaaatatagtgttctatattagtcagtgggataataccatatcatagttgaatggcaatagcgattctgtaagactcccaaggtatatgtgatctgatttactagttctcagtctttgctatgcattccaatcctcggtatcctgttaaatttagttcttctagtaggtctgagatgggctgcaatttctacatttctaacaagatcacaggtgatgctgatgctgctggatggtagatcacactttatagagcaaggggctagattctagatatgtactttttattaaatagtacagcagcctgtagccacatgtggctattaatctttgaaatgtaggtggtctgaattgtgatgttctgcaaatataaaatataccacagatgtctaagactgagcatggaaaaaaaaatctcaataattttttatattgat

SEQ ID NO: 2478 - DNA, 6000 bp, Homo sapiens
ggggaaatagtgtaaacggttgtcaagatgaatctaaaatggaaattaatcagttccctagaacatattgagaaattagctttaggaaaaagatatatttcacacacactgtaccatggaaggtacagtgctgattcagacagactgggaatggtctcatttttaagtggagatatgaggtacttcactgagcattgtgacagacatgggcttgggaagagcctactgggaaatgggagaggcatgagactaaggagcacataagaggaatattagcagggaaattcttgttgaggttgaaagtcatgaattttatggtataggaatagaaagatgggttaatccagagtgggatttgagttggaaagggaaagaaataaaggttttgggaaggaggttgctaatagaaaatgagaggggcaagggatttgaggtctcagtgtaaggagacagggatatgagaggtagagaggttcagaatagaaggccaagttagagttttgggatcaactttcttagtaaagtagttctgggtcttgatgagaaggaggtattctttaagcataactgttttactattggtcacttcctctttcattttcttgtggaacacgatgaaacatgtaagatgatatttgtcttttgagccagtaaataagcaaaatagatagtttttgtgtttgagctaagtggagtatctcaggccattccaatgtcttcagagttttggctgtaatgctacctcttgagcaagtgaaggtagaggtaggctcttgacagaaaattttaaccctctcttcaaaatgttatgttcttaattaaataacattttttatttaccttaataagtggcatgtaaacattaagttaggttagtttatatgacactgtataataaacattgtttgactttttttcctcagatggtaaaactgaaaactcagtatactggaactcttgtatactgtatacactcagtattagaaaatgagtaccttggatttctggaatctcagatgccaaaagaggtctcaatagatgaattatacatagatgatacatggacgatagctttagttttatttatttttcagggaaaaacagttgaaaatgcccttgattcattcttttggtattaaatgatgcagctaatcttagagaaccctgagtgatgccataaagatgttgatgtgacctgcttaaggaaagtgcgtgggaaagtggccatttggaatagatttgttagaaaagtttgaaattcttggacttcaactaatttgttttccatggatcccatgaggatacttgtaaaagcagatgataggatacagtcggatcctgtgaatggcactagtttagttgtgttttctggatctcttccatatgtcgctgacttctttgtatttgaccgtgtatggatacacagaattttgtaggccagagaagaaaagaagctttataaacattccttaaagtgtgtaaaatacaaatcttcatttgtcttagcaagtcaataagtaattaagttgttgaactgattttttttaaaaaacagggaaatatcttaaaatttaagctgttaagttaaaatgtgtaattggtatacagcatattactgaaggtagaatgggcttcgtttggtaataaaggaaccagaaatagtttgaagtaaaattgggagatgattcatgtagatttactatattgttgtatcactttctagtgtgtagtactatgttatttaaaagagtaagtaggtaaaggagtggtatgattactttggatatttctgcttcagccacagttaccatgaataaatgatctgtctttataaaggagatggaagtgaattcaagatattgagatgttagatttgactgggttgtcctttggctagaagatcaccagataaaatgtaaacctcctaaactagatgagatgataccattaaacattttttttggcccagcactttgggaggctgaaatgggaagatcgcttgaacccaggagtgaggctgcagtaagctataatctgccatgcactccagcctgagcaacagagtgagaccctgactaaaaaaaaaaaaaaaaaaaaatgtttttcctttggttctcatgatctcacactgatgaatctgattgttttctctgagttattttgcctctctcatgttattagggtaacctgataatagacatgttatcttagttgtgtggtatgtgacagtgatctcctaaatgatgtgcatcaatcattgatactgaggatgatcagaaaatattacaactgttattgatgtttacttttttaatctacagattaatgataatgcatattaatacttaatattcagattgccaatagtatatatttggtggataaatatcttttggatctgcaaaattttcacttgatagtttatatcaggatcaaagcagtttaaagaacattaaaagataagaatttggcatctcatttctctaaaagataagtcatgtgtgtccacatctcaggcaatttttttcagttttaataagttttattcctcataataaaatttttttaacagaaaactcttgattgctgtagacctctgctgtgtattcggtagtcactagccatatgtggctatttaagttaattcaaattaaataaaattaaatatcagctcctcatttgcagtagtcagatttcaaggactaagtagccacatggacaagtggaaggtggtgttcagttgctgctcataatagttgataccctaggatttggagatgcagtgtggatacacaacaattccatcatctcagaaagtgttattggatagtgtggctacagacttttcttgctcagcaatcttagtctccgcatgttagtctcttcatgcatcaggtagcatctataaaacatgccaaaaggaagtaggctatctctaaaagtgtcccaaactttttgtcttgtaaattagcttatcagcatacttggagcctctagccttaataaggacttgttatccttattaaatgtgttatcaggagaaagcctgtctttttctggaggaattattcccttttcatttgaatccgtgtttgctttatcttgggttcctgaaaactgatattttgcatttaacagcagcatatgcccaggatgaatgataatacatcttctgatacagagcttgagattacagaatgtcttaaattgttccaggaactgttgttatcatttaagtccaataatcagttagtaaggtttcaccctaccagaatacacttttttttaaaataaaaactgtctggacttttgctgattacattgtccagaatgtggagtatcacatttgagaaaaggattggatcctagccataacataaatacaagggtaatacatccatgctgagaaagattaaggaatgatagtaagtttatttgagtgagtggttggggccaaacttgatagagaatagtccaggaagacatttactgtaaatggtagattagatgttcttctctgattaattacatttgaactctgtgaattattaaatcactcaaactgcttatttgtattattagatgcacatttaagttatataagtattacatgtctttagtggtgatcactattttatcagttcctctgtctgtctttataccaagtatgagtcataaacccagtatgaatttgccaagagattggcagactatttgtatatatgcttttctttcaaataatctggatttccaatgcccgctatcatcaattctaaaggtaatgtggtagtaggtagatttagtttgctaacagtttcccagttggttttgataaactcgaacgtccctaccatcaccccttgtaggaaatcactgatgtaatgtatgatattaacatctgcaccaattactcttacaggtggaacaatccaaagttttaatcaaagaaggtggtgttcagttgctgctcacaatagttgataccccaggatttggagatgcagtggataatagtaattggtaagaagggtttgtcctcacaactttgcagtgcatttggggtactggggtggttaaactttttcttcttaacattttaaaacttctcatcttagcaaaggtcaccaaacttcaagcaacatgacttgggtttgtataccaactttgccacttatctgacaaagttgtttaacttctttgaacccatttacttttctataaaatggagataatacctatcataaaattgtttttaagacatattctaaaataacataggtaaatagaagaattctcattattgtaagaaatttaaaactgttcactttaattttattcatttgtataaattctatctcaatcctaatttaaacctgatatttagactttcagtttttctgtaagtcctaagtgaagaaaacaactatgaaattttagtctgaagtaattatcttagtattttataaataatacttttatttttgtttgaattcacattgtttttgaggtaattttctgtcaactcttaaaactcccaagttcaccatgaagtttttttattatttaaagtaatctctcatttgaaattttaaactgcatataattgttttcatattatgaagtgtgttattaatacacttattagtgcaaataatatgctaatatttagctgtgtttcgacagtaaatagtttattttctttcatttggaaagttttgaataatgaatatttattcaacataatttatatttttgaatatatagaataacttgacatatcttctactggtaaattcattttgcccatttgaaaatactgattattgtcctttaacagtcatcagttaattcatatgtagaattgcagcttgttttgtttatttgcgttctatagctggcagcctgttatcgactacattgatagtaaatttgaggactacctaaatgcagaatcacgagtgaacagacgtcagatgcctgataacagggtgcagtgttgtttatacttcattgctccttcaggacatgggtcagtaccttgatacttctgattccttttttgttgttgttgcttactgttacctttatgtgcatactttagtaatctttaagtttgtgaagtacacacaactatagccattatgaagtactaaatttcatgtagaaatgtcttagttgaaaagccattttaagtcctatataagctaacagtgattttactccttagttcttcattcataaggattttccctgcttcatgaaataaacagtgttgccaccatggtttgaggtctcaatgtggcaaatttagctttcatgttgaccactctgctactaatagaaataccaaataaagagaagcagccataccagttagacatattcaaaataaatccaaagatgctatttattataagtttcatagaaatgattatcaaaaacacttgcatgccaatgttttcttgtgccatttctttctacaataaatctatttggcttctgtttcaccttagctgtcatagacgtgttgttcaggtatcatattgtcagtactaatcttttgtttattaggacttaagacctaagaatctagacattaatctaatctgattgttctgtttgttatagttagcctgtactccctttttttgttttttgtacttctgctgtcattttgagtacatatatgtgttattgacaactgcagaattttccagttattcttcctcagtcttttcctttgggtaagtaactcagtatatataattcagccacctgatgattataactccaccatctctccaccaaaagaactgtagtagcatcaggctaaatagcattaagttatctaacactcacattacagtagtgtaaaccaattccttcaagtatacctttctcttctatttttggcttcttgctctcttttacttttttatagataggtcaatgcccattatcactctagatggataagggagccttaattatatacttata

SEQ ID NO: 2479 - DNA, 6000 bp, Homo sapiens
tttataaaagttaaagaataccactttagaatggtagtcctttgcaaaatatttctagtatcttcatttattcttgtgaaacattcaattttagtccacaatatattccagatttgaggacttcggttctcatttagaattactaaaggacataacgaaaatcacagcagcttactttttttgtcaacaaatatttgggcaccttcttgagtgttagataccacgctgggtgctgaggatacagataaattgagataaggccctcgctgtagagggtatttcagtgagaagatgggagaaacaaatacagatgctcctcaacttgggacagggttacctgttgaagttgaagatacgtttaatagcgtagcctacatttgggcaaaatcatctaacataaaacctattttgtaataatgtgttgaatatctcatgtaatttattgaatactgtactgaaagtaaaaagcagaatggttgtatggtttctattctatgcgtattgcttgcacactatcagaaagttgaaaaattgttaagtggaaccatagttagtgaggacccatctgtatgcaggcaggcagttatggtacagcacactaagtgttgtcagcacatagaaatatgcctagtctcaaggttagagaaggattcccagtggaaattggatcataagccagtgtcctaaaggatgaataggaattagccaggccaaggagaaggaggatgagaatggaggagggtgttccagctaaggtagtagcctgtggccagatgtcaaagtatgatgctttcaaggaattgtaagaaattcagaaaggctggcacattggaagtaggaggcgaaagaaaggccaggaatgctaagagatgaggttagcttgagaatctatgtcttcacaagctttgtgggccattctagttaaggcatctggcctttagtaagatttttggtcaggtcataactccataagatttggatttagaaagaccactctgacttcagtatggatgattcatgttatagttattcattccaaaggacttggtggcctagactaaagtaatggaaatggagatatacatacatcatgcatacacacatctatacacatactatatataggaataggattagaggaggggaggaatcctaggtttcacacttgagtaatggggaagattgtaatgccattcactgagataggaagcgtagaagagggaaaatgggggttcagatgagcttttgattttaaggagcccatggaacacccaggtagcatatccactgggtaaacacaaacctggaacttaacagtgagatatgagctgtctatgaagatttggaagtcagttgaccaattgaagataattgaaatctattgtagtcataataattgtactgaatgtagagtaagaagagaaagcctggtagggaattctaaagaatgtacttcttaagggactagcttactaagaggatcctgaaaagtatcctaaggaagaagagcttgtgagagaataagtaatggtaagcaccatgatagaagtatttagtcaccttcttgaaagtacagaggcaaactggaggcagcagccagattgtaatgaataaaagggatgttgaagattatcttgtgagcatcttgtcagagaaagatagttggtagcaagaactgaatgtggagttggaagaggactaccatttttcatttttaaaaaatcctccagcctgggcaacctggcgagacattgtgtctacaaaaaatacaaaaattaggcaggcatggtggtgtgcacctgtagtcccagctactcaggaggctgagatgggaggatctgagcctgggaggtgggttgcagtgagctgagattacaccactgcactccacccagggcaacagagtgagaccctgtcttaaaaaattaaataaaaaaaaaaaaattaaaaaccttgtaaattttgagtaataaatatagagataattctaggaaattctattaggagcctttctggtttttccaattcctctttagggccaaaaccctgtgaccagggttcaagggcaggagtcaaagccttagccactccaatgcttcttgaagtcctgttctacctaacttttgctggcctaatacatcttcagagtgtttctgataagtaagtaaagtagttacattgtatttaactagcattggggatgtgaagaatcttgttctcccaaactgatcaattcagtcaaattaaatactgtgtatttcagacttaaaccattggatattgagtttatgaagcgtttgcatgaaaaagtgaatatcatcccacttattgccaaagcagacacactcacaccagaggaatgccaacagtttaaaaaacaggtgagcaggatgtgttaacccaggtttcttataccgttctcataatttgcagtttttactatttttagtataatgtgttgcaatccattcctcttactgctttactatattgtcatttatactgtattagaaataactcttcaatcttctgcctttgtcagtttttaaatatggctgttttaagtgttctgtaataacacccccacacagacaatttctccccatactctttagaattattttcttttttcttttctcttttcttttctttttttttcttttcttttttttttttttttttttgaattattttcttagaatgaattcccaggaagtggattattctttcaaaggctatgattgtttttatgggtctttatctccccactccccattttgtcatggtgctttcccaataaaacaaatttgtacatctgtttcactgtgactttgccagcattgttatttttattttgaaaacttttttggaatgaagtggtaaccaatcatttctttgtcttttccttttattttcccgaaaggctgaacattttaaaaacaaagtcatttttttccccctttttgtaaacatctgctcaaatcctttgtctttttgaccagtagtacttggtattacccgtatttattgatatgggttctttttattctggatatttagttctctctcattttcacaatattttttctgttttctcttttgctgcttatttttgttttcagtgcactaattttgttttcagtgcactttacgggatatttatagtttaagttattgttcaaacctatgaccctaagattaagagtctcatgctgtatgactgagctagctggaaggccactaaactgtttttctagactcacgtctagttgtctcaataatattgagttacacagtcacacatatttctaatttaattgtgtttggttcgttatatattacattttatgaaatgtaaggtcaattctggaacctttctctattccagtagtccaaaggccagtagtatattgtttaaaccacagcagctttatataatatttaaaagtagattgtaattatctctattgtccatatagtcctattgtaacaaaatactttgtttttcacctttttcaatatgaatttcagaataccttgaaacctgttataaaaagcctgttaaaatttgctttgaagttgtgctaaattcatactaattttcagaaagttttagtacattgtttttactgtatctagtatttttgtgttttacacttacccattcccatttttgttttgtaatgtgctatttctaagtttcaaacactatcatataatacatttctttttgtttattatgtgtttcgatttggatttttactgataaaggtaaaaaagatgaatatgaagtgacctcttctttcaaattggtcacatcctggtggttgtactcaggtcattttaatatacaacctctgactaaaaccattgcttttagagctagctactattactcatttttctcgtcatcatgtatttgtcaattccttgtttattctttttttttttttaaatataggtacgtaccctaattgtaaaagaagtgtggtcctattttttttcagtgacaattttacttctgtttacttctgtctactatagtaaccatgtaacacaatttgttcagggtccttttatagctgctgggaacctttgccaagaaagttgcaccaaaatataagtatagacagggaagctaggtttaggtatattagccattggtttgttatgggttcaaataaggataggtagttgaaaattatttggatgtctgtattctgtttagaattggagtgattttgaacatgataatttaatttgaactaggtcatttctgatgttaataataagttgtcttctctaggtttctgcattctccttattaattcttgagcttcttaatttctaggatgtgttttctccctgtgtccttccctaatcttacacctgttgctcctcaatttgtgtgtatgcacatgtacatgtaaggatttttctgatgaatgttcagggagcagtgctgtacttagttttaccttacttttgccagattctactaaaaattttacgtgagtttagccctgtttattcaactaaataagatacttgggaatttatatctaaaggaagaatctcagtcattgtaaataaatgacctaaagtcattattgtggaaatcaatcagagaaatccctttctggagttttacatcctttttggaactcttttggtatgacagctatatgactttaacacttcggaagtaattggatttggtgtttatatatcaacttcatagttaaaaaaaaaaaaaagactagcgtagtactttaattttagattacaactttgcatcattaaaaaacagtaaaggatctggaaccaaggacccatataggaatcgaagaggcatgtaatgaacataagactaatatactaattatgtatggtgctcttttgctgactacttcttccattttagataatgaaagaaatccaagaacataaaattaaaatatacgaatttccagaaacagatgatgaagaagaaaataaacttgttaaaaagataaaggtaggttcatccctgtacacacgctaaagtaatctgaggccttaaaaacatactacagcgtccacaggaaagatcaaaagtatcagtgttttaagtagttggcttacaaaatacctagggagatttaatgttgaattcaactttatagttaactttgaagattagctagtatatataataaggaattgtataaactactgaggtgaataacacaattcttatttcaaagtgtttttaattaactggctttcatattatgtaatttttttctcttaaaaaacaagtgatgagaaaggagagaattcgttctgttatgttttaattgccagacaaaaatgtatttattttgtctctataaaagccaaccaaaattacagctagataggaggagtaagttctagcgttctgtagcattgtagggtggctgtagttaacagtaatttagtctatattttcagatagctagaagaggattatgaatgttcccaatacagaaaaataagtttgaattgataaatatgctaattaccctaattcaatcattacatatttgtataaagttatcagaataccatactgtaccccacaaatgtgtacaattatgtttcaattaaaaacaataaaaaccaaccaaaaattcacatcaacatattttctgtattttatcatggttttctatgtactttggccctaaaaatggtatactgaataatggcattatgtaggcaaatatcttggaataatgaaattcttatacattgcctgtgaagaatttctgcagttgtaaatagctgcttaggtatttctgggagccacagaattgtgaagggctgaacatggatgaacacaaatccagtcaccaggatttgaatttccaaagttagagcttaacaaatatactattacctggtttaggtactgttatagttggtttgtgatcaagtaggcaagctagtcattagccccccgctttttttccccca

SEQ ID NO: 2480 - DNA, 6000 bp, Homo sapiens
cagcccctttcaacctcaagattcttcaatttgaggctacgtttaatttttgccttttctctccttgattgttggataaagccaaggcctggctacagaagtagagagcctccaaaagctgaagtgctgaggactcttttaactgagtttgtcccatcctgtttaggtagaaagtgctcaatttttgtaaagttgatgcgagttgttattgactaaacagcagggaatcactctaaggctctctgaaatgtatcccaacaaacaaaaattattttatttttatatatgtcacatcacccaagatttctcaccaaggttagtgtgttctttgcatggctggcacaaaaccctcaatgttttaccttaaggcctacagagttcttcacaaggaaagatagaagggatgggtaaagccaagctatcactataaatgtcatgaagctaaattcagtggccttttcagctgatgcagcttatttttattttattttgactcatgacagtaggtggtcaatcaatgcataataataatgtacctctaagtctccatatgctgtcaaacctggatgtgggttctggtaattagcttagcaattgatagcacttgttgtagaaagaatagggaaagaaagacaaatgacacaccaagaaatggatgtgctcacgtagcctaggtgttgttaagcgcaacacataagtctaccccttggaggatactatgtatggaagatttgagttagaagtttgcactgcccagacagggatccaagaagctttgcttggatgaccattttccccaccccaagaaagccatctcaaaatgaagctgactcccaccattccaatcccaccttccgaacttttctgtgaatcacccctcctttagggatgcctttaggggttacacgctctcttccgtgaataatggggaagagcggccacaagagggcgcgttccaaagacttttgctccttgtcagtgtatccagggaaaggcagttgcgcgtactggaagcccctgtctgtagcgccctaatcttggtgattatcagttaccgcctgctccctctcatcctgcagaaaaagttaggaatttatgagatgggagaagcatgactacctgtaatacattaaatgagacagaaggaaaggaaatggaaattctagtgatacatgtgaacattccggagctctatggaaggcagacgagtgataaatttcaaaagcaaacaaagcggagcagggagaaatgtgactatgaatcatcagcgatactgatttgctcacaagtctctccctaatacggtctcccgggtcgtaacaaaaacatcttccatctcccctgattttgttgcctagttttcctgccttatcaacagtttccaccagcgacaaatgacaagtgacttcaaacagggaggaaaaaggttctttctgtaatgccttgtgggaacatggtgttcggcttctgaggatgcgtttgtttccgaactgagggtgtggagagaaatggtgggaaagatgggaaaagagattaatagtggtctgcggcctgtgcagtggatggactgggctgggggtggtggagatgccagggtggaaagtccgttgtaatatttaaagaactgcagtaataccttcccaggcacttttcttgaaaacacatatttgtcttggcccctcttctgctaaaaaatacttgcacgtgatctcctagctgtagttctgaattcttcgtactcgactggttcctaagtccaaaatgagaagtgccaaagttctcaggaactttggaagaagtctctgaaattttgtgggttaaaccttaagaatttttgctacttgtaggaacctaaaacccctttctcccaaaatatttaacctttttcatcaccactttaatggaagaggcatggatgatggacgtttgtgccagggcatttataaatcaataatggaccctaaggagggaaattaaagctaaaaaattaatcaagataatttatggccaaacctatagttctactgcaggaaagatcctctactgtaggtcaaaggaggaataaccttaagacctcacttgctgctttctgcagaaacccctggaagcagtccaaatgcaaagttagggcttcagagaatgcaccctgtaaatggtagttgtgtatacccttaccattgactataccatatctaggcacagtgaaatcttgatgaagaatggaaaattaaaggaacagacgctttttacagggaggcttcccccagcccccatcccatggtaagtttaaatgtgttctataaacaacgaggctttccacattcacattagagacataactattgcccatatgtaaaagagcaacatattttaagcaggaccctggtgaggaaaacaaaaccaaatcgaaacactgcatgtgtgtgttgcttatttaactgaaaatgttcatagacccacaaatctgagatgctggacttttggatgagtccagcattttgcatcttagtgtagggggagggaacaacaaggggcttagttgcttaacccttgccatgccttcatgattgacttattcaaaacatttttaaaattctgaaagcaaaggaaaatgtgctgcaaacacccttccagctatctttccttccagcttacacagtctctcctctgtccaatccttcccacccagcagcatttcagaggtattccctgtgaggtacaaaatttctctttgcccatttttctgcacctctttttctctctctttggtatgtgtccaccaagctcatagaggtttaagtgatgaaatattatcacccacatgggtttgcgtgggactttcttagtgaattactcaggcagagcaggctgtgatacagccttgctcacaagcctcgggagggaaaaaatagcacagaggatgaaaagaatattattagagagcaggtaatgaaaggttcgcaaagcaaccagctatatctggttagctaggtaatagtgcaggaacctaggtcgcacctgtacaaactaatgcagaacctgctcacggcgcactatgggaagacattcatttcaagagtttacagcatgagatatttgagtaaaacctgaaactgattagaaattgatcctgaacatcccagccttagtcaaccttccctttttcaaattgttatgcatggagattggaggattggggcatcttgaaagtgtcactgcagtatagcaatctctctcaggtaatatagagataaagggaatataataaattgacctgttatttattatctttttcatacctaggacattccgaggcttaatatatttctgaagcctacagccctgataaacatcaatcccacgtcagtttccagcagtctcatctccccacacccttctgcaatgaaagctaatgtaaaagaaagaaatatgcactgcttaataagtcagaatacaatagaacttgtaaaatgtacctgcatataaggtagacattaggaagacttgaatctctctcttccccctgttctcctgagcattatggcaacagcattttcatgaaattagatctgttttatattttttcctgataaaatatcatgcaatatacaaatagcagttccagaaatggacaccaggagaaggaggcgacaggcatgtcaattagtagggggaaaatccaaatgtcagaaatatgggggagagagaaagcacgcaggcagtggatgcaaatacagggaacagagtctttcaattcagataattaaacggatgcataaatcagcacccttgcctctctacaatacgcaggcgatgccatgcagttaattatcagccaagaccagcatgaaagtcattttatgatgactctctgatcctaatataacagcacctgacagattgagccccctctaatgagtactctctttgtacaatcctctctcaggaacactaaatcatttgcttccaagtacagctgcctgtgaagaaggggtggggctagatcatgcatcagaaacctgctcttgtgaaatcaggggctgtcctgtaggctgtgtgactggaagccagcagcctcagcctctctggccctaaaaaagcaatttgcacacggctgtccctaattctagtcagccaagtaaccctccctcggcacccccacctaaacatctgtagtcagccttgggtgttattcatggaaagtccactgcatgcgggtcagcactgctgtccatcggcttcaccctgaccccttctggcaggtgtggatgagagtagagcagagctcatggggatgagttaccccaaacctattaagcctccctatccggggcactagtcagacactccagttttacactctttcctagaaaaacaaaacccaaccttgtgccctctgggttctctaatttagcagctactatctgtctgtttttggagtgacaccctgtgcagtttaggatttcagaagctgtcctgcatagaggcagaagggaaaacagcaggtatcttgttaacattctctatggggcaaggcagatgtgcccaagctggaggaaacctgcacaccctccaggctagttatccaaggcttgggaggtttccctcggccttctcctaaggccttggcaggaccctgccaccctaaaatcaactgctgattgcctttttagatttaaatgattaagctctgcttatgggaatcttcttctcttttattttgttaagaaacaaacaacaacaacaaaacccacaccaattcttagcaaaggggaatatcgaattcagattttgaaaaaataagtcatcatgcttcctaaaataagacagcttctccctctaactgctctctctgctctggtattctatctaatcataaacccagctttattattcatttcaactcctgccaaagacatgaggtcggagtcagaggaactccccttaccaccgccaccatcatcatggccagcatcctcgtaagtttatagaaagatgccagagaacctttcctatccatctgcagccctgcttggcccttgcctcagtgaatttaccactatcataatcacagtgtgcagagtgtgttaaattaagaacagaatccacagtacgcaatgcacagaaaagcctgccttctgctgcagagaacttgaaactgtgcctaaaatttatagtaccgtaaacatctcagggcctcgagtgataagtatggctggatttccgttaactatagaaatccaggcagggagatcctcccagggagttgcaagttctaagatgaacttcttgaagattgttcccagatttgtgcatgggatacatgtacagcagacagttgtaaggaggtccacggtcatggaaaagaggatatgtttctatatgccaccaagtgggaaaaatggaagtgagggaaaatatttgattaatcaaaaaattttagtttggatacctgctttcatagtaattgttgctgtgtcattaaacatacagttgcttaggaaaagagaaggaaataggtgactttctaattttagagttaggctggaactgagtggttgctaaattcaactgccctgacaatgtggggatttcctgtccattagcagcgattgctatttgacatatgtttctggtgcccattaatctgccctgtaatgggtcagaggcaaaaatgggggattcagaggtactaggtggctctcttaatttaatagaactcaatgctaaggacgcctctatttgttaataagtaatcaagtcattggctactttctgctaaacactagactatgatagtgaccttagaccccgggcattctaaaccaggctggcaggagggtggtggtggaggtgatgtgaggtaagcctcctagaggaactgtcatccaaacaatctgaaaattgaaacattattaaaggcagcactaagggtggtatgttggagttggggcaggagcacttaaggcagaaggaacagcaggtgtcactgcctgcagt

SEQ ID NO: 2481 - DNA, 6000 bp, Homo sapiens
tagcaaaacactgttttatctctttggatattgattgtatgtcattcccctaaggtattaaacaaataaaatcaagctacatcatatttgtttgctctaggagaaaggcatggttatcctacgtttgtgaattttacttcagggaattctctattgcatggatttatctgatactgaattgctaaaatgaacaactcaatcctttattcatttactcttttgcatgagtctcttgtctcctaacaacttgggtgtgggccagcccatctcattttgttgctggtcaccaagattctgctttaggtcagaacaaaaagccagcaggaaaatgtattgagaccatacgtgaaagttggttggaacaacgaggttgcccaagaggaacattgtatctgtagtctccagtaatcagaaaacataagatgcaaaaggaagcagaatcacttgaattattagtattttgtagagctgcaatttttttttttttttggtttccaaggcctcttggagatggatagggagaaggttgagtgaaactttacaattataatatgaaatcagggtatctcaactgcagaacaatgaacactgtaggccaggtaatttcttgttgttgggggctgtcctgtgcatggtaggatattcagcagcatccctgggccctacccactaatgatcagtagaacctccctcccagctgtaacaaccaaaatgtcttcaaacatggccagatgttccccggggagcaaaatcgccccggttgagaaccactgctgtagaatgaagagtaataggttacttactgggttttcttcctccttctcttttccctaattgttttagttctagtatctgggttcccttggttcagaaagcagcatttccaaataatctaaaaacagagtgctcttacatagcagaaggccttgtgggatattctggtggttctgaaagaaatgtgaagcttacgagtcaagtttcagattaaccatttctgaccctgttgttctcaatgaatttcaggggactttttaatgctttcctctctctctctgtttcgatctattcattcattgatttaacttaaaagcaaaacagcttcccagttcaattttgaacgtgaaacgctgattctcctttgtcccaaatctttctacctaacattcagcccaagctatgtacaggctgcggctgtccaggaaacaggcagggtttgccaatcccatgttcgatttaaaccatttgatgagacccttcatcacagactctcgcagtctccctgcagcaaatagtactctggatcctgcccacgttctctggattctgagctgcctctggagggagtcacccctcaccaacaaggccaggttttccggcctgagccccagaataacacatcagctgctgggaacacctcgagtccttttgatttctctccatagtcacgttttatgttcggtttcccagacgggatgaaccagaaatcatgcttttttggaaacagattttttcataggaaggaaagaaaacaccgtgactcgtcagcactcttgtccgtgcctctgaacccccagccttgtgtcatttcagctgaatcagagaacaacatcccagtcacctgcttggggcgttcgcgtctcctggcttgtatttttgactgaataacagcaatccgtgagcagcagctaaaataatagagccctgaaaaatgccccaacccccactcccttttctggtcctgtctccttgctccaggagtagtgaggaaagagaccagttaatagcgtggatgaaagctgaaggacagacggtttgagaagaaaagtgaacattcttgcttcctcatctatgccaactttgaacagggacagctgctgccacaggtaaacaccactatagggttggccgtggccctaagctaggtgtcaccgtaagccacgggccagcacacgaacgctggcctctcccccattcgcacaattgagctcttatccttaaacgaactttgttttttgaccagctcactaattgtgattgaaaacaccagctccccagcaatgcacacgcattggagttagcagcagcaagacaggccctaattgctccatttacataaaagtagaaacatacaacttctaaatataaatctctggcacatcgttccttttgcaattacagtaaaataaggtaccacagtttccctcccggctccttctcgcagcaagctgctccaccgggttcgctagtggctgctcctcgaggcgagaacagagccatgcaaatgctccagcgtggagttgggtttgtgaagtcgccagtaaatcaggccgcctccactaggtgaataacgcggtggcagcgggccactttgctagtgcagtcgctggaggaccgcgctccgcactcagaagggggcagttggctggtgcgcgagcgctcccggctcgcctctgtccgcggggagccagccggcccctccgcaggtcccgctccctgacatttgctgtggtttcactccctggcactgagggctgggttcagagattcccagctgcactcactgaacagtgatttttttcccctccctgaattctttagctgccaaaaggggggaaaaaatcaagagctgctcttaaaagaagttgcccttgctggtgctcagggtaaaaatagaggctgccgcttagaccggcttggccctggctccaggcatcctgcgagctgggctcgagcagcggccgcgttccggcgtgatccctggaagctgccagcaggtgctgctcaaggtacagtagcagggccgagaagccgggacccgaagggcctggggtgcggggaagctccgggggagggggaagtgaaagagaaaccaaaccaaggaaggagaaggagattctggtcaggactgggctgaccagcttgtgccccgggcccttgagttccgcagggaaaagctgattcccagtctagaatattccacagaagctattttaacctgcctgcttcctccaccacccccaccttgatttgcaccgagggaggaggcattgccactgtggtgcaggtggttgcagaggggttgcagcacggctggtaggctggcctggcaggtgggcactcggtggcatcagatggccagcggagtttcagagtcacacttgtgttgtggctcctctggtcagagagctgcagattcctgtgacacccatgtttaagaacagccaccaggcttctcagaaatagtatcacttattattatctgacagctgcacttgacccccacaggttcatatcatggatcccattttatagatgggaacactgaggcctgagtttacacggtgagtgagcagaggaactgggatctgatctgggtttgttttgtgccccccacccccaccccacgtcacctacacacacacacacacacacacacacacacacacacacacacacactactttgtgtggaggcggaggggatgttttcaggacactagggttcatgtgtgggtcaggggtgagtttagatgccctgaaggtcattgactccactaattctcagcaaaaagggtggagaagtttctttcttataaagggtttgagttcacccagtgctaagctgaggggcaggtttggagttcaccatcattaatcctatttctgtcttcgccactcagattcactctcttcctctacaacctaatgatttttttcctacttcatttctgcatatgcagttcttagaatactccttccccccacccccatgcagctcagcacccacactttctctgtatctagccaagagagacccttttacacagaaaacttctggtgtcctaatggaacctgcttaagccacacatcaggaggccagagcctctatattttgcttgtgggcacagtgaaaagtttattttatgcatgttaaatcctgcatacaaaacaacatatctggtcatatggctctcattagctcccaattttgcacattttatccaacttgtcatgagaactgggcttatgcttcaactgtagtccttcaaacaacccttcaccgttcttgtcagaggaccccttcctcctgtgttatttaccagacttgccaacacccctcccccacaaaaaaagcctgaccagctttacccctatttcaaggagtgttcacttcttttcattaatctgctgttatatttgtaacaatttagaaattataggagttgaagttctggtaaaaaagaatgatgcatgagggtttttgttgttgttgttgttgtgtgtgtgtgtgtgtgtgtgtgtgtttggttagttagaatgagattctaaagacctgggaaggatacttatgaagttcatttaaagagaattactatttccaaagttcttgatttatgaagcaggcattcaatttcaagatgtaaaataatagtgtaagttggttggggtcgggggagaccatcatcatatgattatacagattttcccaatttttttcctcaatgaaatagcttattttaaaaatataaaattagaatccctataaagaacactaccaattttctttcctgaaagaaacaataaaatactttgtaaatagaagcaacttcatgaagtaacagatgttttatgtaaagacataaaactgaacctgaatataacgagacgtgtgtgcgagtagtaaaagttgaaagttggacacactcattgagacatatctatttgattccaatgtttttctaaaaggtagagtaatcctagccagaggtttcactggctcagtgcatcacccagtagtgtctcagaagccaggaagggctttccattagataatgaattatgaaatgtctcacactggaaaaaccagtcatccgctgatgtcatgctgattccaaccaatcccaaacaaagccccagccctcctctgtttcagtggtaccaatgtgtggtgtacaaataagtagtacagtataaaacttcacagtgccaataccatgaagaggagctcagacagctcttaccacatgatacaagagccggctggtggaagagtggggaccagaaaggtaatgctttttaactcttacttctgagctctttacacattcaaagataggaaagctaggaggaattttacaactaattggcatttccaatgtgcattgtgatgtgtacctttttatattattcaggcaggttaatacagcttttaatagtcctagagcatgcaaatagattatatgtttatacaagccactcagcacatatatacaagtacatatgccaaagagaaagctatttttaagagttacattcgcaaacagtaaattcagggaacacacacatactcagatgcagagagaatccaaatattgataagttgcacttatctaaatgctgctattaggactcctgagttgtttagagccattaaacttttggttgtatttcagactttcttgtaaaacttaattgaactgcaaaacattttgggtactgtatatgtgactccaaataggtggatgatgttaagtattatagcacaaagattttttataaaaccattgtaacacaaatgtcccctgcctcccccattctctttcaccatccccgtaaaaaatatgaggctttttaggcaatgttgacaaagttttaacaataatggtggagtaattgatgtttctggagctgaaaccccaaaggtgttaggttacttgtaacagaaaaagtcttacaaatagttgttttggaaaaggggacagtatatataattcagaaagcattgttaacctgtgcaaactgtaattataacttagtgtcacaattttcttgccctcttccccttgcactcagatcttatcttgtagtaatgatatttattaactctttccacctaaactgcattgcttgactgtaatgctatgaacacactaggtgtcagatataagctgagtgtatcttcagaaaccaagagggcttatgtgtgggaaagaaaccgaga

SEQ ID NO: 2482 - DNA, 6000 bp, Homo sapiens
tacaaatgatattatctttataaaatgccttaatgaaaacctaaagaaaaaagttacaagggttttagaagctctatgcagagaccacatatatatttcttaagtcacaggtggcttttagtatactcagtgttgtgcaaccatccctattatccaattccaggacacttttaccatctcaaaaagaaacctcaaacccatcagaagtcactccctattctccccacctcaacatcacataggtgactctatcaattcacctactctggacattgcaaatataaatggaactatacaatatgtggcctcatgtgtctaacttctttcccttagcatgttttcaaggttctttcctcaacaaaactccattagtttgtctaaagcttttcttttaacagatctataaatctgttgtaatattgtcttttgacagacaacttgtgaaggatttggagtagaatttgtgataaatacatggaatcttaattaactgttaacagaaaaatcaaactctgtaaattacttaaagaggtttattcagggccaatgagtgaccacagccccaggaaaatacaaacccaaaaagccttaagtgttcccgaggcagtcagattatagtttggttttatacatttcagggagccaggggttacaggcaaagacataaatcaatgtgtggaaggtatacactggtttggctccaaaagacaggatgtcttgatgtggggggtttacaagttatatgtggactcaaatacatagatatatacacgatatatgattgattgatagatagatagatagatctcttggtaggggtagatagggtctccctatgttgcccaggctagtcttgaactcttggcctcaagtgatcctcccacctcagccagcttgaccaagagattttttaatttgcaactggttaaaagagtgaggctctgtgtaaaatttggagtcagcagaaaagaatgtttaagatagtatgccagaatcagccacaatacactgggtcaaaaaagacctcttcagcaagattgatggtctgcaagcttgacttaacccttgccttgcacggccttaggtcttgtttataatttggtatcttactaccacaaagtctgttagtcttatgatctctactttaacaaggggtgttcaacctccctttccagaatggctgggaactcagtttttaaggtttctctggggtctccttggctaagaggaggtccgttcagtgcttggggggcttacaattttatttttagtttacaaacacaaacaaacgtaattatttatttttatgttttttgttttgttttttgcgacagagtcttgctctgtcaaccaggctgagtgcagtggcaagatcgctgctcactgcaacctccacctcccggattcaagcgattctcatgcctcagcctccctagtagctgggactacaggtgcgccctaccacgcccggctaatttttttgtatttttagtagagacggggtttcgccatgttggccaagctggtctcgaactcctgaactcaagtgatccgcccaccgaggcctgggattacaggcgtgagccaccgtgcgtagccaagtaattattaactccacagaaaataaaaggctgtgcaggaagtaaaaattaatcaagtccatatatagacctcagatacatttcgtttgggctatcctgcactttactttgtaattaaacaccactatttaaaaatcaggaaaattgcacataaaaatccagctgcaagtgggcgctctggagttccccagtctccactcactcgtcctcccagcccccacaggcctcaacgtcgcctatcccactccaccagcccagtcttccaccgccctaggaactctcctacgcctacgcaagcagggagggatagggtgacagcaccgacaacaaagggtcgtctcccgcactccgtatgaggatggcgtactggtcggggggcaaccgaagcctttcttcctaggttctttatcttttctaagtttcccatgacctatcgctccgcttgagccctcagcaaagatgtcacccgccgaaaggtgtggccggaagctggaggcgtggcttccggacgtgcggggcgaggctcgtctcgtttccgccggcgctccgagtgacgtagggaagcgcgccgcgcacctcatggttccggggacagttagggcggcggatggaggtcagcggtggtgctcgctgcgtaggtcttgtggcacggggagaaggggcggctgatcgtgggtttcgagtgcacaacacaggcgtggctgggaaggtcctgggatgcggtggaactggggagcaggctgggacgcggtgggatgccgtgggcctggccgtctgctcgttccgtgctggcttgccagtgcgcacgcttcctctctagcccgcgcggccaggcctggaagacgccgcccctgttgaccgtccatgaccccagcgagccagttttcgtgacttagtgcaagttgttttctctctgcattttagaactaaagttttggattgctgtttgcctaaactcaagtctggctcctgggcttccgtttactcggctaaactgctcttagggctcttaaaaaattggaaaggcggccgggcgcggtggctcactccggtaatcccagcactttgggaggccgagacgggtggatcacttgaggtcatggtgaaaccctgtctctactaaaaatacaaaaattagccaggtgtggtggcgcgggcctgtagtcccagctatttgggaggctgaggcaggagaatcgcttgaatccgggaggctgaggttgcagtgactcgagatcgcagcattgcactccagtctgggcgacagagcgagactccgtctcaaaaaaataagtcggaaagatttctacactgtgcttaggctcaggaagtggtagatgttgcgtttgggcaaatactccgactctctgatctctctctctttttttttttctttaagtggagttagactaagctttttacagctgctttaatcccctcatataaaaagaaaatgtgctggccatataccaagttccaggaagtggagaaagatcaaacgtacattctgctttggcagaaatgaggcctaggtgaacgttttatcttgcccttgtcgcatgtcttccctggatcatgtaatcaccgtagggagctagactagctgatagaattttttttctttttttttttttttgtgacagagtctcgctctgccacccaggctggagtgcagtggcgcgatctcggctcacttcaagctctgcctcaccctccctagtagctgggactacaggtgcccgccaccacgcccggctaatttttttgtatttttagtagagacggtgtttcaccgtgttagccaggatggtctcgatctcctgacctcgtgatctgcccgcctcagcctcccaaagtactgggattacaggcgtgagccactgcgcctggccgatagaattgttaaaagcaacatcaaggctatatgtaacacattgctggagatggcaacattgagtttggccttggaaggatgagatgtattttaaagggtcttatagggggaggaggagacccagataacaagccctgtaaggtgaagtggaagtgcaaggcctgtttaaaatggggccttgtgttgctgggaggcagaaaaagctaagactgagaaaatcattctgggccatgttatgaagtgcttcttattattggttcagaatttttgctgttagaaatttggtgggggggttttagtaggctagtgatgtaatctaccttggtttcgagaggctcacacctatgtctacagtgttaaaatatatccacagaggctttgggaatgtgaatttttttttttttttttttttgagatggagtctctcacccaggctggagtccagtggtgcaatctcagctcactgcaatctccgcctctcaggttcaagcaattcttgtgccttagcctcccaagtagctgggattacaggcgtgcaccatgatgcccagctaatttttatatttttagtaaagatggggtttcaccatgttggccaggctggtctcaaactcctgacctcaagtgatccacccgcctaggcctcccaaagtgctgggattacaggcgtgagccaccacgcctggccaagcccgtaatttttaatcctggttacccttgaaataaaaaaataaaaaaaaattaatgctgtctaggtcgtgtctgcagagatgccatcatttaggaggccttgggcaggacctgggaatctgaattattgaaccacatcctaggtgatttcaaattacaagcaggatggaaaccctcccacccaggctgtaatgttcctgagttttgatatttgatggcattctgtactgaaacaaaaatcctgtgagacttttgctttagaaaatactatcacatacctatggattgtcaagaaagacttagtctgattttacagatagagtggctttgactatttcatttctcaagtttgtgagtcaggaactgcccctgtagtagccccttctctctcctttttctcttcagggtttggaatcacttgctaggagtcttgtctctctgccacccaggacatcatggcagctcacctggtaaagcgatgcacgtgcctcctgagagaagctgctcgtcaggcccctgccatggctccagttggccgactgagacttgcctgggtagcccataagactctgacttcctcagccacctcacccatttcccacctcccaggttccttgatggagccggtggagaaggaacgagcatctactccctacatagagaagcaggtggaccacctcatcaagaaggccacaaggccagaggagctcctggagctacttggtggcagtcacgacttggacagcaatcaagcagcaatggtacttatccggctctctcacttgctgtctgagaagccagaagataaaggcttgctcatacaggatgcccactttcatcaacttctctgtctgctcaacagtcaggtgggtgccggagtgtggtctgagagcatagacaagaggaaaacagccagaaatgctggggtccacagcagccagtgcttaccaagcatagacaggggccttgcatctcttgtgatattttttatttttttataaatttcaaagtgctttatcgtgctttctctttgtttatccttacaagaggcctgttaggtaaatattgctatgctcgtcttacagacagccaagacgcatagtgatagaagcatgggaagtgagcctggttcttctcagttctttgggtgctttccccctcaccatatagtcttgacttgtattgctctctgccagtgtctggctgatggcaaggcactgtttttgaagccaaaggagatgcagcatgactgatggaaggtccttgaaacttgagacagacgtgggcatgatctagccatgttcagaccctccaaggatgaccatggagagaagcaacaagacccatttgtgtggcactgagcagggcagaactcagactacagaagccagttcctgctcactgtgagggactcccttcttagagagtcttcccctgggctccatgtacaaaaaaaggagtacagactcctgctgtggctgaactggccctaaatccctggtctgctttggaagggaagtgctggggcactgaaaccatgtttccagttgtcaggtgtaatgaagagaaaggcactatccaaggaaggagttgcactaactgagtgcttttcaaactgcaggttataaaatcagtgtagtgggatgtggccagctgattcttaatgaggtagagtagtataaaaaataccagaattcatcacatatagtaaggggattcactaatgtctcatggaacttttgttctagttaaggatgtatatatatgcctgtgttgtgtggactggggttacagtacataattatttcttgctgg

SEQ ID NO: 2483 - DNA, 6000 bp, Homo sapiens
agccaagtttccagatgccagtcagaaggcagcctcaggtgctgtatcagcttctgcactccagagctcatatcaactgtggtttgattccaactggagggaaggtgaatagacaggagcagacagaaacagggtggtcaagcatcccagtttgcctgggacttgaggcgaggaagggtaggggagcttcccaagacatgagactttctatgctaaaaccagcatggcaagtggagaagtttcaacatgtgttttggaggggtcaagtattcaaaccacaacagacgctaactacttagagttagcacagacctcacaggttaagggctcagtcccacaacactgccctcacttcaggtgccagtcacaagtagtgggtcccagactatccacacttctgtttgacttggctacaaagcaaggtttcccatgacctgctcttcaggtttagtaatttgctataagagctcacagaagtcagagaaacattttatctactgccttattccatctgggctgctggaacaaaataccatagactgagtaatttataaaccctagaaatgtattgctcacagttctggagattgggaagtccaagatcaagacaccagcagcttcagtgtctggtaagggctctctccctcatagaaggtaacttcttactgtgtcctcacatggcagaaggagaaagggacaaacatgctccctcgggcctcttttataagggcactaattccattcacgagggctccatcctcttgacctaattacctcccaaaggccccacctcttaatatcaacactttgcagattagacttgaacatacacatttcggagggacacaatcagatcataacatctatgtttactagtttattacaaagcatattttaaaggatacagatgaacatctagattaaaagggtcttaggggccaggcacggtggctcacacctgtaatcccagcactttgggaggccgaggcgggcggatcacgagatgaggagatcaagaccatcctggctaccacggtgaaaccctgtctctactaaaaatacaaaaaattagccgggcatggtggcgtgtgcctatagtcccagctactcgggaggctgaggcaggagaacggcatgaacccaggaagcggagcttgcagtgagccgagatagcgccactgcactccagcctgggcgacagagcgaatctccatctcaaaaaaaaaaaaaaaaaaagtcttagggccaggttccaaaggaaactgttcctctaatcacaacacttctggaagaatctcaagcatcagagcttctgttcccatggggtttgggaggtgacaccttcccagcatgtggatgcattcaccaacttggaagctctctgaaccccattgtttaataagtttttatgaagtttcattacctaggtataattgataaaatcattggccattagtaatgacagtcaaaagaaatgtttttatatgaggaatatgagcttcctctaaattatcaggcccaaaaaaaggcatgagaaagagacagcagtcacatctcacttcctccctcttgctgaataatcatcttttgaagctgcttgctatgtggactctagactgactgccccccaagtagctataaattaacctaacaatactgcatgctgcacaacataactcataccctatcattcaacaatgtatagccatcactaatcaatgttatttctgtaaaccaatgagaattcctgacaaacaactttttatctgccccatgcctagtccccttttttacctttaaaaacctgcttgtaacaaaggcttaatgaagctcatatcccaggttacttgcatgtgagtcttctgggcagctgtcttcattttggttcaaatgtaaactctccacttttattaattttgcctccgtttcttcttttagataaactgtaatcaaatcaatctccagcctctctcctctctctggaggttgagaggtggggctaaaagtttcagccctctaatcacatggttggtttctctgataaccagctcccatcttccaaaagccacttcattagtggcataaactcaggtatggttaaaaggggcttatgatgaataacaaaagatgtcactatcattcaagaagttacaagtgttttacaaatgcccatcaatgatagcctggataaagaaaatgtggtacatatacaccatggactactatgcaaccataaaaaggaatgagatcatgtcctttgcagggacacagatggcgctgaaagccattatccttggcaaactaacacaggaacagaaaaccaaacactgcatgttctcacttataggtgggagctgaacaatgagaacacatggacacagggaggggtacaacacacactggggtctgtccatgggacagggggaagggagagcaccaggataagtagccaatgcatgcagggcttaatacctaggtgatgagttgataggtgcagcaaaccaccacggcacacgtttacctatataacaaacctgcacgtcctgcacatgtatcctggaactttaaattaaattaaaatacacatacacaaatgaaaaacatcaggatagcaattagctggggtggagggataagaaagaagaggaaactctcagaaaattgcaacaatattggtaatattctatttcttaagtggagtaatgggttcacgggtttcttttcataattctgctttgtaacttgagcatatttaaatttatatatacactatatatattatgtatatgtagcaaacattttataaatacaaatgatattatctttataaaatgccttaatgaaaacctaaagaaaaaagttacaagggttttagaagctctatgcagagaccacatatatatttcttaagtcacaggtggcttttagtatactcagtgttgtgcaaccatccctattatccaattccaggacacttttaccatctcaaaaagaaacctcaaacccatcagaagtcactccctattctccccacctcaacatcacataggtgactctatcaattcacctactctggacattgcaaatataaatggaactatacaatatgtggcctcatgtgtctaacttctttcccttagcatgttttcaaggttctttcctcaacaaaactccattagtttgtctaaagcttttcttttaacagatctataaatctgttgtaatattgtcttttgacagacaacttgtgaaggatttggagtagaatttgtgataaatacatggaatcttaattaactgttaacagaaaaatcaaactctgtaaattacttaaagaggtttattcagggccaatgagtgaccacagccccaggaaaatacaaacccaaaaagccttaagtgttcccgaggcagtcagattatagtttggttttatacatttcagggagccaggggttacaggcaaagacataaatcaatgtgtggaaggtatacactggtttggctccaaaagacaggatgtcttgatgtggggggtttacaagttatatgtggactcaaatacatagatatatacacgatatatgattgattgatagatagatagatagatctcttggtaggggtagatagggtctccctatgttgcccaggctagtcttgaactcttggcctcaagtgatcctcccacctcagccagcttgaccaagagattttttaatttgcaactggttaaaagagtgaggctctgtgtaaaatttggagtcagcagaaaagaatgtttaagatagtatgccagaatcagccacaatacactgggtcaaaaaagacctcttcagcaagattgatggtctgcaagcttgacttaacccttgccttgcacggccttaggtcttgtttataatttggtatcttactaccacaaagtctgttagtcttatgatctctactttaacaaggggtgttcaacctccctttccagaatggctgggaactcagtttttaaggtttctctggggtctccttggctaagaggaggtccgttcagtgcttggggggcttacaattttatttttagtttacaaacacaaacaaacgtaattatttatttttatgttttttgttttgttttttgcgacagagtcttgctctgtcaaccaggctgagtgcagtggcaagatcgctgctcactgcaacctccacctcccggattcaagcgattctcatgcctcagcctccctagtagctgggactacaggtgcgccctaccacgcccggctaatttttttgtatttttagtagagacggggtttcgccatgttggccaagctggtctcgaactcctgaactcaagtgatccgcccaccgaggcctgggattacaggcgtgagccaccgtgcgtagccaagtaattattaactccacagaaaataaaaggctgtgcaggaagtaaaaattaatcaagtccatatatagacctcagatacatttcgtttgggctatcctgcactttactttgtaattaaacaccactatttaaaaatcaggaaaattgcacataaaaatccagctgcaagtgggcgctctggagttccccagtctccactcactcgtcctcccagcccccacaggcctcaacgtcgcctatcccactccaccagcccagtcttccaccgccctaggaactctcctacgcctacgcaagcagggagggatagggtgacagcaccgacaacaaagggtcgtctcccgcactccgtatgaggatggcgtactggtcggggggcaaccgaagcctttcttcctaggttctttatcttttctaagtttcccatgacctatcgctccgcttgagccctcagcaaagatgtcacccgccgaaaggtgtggccggaagctggaggcgtggcttccggacgtgcggggcgaggctcgtctcgtttccgccggcgctccgagtgacgtagggaagcgcgccgcgcacctcatggttccggggacagttagggcggcggatggaggtcagcggtggtgctcgctgcgtaggtcttgtggcacggggagaaggggcggctgatcgtgggtttcgagtgcacaacacaggcgtggctgggaaggtcctgggatgcggtggaactggggagcaggctgggacgcggtgggatgccgtgggcctggccgtctgctcgttccgtgctggcttgccagtgcgcacgcttcctctctagcccgcgcggccaggcctggaagacgccgcccctgttgaccgtccatgaccccagcgagccagttttcgtgacttagtgcaagttgttttctctctgcattttagaactaaagttttggattgctgtttgcctaaactcaagtctggctcctgggcttccgtttactcggctaaactgctcttagggctcttaaaaaattggaaaggcggccgggcgcggtggctcactccggtaatcccagcactttgggaggccgagacgggtggatcacttgaggtcatggtgaaaccctgtctctactaaaaatacaaaaattagccaggtgtggtggcgcgggcctgtagtcccagctatttgggaggctgaggcaggagaatcgcttgaatccgggaggctgaggttgcagtgactcgagatcgcagcattgcactccagtctgggcgacagagcgagactccgtctcaaaaaaataagtcggaaagatttctacactgtgcttaggctcaggaagtggtagatgttgcgtttgggcaaatactccgactctctgatctctctctctttttttttttctttaagtggagttagactaagctttttacagctgctttaatcccctcatataaaaagaaaatgtgctggccatataccaagttccaggaagtggagaaagatcaaacgtacattctgctttggcagaaatgaggcctaggtgaacgttttatcttgcccttgtcgcatgtcttccctggatcatgtaatcaccgtaggg

SEQ ID NO: 2484 - DNA, 6000 bp, Homo sapiens
tctgactgagctcagctgttccctgctgagtgtagacgtgattctgccattgctggcccttctattatgacagccaacacagtcatagttttggattaaggtagtttgagtttgcgttggggttttctgtcactttttgactggaagagtcctaaacagatatacatgccatggtttctagttgccatctgcaagggaattaaagaccccttcatttgtccccacatgctccaagaggaaatactcaggggggctgggtcccacactgtgtcttgcatcagatgaagtcaggagttgggagctgcccctatgaaggggagagttggggaggaggctgcatcttagggtctgatctgtctgggctgagccccactgatgtcagctggtttccagtgtttcactgttttgagcctgttgtgtgaatcatttgattacctagaaattgctgtgacaaaattaactttactgactatcctatagacacaaatcagcaacctctttcctaaacagcctcatttccacaagtggctcagagtcaatcgactatatagaggctgctctctcttttacaaattcacaagggaaatttgtcccaaaagacaaagcatgagtggagtacgatacacactcatctggaagccaaacgtctgaccaaagtcagtggaaatcaatgagctctcccaggacagaagctggttagctggcttccctggctgtcatggctgctgtccagatgcctaaatggatatattttgctctaagagtttgaatggcactcacccacttctgtctacccagaacactgaattgttagaggaaaaattgttgacagggctggttgctctgctttatactttgtgtgtataaagtgtaggctctgtgtgcatgcgggcctctcttccgaccataaccctgggggccaggtgctaagttcccaaactacagaagaggagaagcacagagaggttgagtaacttgctaaaagtcacagctgggaggggtggtgttgacatgttagcccaacaacccacctcaggggtccacactcttttagccatgatatcatgtagtttcccctgtggtggctatgaactgggtcagatgggctgaggctccaggatgggcccaccctgcaccacccccatgatctgggcaattcatttagtttctacaaagaccaggaccttcaacagttatggggctccaatgcaaaggtagactagagagatttgtaaatggtgaaaagccacacccagtggtgttattgtagcaagaagcactgcacagaaaaccaaataccacatgttcttacttataggtgggagctaaacattgaatatacatggacaaaaggatgagaaccatagacactgaggactgctagacagggagggagggggacatagactggaaaactacctattgggcactatgcttattacttgggagataggatctgtaccccaaacctcagcatcatgaaatatacccatgtaacaaacctgcacgtgcacccccctgaatctaaaaaaaaaaaggtaaaaaaaaaagaagcattgcagtcatgtcttgaataaggcaccggcctcccatattgggagagagagggaaagaactagagcccccaccatgtgaacaagcaggctcaaattatccaacgagtttgtttttattgagaagaagtgtatctgtggctatatggaagtaattgcatgcccattctcccagatgtgcagagacaatgtcgcggatgatggtgccctgctatttgctggcctctgatgaaggaggcaggtgctcccccgaagagcagaatcgctcattgtgggcctcacagcacccccctcccccgcccttggctgttgttctttatttacccagtgcaacacgaaaccttagccagggtagactatatgttaggtgtattttttggcttgggctaccatacaaacccactgcagactgggtgggtttacacaacagacatttatggtcttgaagttctggaggctggaagtccgagatcaaagtgtcggcagggctggttgctctgaaggttccaggggaccatctctcctggcttctggtagttccttggcttgtggcagcatcaatccaattttcacttggcgttctccctgtgtgtctgtgtgtccacattttttataagacaccagtcatattggaggagaggcccacactactccaatatagcctcatcttaactaattacatcggcaatgaccttatttccagataaggccacattatgaggcagggattaggacttcagcatataaatggtgggcagaggggaccacaattcaacttttgacacccactaagaggacatcttgcaatcactttgtcgtatctcagataatttccctgttatgcctggtgcaaactgcccatctgaaggccttcttcttccaacctgggaaatgtggagacagtattaacatattcacagctcaagtccacaccactgacaataacaattttcaattcttacccctcccagggtttaacaacacgagttggaggacccccagattcccaccagaatctggtcctctctgtgccttggggccagctccagagcatgtctaggtctctgcttcttcatcaacaaaatgagggtgataaaatctgccttccaagatgccatggagcatcaatgagaactacagacatgagaatgacatgtaaaccacaccacaccatgtatccctggatactttattaggacttcatattaggacaagcatgtgtgacagtaagcaaagggtactgcacctatgactgaacctctttccgtccaaagcctaatctgaatccttataacctcgtttgaaagcagttgctgccaatcttgccaatgattttcttttttttcttaaagagacagactcttattaaaagagaagtcacccaggctggagtgtaagatcatggttcactgcagcctcaaactcctgggctcaagtaatcctcccactttagcctcccttaaaactcatttgccgctgggactaaagatatgtaccatcactttcagctaatttttaaatttttgttgagatgaggcttccttatgttgctcaggctgctctcatgttcctggactcaagtgatccccctgccttggcctcccaaagtgcggagattacaggcatgagccactgcacctgtctgaatgtcattttttgagtgaggacaaagttgagagccaaaacaggtaaaagaaggtgccatttatttgtaaactttgcacccagattaactttatcatactttttcattttcatgtagtttgatcctttttggatattattcagcttttctttaataaattgttaggatccaaaaatataccacaccagttaacaagaaaatcttcacttcaatcttaacacttgaaaagaaaaatcttgcagactttgctcctatttggggataagcaggggactagtggatagaagaaggtgctttctcaagtcagtgacagaggttgggccatgccatcttttcagagccagtgctgccctctgagggcttcagctcaaagaggggaggaaggcaaatgaacagaaaatgaggctacagagtggtgggtatgaattttcacggaagactgggactggggagaaagcaacgagctgtgccagaaggagccagaaaggtttcagaaaggatgttctgttggggatgctattccaggaggagggaccagctgtcatcaagtgtctgctgggggcctttggtgtgagctactggggacatgggatgggaaagtgcccctactctagacaaagcctagaggtgtcatcatctgcaactattaagttgaagcatatgaaagagctgacatgtgacaactttggcccttttacaaaaacggcaattttgtatggttcaacctgataccaattccagataaaatggaaatgcctcaaattctaacctttgttccgtataacaacacgtggaatccctgagagttaatggaatccctggggcatttctaaaatagaccaatgcctgggcgagatcccttaaatcctggtttctgggagtggggccttctgcagggggcctagcctcctggtctccattatttcatgggatcccagttcctggtctatccatattgaggggacgagaagcagccgggataacggaggaggcaggggttcttgcagtggctactcctctctaggcctcctggagggagctgatcatgagagatcctcactgtaagggggatgcaggcagcccaggggccgtctgagcaccaaatgacatcatgtacttgaagcaccagcacaaagttgtctccctcatagtgaatgaatgtaagcagtggaattcgactcgcgggttttaacccccatgggccagcgtccttccctcccaattgtcctgctagaagaaaacgtttcgctctctctcgggtatccagctaatcgttaaggcaaacagcagcgccccttttcctttcatctcttgccccatttctgcacctacagcctcacaccttcttcccgggacacagcactgccaggagcccatcctggttcagttcagtacccaggaggaatccctcgggccgactcccaggactttgtttcttggacttcaccaccgccgcctccccagcacagctcccgcagcccgcacccgcccacagggtctccgcgaccctagagcttagggaagaattgccgaggggcggggggtccctcatgcgcatggaagggacgtacgccccaggcctccaccttcctcctgaccccggggattcttggacgtcgattctccgtctcgtaggggcgagggccctgggttcgcagtcagacgcgggcccctctcaaatctagtggcctggttttattgagtgggggaaggcacatattttccaagattaactgccccgcaacagggaatttcgcaggatttcagtattttcgactccccaggtgacgccaagagggtgggttccactgtgcacggtggggaaactgaggctcggaggggacaaggaaggtactcgaggtcacgcggctcctccggcgggcgggaacgcaggacgcggagttggggcgcgggctgtgcgcgcccaggttcgcggctcccggggctcggctgtcgcagcgcggtcgccgccgaggaccacggtcggggcgcgggcgggctccagtgcgcaggcgcggcgggcgggaggggacgcgctccgggcgcgcgcgcggggcagccggcgccccaactccgcccgccccgcgccccgcgccccggcgcctcgccgcccgccgcccgcccgccccggcgccgccgcccgcgccccggcgccccgggccggcgaggggcgcgcccgcggccgcggccgctgcatggcgctgagatggcgggggcgccgcgcggcggaggcggcggcggaggcggcgcgggcgagcccgggggcgccgagcgggcggccgggacaagccgccggcgcgggctccgggcgtgcgacgaggagttcgcttgcccagagctggaggcgctgttccgcggctacacgctgcggctggagcaggcggccacgctgaaggcgctggccgttctcagcctgctggcgggcgcgctggcgctggccgagctgctgggcgcgccggggcccgcgcccggcctggccaagggctcacacccggtgcactgcgtcctcttcctggcgctgctcgtggtaaccaacgtccggtccctgcaggtgccccagctgcagcaggtcggccagctggcgctgctcttcagcctcaccttcgcgctgctctgctgtcctttcgcgctgggcggccccgcccggggttccgccggggccgctggggggccagcgaccgccgaacaaggggtttggcagctccttttggtcaccttcgtgtcctatgccttgctgcccgtgcgcagcctgctggccataggctttgggctcgtggtggctgcgtcgcacttgctggtcac

SEQ ID NO: 2485 - DNA, 6000 bp, Homo sapiens
attgctgtgacaaaattaactttactgactatcctatagacacaaatcagcaacctctttcctaaacagcctcatttccacaagtggctcagagtcaatcgactatatagaggctgctctctcttttacaaattcacaagggaaatttgtcccaaaagacaaagcatgagtggagtacgatacacactcatctggaagccaaacgtctgaccaaagtcagtggaaatcaatgagctctcccaggacagaagctggttagctggcttccctggctgtcatggctgctgtccagatgcctaaatggatatattttgctctaagagtttgaatggcactcacccacttctgtctacccagaacactgaattgttagaggaaaaattgttgacagggctggttgctctgctttatactttgtgtgtataaagtgtaggctctgtgtgcatgcgggcctctcttccgaccataaccctgggggccaggtgctaagttcccaaactacagaagaggagaagcacagagaggttgagtaacttgctaaaagtcacagctgggaggggtggtgttgacatgttagcccaacaacccacctcaggggtccacactcttttagccatgatatcatgtagtttcccctgtggtggctatgaactgggtcagatgggctgaggctccaggatgggcccaccctgcaccacccccatgatctgggcaattcatttagtttctacaaagaccaggaccttcaacagttatggggctccaatgcaaaggtagactagagagatttgtaaatggtgaaaagccacacccagtggtgttattgtagcaagaagcactgcacagaaaaccaaataccacatgttcttacttataggtgggagctaaacattgaatatacatggacaaaaggatgagaaccatagacactgaggactgctagacagggagggagggggacatagactggaaaactacctattgggcactatgcttattacttgggagataggatctgtaccccaaacctcagcatcatgaaatatacccatgtaacaaacctgcacgtgcacccccctgaatctaaaaaaaaaaaggtaaaaaaaaaagaagcattgcagtcatgtcttgaataaggcaccggcctcccatattgggagagagagggaaagaactagagcccccaccatgtgaacaagcaggctcaaattatccaacgagtttgtttttattgagaagaagtgtatctgtggctatatggaagtaattgcatgcccattctcccagatgtgcagagacaatgtcgcggatgatggtgccctgctatttgctggcctctgatgaaggaggcaggtgctcccccgaagagcagaatcgctcattgtgggcctcacagcacccccctcccccgcccttggctgttgttctttatttacccagtgcaacacgaaaccttagccagggtagactatatgttaggtgtattttttggcttgggctaccatacaaacccactgcagactgggtgggtttacacaacagacatttatggtcttgaagttctggaggctggaagtccgagatcaaagtgtcggcagggctggttgctctgaaggttccaggggaccatctctcctggcttctggtagttccttggcttgtggcagcatcaatccaattttcacttggcgttctccctgtgtgtctgtgtgtccacattttttataagacaccagtcatattggaggagaggcccacactactccaatatagcctcatcttaactaattacatcggcaatgaccttatttccagataaggccacattatgaggcagggattaggacttcagcatataaatggtgggcagaggggaccacaattcaacttttgacacccactaagaggacatcttgcaatcactttgtcgtatctcagataatttccctgttatgcctggtgcaaactgcccatctgaaggccttcttcttccaacctgggaaatgtggagacagtattaacatattcacagctcaagtccacaccactgacaataacaattttcaattcttacccctcccagggtttaacaacacgagttggaggacccccagattcccaccagaatctggtcctctctgtgccttggggccagctccagagcatgtctaggtctctgcttcttcatcaacaaaatgagggtgataaaatctgccttccaagatgccatggagcatcaatgagaactacagacatgagaatgacatgtaaaccacaccacaccatgtatccctggatactttattaggacttcatattaggacaagcatgtgtgacagtaagcaaagggtactgcacctatgactgaacctctttccgtccaaagcctaatctgaatccttataacctcgtttgaaagcagttgctgccaatcttgccaatgattttcttttttttcttaaagagacagactcttattaaaagagaagtcacccaggctggagtgtaagatcatggttcactgcagcctcaaactcctgggctcaagtaatcctcccactttagcctcccttaaaactcatttgccgctgggactaaagatatgtaccatcactttcagctaatttttaaatttttgttgagatgaggcttccttatgttgctcaggctgctctcatgttcctggactcaagtgatccccctgccttggcctcccaaagtgcggagattacaggcatgagccactgcacctgtctgaatgtcattttttgagtgaggacaaagttgagagccaaaacaggtaaaagaaggtgccatttatttgtaaactttgcacccagattaactttatcatactttttcattttcatgtagtttgatcctttttggatattattcagcttttctttaataaattgttaggatccaaaaatataccacaccagttaacaagaaaatcttcacttcaatcttaacacttgaaaagaaaaatcttgcagactttgctcctatttggggataagcaggggactagtggatagaagaaggtgctttctcaagtcagtgacagaggttgggccatgccatcttttcagagccagtgctgccctctgagggcttcagctcaaagaggggaggaaggcaaatgaacagaaaatgaggctacagagtggtgggtatgaattttcacggaagactgggactggggagaaagcaacgagctgtgccagaaggagccagaaaggtttcagaaaggatgttctgttggggatgctattccaggaggagggaccagctgtcatcaagtgtctgctgggggcctttggtgtgagctactggggacatgggatgggaaagtgcccctactctagacaaagcctagaggtgtcatcatctgcaactattaagttgaagcatatgaaagagctgacatgtgacaactttggcccttttacaaaaacggcaattttgtatggttcaacctgataccaattccagataaaatggaaatgcctcaaattctaacctttgttccgtataacaacacgtggaatccctgagagttaatggaatccctggggcatttctaaaatagaccaatgcctgggcgagatcccttaaatcctggtttctgggagtggggccttctgcagggggcctagcctcctggtctccattatttcatgggatcccagttcctggtctatccatattgaggggacgagaagcagccgggataacggaggaggcaggggttcttgcagtggctactcctctctaggcctcctggagggagctgatcatgagagatcctcactgtaagggggatgcaggcagcccaggggccgtctgagcaccaaatgacatcatgtacttgaagcaccagcacaaagttgtctccctcatagtgaatgaatgtaagcagtggaattcgactcgcgggttttaacccccatgggccagcgtccttccctcccaattgtcctgctagaagaaaacgtttcgctctctctcgggtatccagctaatcgttaaggcaaacagcagcgccccttttcctttcatctcttgccccatttctgcacctacagcctcacaccttcttcccgggacacagcactgccaggagcccatcctggttcagttcagtacccaggaggaatccctcgggccgactcccaggactttgtttcttggacttcaccaccgccgcctccccagcacagctcccgcagcccgcacccgcccacagggtctccgcgaccctagagcttagggaagaattgccgaggggcggggggtccctcatgcgcatggaagggacgtacgccccaggcctccaccttcctcctgaccccggggattcttggacgtcgattctccgtctcgtaggggcgagggccctgggttcgcagtcagacgcgggcccctctcaaatctagtggcctggttttattgagtgggggaaggcacatattttccaagattaactgccccgcaacagggaatttcgcaggatttcagtattttcgactccccaggtgacgccaagagggtgggttccactgtgcacggtggggaaactgaggctcggaggggacaaggaaggtactcgaggtcacgcggctcctccggcgggcgggaacgcaggacgcggagttggggcgcgggctgtgcgcgcccaggttcgcggctcccggggctcggctgtcgcagcgcggtcgccgccgaggaccacggtcggggcgcgggcgggctccagtgcgcaggcgcggcgggcgggaggggacgcgctccgggcgcgcgcgcggggcagccggcgccccaactccgcccgccccgcgccccgcgccccggcgcctcgccgcccgccgcccgcccgccccggcgccgccgcccgcgccccggcgccccgggccggcgaggggcgcgcccgcggccgcggccgctgcatggcgctgagatggcgggggcgccgcgcggcggaggcggcggcggaggcggcgcgggcgagcccgggggcgccgagcgggcggccgggacaagccgccggcgcgggctccgggcgtgcgacgaggagttcgcttgcccagagctggaggcgctgttccgcggctacacgctgcggctggagcaggcggccacgctgaaggcgctggccgttctcagcctgctggcgggcgcgctggcgctggccgagctgctgggcgcgccggggcccgcgcccggcctggccaagggctcacacccggtgcactgcgtcctcttcctggcgctgctcgtggtaaccaacgtccggtccctgcaggtgccccagctgcagcaggtcggccagctggcgctgctcttcagcctcaccttcgcgctgctctgctgtcctttcgcgctgggcggccccgcccggggttccgccggggccgctggggggccagcgaccgccgaacaaggggtttggcagctccttttggtcaccttcgtgtcctatgccttgctgcccgtgcgcagcctgctggccataggctttgggctcgtggtggctgcgtcgcacttgctggtcacagccaccttggtccccgccaagcgcccacgtctctggaggacggtaagtgcagccgcgcacccctcatctggtctcggacacacttgctgggacgatgctgggaatgcccggagtcgggcgcgctttttcctatgcggcgggtggggacactgaggctccgagtgggggtgtgttcaaggtcactcctacgagttggggacgcagtcggggctggcaccctccggccagggctctcttcagagttacaatccacgaagcgcccctggcgtgaagtgtggagaggggagacaggtgtggagagagaaaggtttggccaaggtcagggagctgatgagcggccagacggcggccagaggggtccgccggtcttttgccgcacccatccccacagagggactgaaagtgggcgaggagagcagacccccagggcaagctccaag

SEQ ID NO: 2486 - DNA, 6000 bp, Homo sapiens
tgggggagtaggggccagccacagaaggtggggcccagccaggggaaggaccagcagcgggaggggctggtgggggaggaggatcccagccggggaggaaggcccagccagaggaggggccagcaggggaggtagggccagcagagggagaggctggggaaagggaggcagggcatggggttaactgggagttgacagcatgttgggcagtgggcacagggcacacaaaggcatacgggacacagcctgagggctggcagattggtgtcaccagcgcacacctaggccacgagctttgctatcaacaaccaggtcatccagggcccttgagccctatgattctgcgtgctggggttaggttgtttcacctccaagcaaccaagccatggttctgaaccagagctcagacataactggggctgcacagggaaatttcagctgactcccatttctccgtgataatcgtgatttctgttatcctgcctacagctaagaactcggcagaacagaaatgtatttcatttacattgataagcaacgaaattgaaagcatataatttgcacactgcaatggatccctactacttcagaaaaaaattaggtaaaaatacaatatcctgattcacactggtcaaaaagtgggtatttcaaggctgtgcagagtaaagtagcaaagggaggaagctcagagctggcagagaccaggtcttcctcttgcacacatgtgctgcaccctggttctccccaggcaatgcagggcacagggtgggaagcggactcctgtgggaaggactggggccctgcccaggcccccctttcccaagattccaagctgctccctctgaggctctctgagtctgtgagtggcatcacaagaggccaagcccagacatccagtgtctccctttctctgccttcctaataccccatggtccttggcactcacccctaccccacccccatgatcttcagcccaccctggcaggccttgccccctactgactgtgagcagccaaggatgtcttgaataggatgctttcagttctgacaggtgctcggctaaataaaaatggattgtatgtcatataggtacaattagtgacccaaaagcaaggggctgggagaggaaaggaactcagttctggccacttagcacatatttatggatacctccccctcagtgccggcccaggtaggaacaaggctgtttcccctaaagacctctctgctcagggacatcagcatcaagcacttctccgggggaggagctaagccctagctactcaattccacctgtgctaatagtcatgcacactagctttcagcgttctctcctctgccccccagagtcctggggcagcttgggctttacaggagaggaaccagatgccccaaagcacccaggctgcattcccagagccctgtgcaccagaactggaacaatgaatgctgcagggaaccctgagagccttgctttggaggggcaaaggctctggaaagaaaacacaagaactttctccatagctcagagcagggacttgaacccaggcctcagaaagcgcaggctttttccaggcctccttagggctatccttgataagaaggcatttgggtctcagagaaaggggtgggattcaagggagggagctcctttgccccatggagttaacccgactctggaactcactgggctcagcaccaggagatcactgtggagatctcagactctgaagcagcatcctgctatgtatgcagtgagggaaatcccctgcaaagattccttcgttcattcactccatttttcatcctctttgggacatccactccacacccagcatggctactacctgcccaaaactcagtatggaggacaaggtgctgtcaacgagtgactgcactgcacagtggcacaggtctgaatagaaagtggatggtaaagcagtgaagagcagcagaaacatcaatgctgtgtaaatgcgtgtgctgtcttcttcaccatctcaagcaccaaactgcagagctcattatggacagatttcacaggctcctggaattctctaattggaaagcagaatccctgggaatcatctgccctgctccccccactgtaagtctccctgcattgatccccatgtgtttgtcagtatcactaccacctgtatagacacgtggacttgaatagaacattctaaaaaggccaatatgtgcttttccaataggaagtgtttaccttcactacaaccctgcagggggccattctgccctttacacaggtgagaaacctgaggctcagtgagggaaggctttggattgcccagggagtcacagctagcagggaaacccagatgtctgctccctaagaatccttgctcccaggatgggcttccttccccactacagtgacagtcacaggggctcatcttatcccagggggagaggcagagttccctgtgtccagaaactcctttatagactctcccctctctcttttttaatctttaattctctaaaagaaatgactagaggctatataggaaatgtctttattttaaaagagaaagacaataacgcagccttttattacaccagctgactccctggtgtaataagagagaatgcagtgtggttgggatccctgggcctgcccagggaccaagctcagcccctccctattcccaagctgccctggcatctggtcagattggggaggccgtcttgcggttgcgggtctggctgtgggggccagcatgaggcccaggctaaacacagacagatggggggtggaggcagtaggagatacaggaatgccccctgagactgataaggcaaggcccacgtgctgcccacaggaggctgtggaagagcctccttcccctccaggacatgaagtcctctggctcctttcccctttcctcagcctttagccatccttttgtgcctctgcccttcacctctacctctcttcctctcttcctccgacgccctctttgacaattctccatgtactcctgccttcttccctcccgcccctgcccacgggttgagcacatggtggtctctctctgaccctaagacacaagtccagtgatgtgtctatccctgtgccaggttgagcatctcatggctcctctgactgtgtgctgcccctggcatcacagtctaaggatgcctccttagatccttgggtgctggtcccccggggccgggctgtgggactccttaccaccgccccccagttattcttccctaatctctctggattcagcttcccctccgaccccttacctctccccagtttgctcccaccactgcttcctttcgtgagatgggctcccccactccatttgagtcataccatccccctgctaaactgcagctagaggcagaaacaaaaccctcctcagggtcttccaaatctccccaccccccaactccccagccccatccctgcggcccgttggagatgggcacaaggggaagctctcaaagccccgccgtggggcaaagacctctggtccacgtccacctccgggcagttggaagagcaggctcctccagggcccaggaagagtccgcgggaggcagacagcgtccccgtccttgcaaccatctcgcccgcccgactgggaagacagtgacaaagttcgggcgcagaaaaggcagggtcagggcaaccgccgagtggcagcggcagggactagactgtgtttgaccttggcaaaccccactctttctgggccggaggcatgtccacagaagggtggccagcaaggctggaagagccgaagtcctttcccaccacccatataccaccctcgggtccgcagggttgggaggcgagcccagcacgcgctctaggtgcgcaggggaagagcccagcgctgcgcgcagagccggccttggagcttgccctgggggtctgctctcctcgcccactttcagtccctctgtggggatgggtgcggcaaaagaccggcggacccctctggccgccgtctggccgctcatcagctccctgaccttggccaaacctttctctctccacacctgtctcccctctccacacttcacgccaggggcgcttcgtggattgtaactctgaagagagccctggccggagggtgccagccccgactgcgtccccaactcgtaggagtgaccttgaacacacccccactcggagcctcagtgtccccacccgccgcataggaaaaagcgcgcccgactccgggcattcccagcatcgtcccagcaagtgtgtccgagaccagatgaggggtgcgcggctgcacttaccgtcctccagagacgtgggcgcttggcggggaccaaggtggctgtgaccagcaagtgcgacgcagccaccacgagcccaaagcctatggccagcaggctgcgcacgggcagcaaggcataggacacgaaggtgaccaaaaggagctgccaaaccccttgttcggcggtcgctggccccccagcggccccggcggaaccccgggcggggccgcccagcgcgaaaggacagcagagcagcgcgaaggtgaggctgaagagcagcgccagctggccgacctgctgcagctggggcacctgcagggaccggacgttggttaccacgagcagcgccaggaagaggacgcagtgcaccgggtgtgagcccttggccaggccgggcgcgggccccggcgcgcccagcagctcggccagcgccagcgcgcccgccagcaggctgagaacggccagcgccttcagcgtggccgcctgctccagccgcagcgtgtagccgcggaacagcgcctccagctctgggcaagcgaactcctcgtcgcacgcccggagcccgcgccggcggcttgtcccggccgcccgctcggcgcccccgggctcgcccgcgccgcctccgccgccgcctccgccgcgcggcgcccccgccatctcagcgccatgcagcggccgcggccgcgggcgcgcccctcgccggcccggggcgccggggcgcgggcggcggcgccggggcgggcgggcggcgggcggcgaggcgccggggcgcggggcgcggggcgggcggagttggggcgccggctgccccgcgcgcgcgcccggagcgcgtcccctcccgcccgccgcgcctgcgcactggagcccgcccgcgccccgaccgtggtcctcggcggcgaccgcgctgcgacagccgagccccgggagccgcgaacctgggcgcgcacagcccgcgccccaactccgcgtcctgcgttcccgcccgccggaggagccgcgtgacctcgagtaccttccttgtcccctccgagcctcagtttccccaccgtgcacagtggaacccaccctcttggcgtcacctggggagtcgaaaatactgaaatcctgcgaaattccctgttgcggggcagttaatcttggaaaatatgtgccttcccccactcaataaaaccaggccactagatttgagaggggcccgcgtctgactgcgaacccagggccctcgcccctacgagacggagaatcgacgtccaagaatccccggggtcaggaggaaggtggaggcctggggcgtacgtcccttccatgcgcatgagggaccccccgcccctcggcaattcttccctaagctctagggtcgcggagaccctgtgggcgggtgcgggctgcgggagctgtgctggggaggcggcggtggtgaagtccaagaaacaaagtcctgggagtcggcccgagggattcctcctgggtactgaactgaaccaggatgggctcctggcagtgctgtgtcccgggaagaaggtgtgaggctgtaggtgcagaaatggggcaagagatgaaaggaaaaggggcgctgctgtttgccttaacgattagctggatacccgagagagagcgaaacgttttcttctagcaggacaattgggagggaaggacgctggcccatgggggttaaaacccgcgagtcgaattccactgcttacattcattcactatgaggga

SEQ ID NO: 2487 - DNA, 6000 bp, Homo sapiens
gtcttagtccaattactgtggttataacagaatgccacaaactgggtgatttataaacaaaagaagctgatttaggctgatttagaggctggggagtccaagagcttggtgctagcatctgatgagtgtcttcttgcttcatcataacatgggagagggcatcacgtgtgaagagagcttactcttataacatagccactcccacaagaattaacccaccgccatgagagccatgtgaattcattcatgaggacagcgggttaagtttccaatatatggacttttcggggacacattcaaaccacagcagttagttgtaacgttcgtgtcatgtctcattctggttctgatgcttgtgcagtctcttcaaactgcgtctttgccttttagtgtgccttgcaatgtggaaatgatatactgggtaagaggagctgtagtaaagaggcttctagtgacgtagtgacaagctgtggggagagggagtgttgcacagtcctgccgcatgtcacagtcttccagtgagcctgtgtccctggactgtgaacttcatgcttgcttctcagcttccccagccccttagatggtacagaactgttggaggggggtggagttgtatatttcccttgctctgggtaggtcaccctctgataaaacaccaggttaggcctctggtgaaataatttctcctgagggcagaccttctattaataatagaatgttccaacctatttcaaaatggttcctcttctccttccactgccagaagcataatgagattttccccctaatattcgtggtaaggacctagcagagctccaggaggtaacactctcaagtgtctcatactaccctgcaccatgactgggctctgctggagttcttaatttgcagaactgcccacactgagcctcccgcaatttctcaattacagggcaaactttcccagccggcactgggtccttggaggtttctgtctgctggtttcttcctctggaggttgtgcttctgtgtttgcctgtctctccaatttggggggcagtggtttgcccaatgacctcaattctctgaaagagctaagaagaggtgttaatttttcggtttgctcagctttctacttgttgctagaatggagcgccaatagtgcctcctatagtgacatgtaaccctcaactctagagatgatgaagcatactaatgacaaaggagaaatgcttcagcagttttctgtcagcacattaccccttgaaaaagctgcttcttccacattctgcaagagatgggtctcaactcagagctcaaggcaaatgacttccttcaaggagaaggaataaacagtctcagaaaccatgaaagcctgcccccaggagtgtccctgaacctcagcaggggccacacttaccttgcagaaataggtgaggcatgctcctggtacaaaatcccaatggtacagaaggacaaattgaaaaacaagtctccctctaaacccctgaccccgagctacctagttctcctccctagaggcaaagctgttaccagattcttgtatctccttaacatatatccttagaagagctgtcaagtgaacacatgtttaagtgaaaacctattttagaagtgcattttcttaaggaactttagggttggaaggaacctgtgtcagtccttaattcacaacctccattagtacttattgttcttgcacaaaaatctttctcaaaaaagccctttccactctgacatagcttattctacttttacttagctccaataacttataaaacatatttttgaaagtctaaaatctgccactatgtttttttttcctaatcaatctttactttgacctctaagccagagaaaacaggtggtcaaatgccttttgcctaagatggaacttagaatatttgaagacctcagatcttcaccctgccaaataacgtgtttctcctcccctttcacagagcatttggttttaggaaattcagagccacattccttatagacaagactaaactcttattcaacatactcagaaacttcttctaagaggataaccactcatcagaggaaaaaagtttctcatgtacagctggcaaagggatggaaccatctgtgttattaaaattgacagacgcttatgagatttattaagggaaatactagagtcttagtacatacttgctaatatagcatacatgaaggctttatctataatttttttggccaagcagaaattttggtattactcaccctaacaaatttccaagacattatgaaatagaattttaggtcctgacatcaccatttgtctcaggttttgaagcgttgctggacaagaggggtaaaacacggctctgccttggattcaaagttggcctctcatactagcaagtataccttggtatcctggtcacttctcccggccacagcatcacattgctataaaaggcagatacaagtattaaccagctcacaggttatcagataagcttagtctgaccaatgcttaacacagcaactgggccactattgtcattcctgtggtggtggcacacacacccagcctctgtccgggccatggtctaggaccaccctccacagaggctgtgagctagagccctaactgtgcagggccctaactatgccaggctacttatctctcttaagaggacttcattagtgcctgctcggccatacagttttttacttaccaagtaacacagttatcagcacactccaggtactagccaaggactacaaaatcaacgtgaatgtcagcttttgtatcaaaagctcaaaggagaaactcaaactttacatagatgtcccatgaagatgttcagcaaacccattcttctctgttccctggaatccatcccagtattgtgctatgtgtgtgtctagtaattctttacaaaaagctctgtttcttgtgatgctatcagatcacattgaagaatatacaagccgtactatgaaggctgttgtctcatatagtcctaacgtagtgagaactgatgttcttacatgctgtctttttgggcactcaaagaaattcctgtacagtcttacaaatcagttgtagcttaaattgatttgtgttgtgacttgtacacacaggtcacattcccttgacagaaaatatagtttaaaaccaaatttgcagcccttgttaagtgaatgcacaggactttattgtattcaggtcttttattgtaagactcactcctgtcttcattttatgttccactgttgtgcttcccatttgcctttctctagttttgttttctgtgtttctacggactgctctcagcccaggtgtgcaggaagcacacacatgcctgcagagccttcatggcctctgcattcagggcatgacttcaacgcacagtggctgtactgatttgttaaaacaaaggaacagattacttctcctaattcacagggaagttccaggttgtgcgggcagtgagcagacctgtgtctgtctgcgcttgccctggtgaaaaaccccaccgttcaggctgcagggtgcgagacccaggcacaaacattttgctggatgaggaggaaagatgtaaggttgctccccttcagagacagcaaagggcaggtctgtagcttcacttacttcaggattgtgatttttgacagagccgagagatcagggttgttgaaccaggcctgaaggtcctagtgaatctcgtgaagagaggaggggtctggctgtaacatggacctagaggacatttttactgcaggagaaggaacagtggggatggggtggacttgccaaaggaatatagctcaagttcctgcagcccaaaaaagctcagtttcttttggccaaagcttccgcgagtttccctggcatttctcctgcgggagctacaggggcagtgggacacttagcctctctaaaagcacctccacggctgtttgtgtcaagcctttattccaagagcttcacttttgcgaagtaatgtgcttcacacattggcttcaaagtacccatggctggttgcaataaacattaaggaggcctgtctctgcacccggagttgggtgccctcatttcagatgatttcgagggtgcttgacaagatctgaaggaccctcggactttagagcaccacctcggacgcctggcacccctgccgcgcgggcacggcgacctcctcagctgccaggccagcctctgatccccgagagggtcccgtagtgctgcaggggaggtggggacccgaataaaggagcagtttccccgtcggtgccattatccgacgctggctctaaggctcggccagtctgtctaaagctggtacaagtttgctttgtaaaacaaaagaagggaaagggggaaggggaccctggcacagatttggctcgacctggacataggctgggcctgcaagtccgcggggaccgggtccagaggggcagtgctgggaacgcccctctcggaaattaactcctcagggcacccgctcccctcccatgcgccgccccactcccgccggagactaggtcccgcgggggccaccgctgtccaccgcctccggcggccgctggccttgggtccccgctgctggttctcctccctcctcctcgcattctcctcctcctctgctcctcccgatccctcctccgccgcctggtccctcctcctcccgccctgcctccccgcgcctcggcccgcgcgagctagacgtccgggcagcccccggcgcagcgcggccgcagcagcctccgccccccgcacggtgtgagcgcccgacgcggccgaggcggccggagtcccgagctagccccggcggccgccgccgcccagaccggacgacaggccacctcgtcggcgtccgcccgagtccccgcctcgccgccaacgccacaaccaccgcgcacggccccctgactccgtccagtattgatcgggagagccggagcgagctcttcggggagcagcgatgcgaccctccgggacggccggggcagcgctcctggcgctgctggctgcgctctgcccggcgagtcgggctctggaggaaaagaaaggtaagggcgtgtctcgccggctcccgcgccgcccccggatcgcgccccggaccccgcagcccgcccaaccgcgcaccggcgcaccggctcggcgcccgcgcccccgcccgtcctttcctgtttccttgagatcagctgcgccgccgaccgggaccgcgggaggaacgggacgtttcgttcttcggccgggagagtctggggcgggcggaggaggagacgcgtgggacaccgggctgcaggccaggcggggaacggccgccgggacctccggcgccccgaaccgctcccaactttcttccctcactttccccgcccagctgcgcaggatcggcgtcagtgggcgaaagccgggtgctggtgggcgcctggggccggggtcccgcacgtgcgccccgcgctgtcttcccagggcgcgacggggtcctggcgcgcacccgaggggcgggcgctgcccacccgccgagactgcactgtttagggaagctgaggaaggaacccaaaaatacagcctcccctcggaccccgcgggacaggcggctttctgagaggacctccccgcctccgccctccgcgcaggtctcaaactgaagccggcgcccgccagcctggccccggcccctctccaggtccccgcgatcctcgttccccagtgtggagtcgcagcctcgacctgggagctgggagaactcgtctaccaccacctgcggctcccggggaggggtggtgctggcggcggttagtttcctcgttggcaaaaggcaggtggggtccgacccgccccttgggcgcagaccccggccgctcgcctcgcccggtgcgccctcgtcttgcctatccaagagtgccccccacctcccggggaccccagctccctcctgggcgcccgcgccgaaagccccaggctctccttcgatggccgcctcgcggagacgtccgggtctgctc

SEQ ID NO: 2488 - DNA, 6000 bp, Homo sapiens
acaccacacacatacacagacaccacacacataccatacacagacacatacacatgcacacacatatacacacacacctcaaatacatacacaccacacacacatacatgtatacacacatacacacaccacacatacaccacaaaaaccccacacacatacacatatacacaccacacacaccacatacacacacgtatacacacatatatacacacatacaccatgcatacatacacaccacacatacatacagacacaccacacacacgtacacacaacacacaacacagacacgtacacacactacagacatgtatgcacacatacacacacaccacacatacatacacacagacacatatacactacacacaccattacatacacacgtacacatacaccacacacaccacacatacacacaccacacacacatacgccacacacacaccacaaaaaccgcacacacatacaaacatatacacactacaccacacatacacacacacaccacacaccacacacacacatacacacaccacacacaccacacatacacgcaccacacatacacacacgtagacacaccacacacaccacagaaacacacattaacacaccacatacacatatgtatgtgcatatacacacccacaccccacacacacatgtataaagatttagatatatataaaacatatgttatatatatgttgatgtaatatctaatatctatatatctaatatgtagtttattagctatctaatatctatgtcatatatatcaaaatctttatatataaaaatatgtagaaatctttatacatatgttatatgtatataaagatttagatatataacatatgtaagttatatatatgttagtgtaatatctaatatatagtttattggctatctaatataatataaacagattatcaatattataagctattagaaaaatgcaagttaaggcagatgatatacctctttacacaccaactacacacaccaactacacacacacatacacacagacacacacgacacacaccatacacatgtacacacacaccacatatacacaaacgtacacacacaccacacacacatacacaccacacacacaccacacatacatacacatccacacaccacacatgtacacacgccacacacacacatacacaccacatacacatatgtatgcacacatacacaccaacaccacacagacaccacacatgcataaacatatagacatatacacaccacacaccatatgtacacatgtacacacacaccacatatacacacaacacacacaaatacacacaccacacacacaccacaaaaaccccacacacacacaaacatatacaccccacacatacgcatatatacacacacacatacacaccacacacatacacaccacacacacaccacacatacacacacgtacacacaccacacacacaccacagacacacaccacacatacatacacatacacacaccacacacacgtacacacaccacacacaccacagacacacatagacacaccacatacacacccacaccacacacacacaactcataccacacatacatacacaatagacacatacacaccacacacaccatacatacacacgtatacacacaccacatatacacacacgtacacacacaccacacacacccacatgcacacaccacacacacatacaaatatacaccacacacacatacaccacacacacggtgcacatacacacacatatacacacaccagacacacataccacatacacatcacacatatatgtatacatgcatacacatacacacacacatacacacactctcctcaaggcagtttatcctctgagaactttaaatttacaaaagacacatatgtccattactttgagaaggacaggaaagaacccactttcttttgcagcaacagcaagagggccctcccgaggctcctgctccctgtcataagtctccttgttgaggacattcacagggttcagaacccagggatcctgcatgggatggtgctttgctgattacttcacctctgatttctttccactttcagaatacataaaccagtccgttcccaaaaggcccgctggctctgtgcagaatcctgtctatcacaatcagcctctgaaccccgcgcccagcagagacccacactaccaggacccccacagcactgcagtgggcaaccccgagtatctcaacactgtccagcccacctgtgtcaacagcacattcgacagccctgcccactgggcccagaaaggcagccaccaaattagcctggacaaccctgactaccagcaggacttctttcccaaggaagccaagccaaatggcatctttaagggctccacagctgaaaatgcagaatacctaagggtcgcgccacaaagcagtgaatttattggagcatgaccacggaggatagtatgagccctaaaaatccagactctttcgatacccaggaccaagccacagcaggtcctccatcccaacagccatgcccgcattagctcttagacccacagactggttttgcaacgtttacaccgactagccaggaagtacttccacctcgggcacattttgggaagttgcattcctttgtcttcaaactgtgaagcatttacagaaacgcatccagcaagaatattgtccctttgagcagaaatttatctttcaaagaggtatatttgaaaaaaaaaaaaagtatatgtgaggatttttattgattggggatcttggagtttttcattgtcgctattgatttttacttcaatgggctcttccaacaaggaagaagcttgctggtagcacttgctaccctgagttcatccaggcccaactgtgagcaaggagcacaagccacaagtcttccagaggatgcttgattccagtggttctgcttcaaggcttccactgcaaaacactaaagatccaagaaggccttcatggccccagcaggccggatcggtactgtatcaagtcatggcaggtacagtaggataagccactctgtcccttcctgggcaaagaagaaacggaggggatggaattcttccttagacttacttttgtaaaaatgtccccacggtacttactccccactgatggaccagtggtttccagtcatgagcgttagactgacttgtttgtcttccattccattgttttgaaactcagtatgctgcccctgtcttgctgtcatgaaatcagcaagagaggatgacacatcaaataataactcggattccagcccacattggattcatcagcatttggaccaatagcccacagctgagaatgtggaatacctaaggatagcaccgcttttgttctcgcaaaaacgtatctcctaatttgaggctcagatgaaatgcatcaggtcctttggggcatagatcagaagactacaaaaatgaagctgctctgaaatctcctttagccatcaccccaaccccccaaaattagtttgtgttacttatggaagatagttttctccttttacttcacttcaaaagctttttactcaaagagtatatgttccctccaggtcagctgcccccaaaccccctccttacgctttgtcacacaaaaagtgtctctgccttgagtcatctattcaagcacttacagctctggccacaacagggcattttacaggtgcgaatgacagtagcattatgagtagtgtggaattcaggtagtaaatatgaaactagggtttgaaattgataatgctttcacaacatttgcagatgttttagaaggaaaaaagttccttcctaaaataatttctctacaattggaagattggaagattcagctagttaggagcccaccttttttcctaatctgtgtgtgccctgtaacctgactggttaacagcagtcctttgtaaacagtgttttaaactctcctagtcaatatccaccccatccaatttatcaaggaagaaatggttcagaaaatattttcagcctacagttatgttcagtcacacacacatacaaaatgttccttttgcttttaaagtaatttttgactcccagatcagtcagagcccctacagcattgttaagaaagtatttgatttttgtctcaatgaaaataaaactatattcatttccactctattatgctctcaaatacccctaagcatctatactagcctggtatgggtatgaaagatacaaagataaataaaacatagtccctgattctaagaaattcacaatttagcaaaggaaatggactcatagatgctaaccttaaaacaacgtgacaaatgccagacaggacccatcagccaggcactgtgagagcacagagcagggaggttgggtcctgcctgaggagacctggaagggaggcctcacaggaggatgaccaggtctcagtcagcggggaggtggaaagtgcaggtgcatcaggggcaccctgaccgaggaaacagctgccagaggcctccactgctaaagtccacataaggctgaggtcagtcaccctaaacaacctgctccctctaagccaggggatgagcttggagcatcccacaagttccctaaaagttgcagcccccagggggattttgagctatcatctctgcacatgcttagtgagaagactacacaacatttctaagaatctgagattttatattgtcagttaaccactttcattattcattcacctcaggacatgcagaaatatttcagtcagaactgggaaacagaaggacctacattctgctgtcacttatgtgtcaagaagcagatgatcgatgaggcaggtcagttgtaagtgagtcacattgtagcattaaattctagtatttttgtagtttgaaacagtaacttaataaaagagcaaaagctattctagctttcttcttcatattttaattttccaccataaagtttagttgctaaattctattaattttaagattgtgcttcccaaaatagttctcacttcatctgtccagggaggcacagttctgtctggtagaagccgcaaagcccttagcctcttcacggatctggcgactgtgatgggcaggtcaggagaggagctgcccaaagtcccatgattttcacctaacagccctgatcagtcagtactcaaagcttggactccatccctgaaggtcttcctgattgatagcctggccttaataccctacagaaagcctgtccattggctgtttcttcctcagtcagttcctggaagaccttaccccatgaccccagcttcagatgtggtctttggaaacagaggtcgaaggaaagtaaggagctgagagctcacattcataggtgccgccagccttcgtgcatcttcttgcatcatctctaaggagctcctctaattacaccatgcccgtcaccccatgagggatcagagaagggatgagtcttctaaactctatattcgctgtgagtccaggttgtaagggggagcactgtggatgcatcctattgcactccagctgatgacaccaaagcttaggtgtttgctgaaagttcttgatgttgtgacttaccacccctgcctcacaactgcagacataaggggactatggattgcttagcaggaaaggcactggttctcaagggcggctgcccttgggaatcttctggtcccaaccagaaagactgtggcttgattttctcaggtgcagcccagccgtagggccttttcagagcaccccctggttattgcaacattcatcaaagtttctagaacctctggcctaaaggaagggcctggtgggatctacttggcactcgctggggggccaccccccagtgccactctcactaggcctctgattgcacttgtgtaggatgaagctggtgggtgatgggaactcagcacctcccctcaggcagaaaagaatcatctgtggagcttcaaaagaaggggcctgga

SEQ ID NO: 2489 - DNA, 6000 bp, Homo sapiens
tcttttattattagttattattgttagtttcttagatgcagaccgaagctaacaatagtaactaataataaaatagaacaattataacaatacactgtactaaaagttatgtgaaagttacctgcgtctctcaaaatatcttttttttttttttttttctgagacggagttttgctcttgttgtccaggctggagtgcagtggcacaatctcggctcactgcaacctctgcctctcgggttcaagtgattctcctgcctcagcctcccgagtagctgggatcacaggtgcccgctaccacgcccggctaattttttgtacttttagtagagatggggtttccccatgttggccaggctgttctcaaactcctaacctcaggtgatccgcctgcctcagcctcccaaagtgctgggattacaagtgtgagccaccacgcctggcctcaaaatatcttattatactgtactcactcttcttatgatgatgtgagataatacaatgcctacatgttgagataaaatgaggtgaatagtgagataattcatatccagggtgagaaggagtgggtcaacatgacatttcatcacagtatttagaattgcatgcaatttaaaacttctacattgtgtatttctagaatttttcatttaatatatttggactgctgttgattacgggaaattgtggaaagtgaaactgggctgggctctgtggctcaagcctgtaatctcagcactttgggaggctaacgcaggagcatcgcttgagctcaggagctcaagaccagcctgggcaatgtagtgagaccccatctctacaaaaaaatagaaaaattagccaggcatggtggtgtgcacctgtgggattgcttgagcccaggagttccaggctgctgtgagccaagatcatgtcactgcaattccagcctgggcaatagagcaagtccccgttgaaagaaaagagagcgaaagagagaaagagagaaagaaagaaaggaaggaagggagggaggaagggaggggggagggagggagggagggaaggaagaaaagaaagaaggagggaaggaagtaaaaaagaaggaaagaaaaggaagaaagagaaactgtggaaaatgggggatgcctgtatttttaaaataaaatttactatatgatactgtgaaataatcccactgatgtttgactagtaccactgatggtgtgaaacagaaagcttttgtgatcctggttacagatcatatcagacaggattcagatacaagagcctgcaggcagctactgcttgttatatagaaacagctaagaaaagcataattctttccagcaaaaacctgggacacacgaggacttcctttcaataggctgcttaagccccatggcttcagcaaaatctcaaaatcgatatgagactctgttcatttgattaatttttctaattattcagcagttttttgtagtttggttttattgtacagaaaatcagtccgttgaatgtttatgaagctcagatttatccatacagaaggaattttaatttttgaatatgtaaaggtcacaggacttgtcagtggaagcagcttttgaatatttgctttatcacttgctaggtgtctgtgaccttgggaaaaatgtctagcgctttctgtgattaaaaacatggggagggctgggagccagggctcaccctgtaatcccggcactctgggaggccgagacaggtagatcacctgaggtcaggagtttgagaacagcctgaccaacatggtgaaaccctgtctctactaaaaaatacaaaattagctgggcgtggtggcacatgcctgtaatcccagctactcgggaggctgaggcaggataattgcttgaacccgcaggcagaggttgcggtgagccgagatcacgccattgcacttcagcctgggcaacaagagtgaaactctgtctccaaaaaaaaaaataaataaaaaagcatgggtagtgggttcaagctgcctgctttcacaaacctgaccctgttacttgctcactgtgtggctttgggaaaattatgatgcctcaatttctttctctgtaatattcatgcaactcttccataagtctaaaatcatttttcataaaaaatttagaagggccagacatggtggctcacgcctgtaatcccagcactttgggaggctgaggagggaggattgcctgagcctggaagtttgagaccagctagaacaacatagtgagaccctgtctctacaaaaaatacaaaaaaatagccaggcatggcagcacgtgcctgtagttccagctactcaggaggctgaggtgggaggatcgcttcagcccgggaggttgaggctgcagtgagctgtgatcatgccaccgcactgcagacagggccacagatcaagaccctctctctctctctctcaaaaaaaaaaaaaaggttaaaagtatattttcttttttaaatatagaaaagcaatatacatataaaggaaattgtcatattatcagattcttttctgcactcagccctaacaaaacatgctgtcttcaacttaaattagttgaagacatctttatttagttgaagagagaaaaagttctaagttgggttccttttatccgaggaatctcaacttttactatatattgttcaaactgaaaagagactttgtacttaatctcagatgtcattaagtagttgaaataaattagatttctagttaaattaagagctgcttcaagttcttaattagtagtaccttcaatagtcaggaatatacactctttttgttgttgttgttgttgttgagacggagtttcgctcttgttgcccaggctggagtgcaatggcgcaatctcggctcactgcaacctctgcctcctgggttcaagcgattctcctgcctcagcctcctgagtagctgggattacaggcatgagccaacacgcctggctaattttgcatttttagtagagacggggtttgttcatgttggtcaggctggtcttgaactcctggccccaggtgatctgccagtcttggcctcccaaagtgctgggattacaggcgtgagccactgcgcccggtctgtccatggattttttaaaaaacgtgttttgagcaatctaaaacaaaagcagtctgcctaaaatttatatttatgtatttctactatattacagatattgattttgtggagctataatttaataagatattttaacagtaataaaacattatataattttgtatattgttatttcctaaaaagtttagttatttaagtgcaaatgcaaaaggcaggagtgctcatattgaagcactaggaaaaaactttgtgggtaaaaattcaacctcaaatatgcaaatatttaactttcaatgtggaaattatgtctttttacaaaagaaaaatgaacatatttgtttgcaaggtgttcttatacacacacacgcgcacacacacacatacatacacacacggcctttagaatatggtaaccaggccaggtgtggtggctcatgcctataatcccaacactttgggaggctgaagtggttgtatcctgaggtcaggagttcgagactagcctggccaacatggtgaaaccctgtctctactaaaaatgcaaaaatcaaccgggtatggtggcgggcacctgtaatcccagctactcaggaggctgaagcaggagacttgcttgaacccgggaggcagacgttgccctgagcctagattgcgccattgcactccagcctgggcgacagagcaagattccgcctcaaaaaaagaaagaatatggtaatcaaaaacatctatattctttttaggtggtctttgaaaaacaatagcaaatctatctgcaaacacatctaggcggggcaagagagtgaaaatgggacattaattaagattgattgatggaaaaagtgatgtaaaaagtagaaggacaaaatcccttccacaattttgaggaaagttctttgaatttgtcttttatcactcagcttaataagaaataaaattgaaaataaattaaatagaccaggcacggtggctcaggcctgtaatcccagcactttgggaggctgaggcgagcggatcacgaggtcaggagatcgagaatatcctggctaacacggtgaaaccccgtctctactaaaaataccaaaaagtagccgggcatggtggtgggcgcctgtagtcccagctactcgggaggctgaggcaggagaatggcatgaacctgggaggcggagcttgcagtgagccaagatcgcgctactgcactccagagcctgggcaacagagccagactctgtctgaaaaataaataaataaataaataaataaataaaataatttacattgtcctactatttacattttactaactccatatgtgtagaggtataagggatttttagaagagaaacaaggttgagacttctaaacctgaatttggataaaagatcaatcttcaaaagtattgataattttggaaaataatttttaagaaaagcatgacagccagtgattacctagttatgcaatttgttgtcagagattgtgaaggctttactataaaaactataggatggctgggcgcagtggctcacgcctgtaatcccagcactttgggaggccggggcaggcggatcacgaggtcaggagattgagaccatcctggctaacacggtgaaaccccgtctttactaaaaacacaaaaagaaattagccgggcgtggtggcgggtgcctgtggtcccagctactcgggaggctgaggcaggagagtggcgtgaacccaggaggcggagcttgcagtgagccgagatcgtgcccctgcactccagcctgggcgacaaagcgagactccgtctcaaaacaaaaaacaaaaaacaaaaaaactgtgagatgaacaatgatgagattttgtttgtcttctttcttcataggtgaatattataccactgattgccaaagcagacactatttctaaaaatgatttacagacgtttaagaataagataatgagtgaattgattagcaatggcatccagatatatcagctcccaacagatgaagaaactgctgctcaagcgaactcctcagttagtgtaagtttcagtaacatatctgacaaagaggctagaaatgagtgtttatccagaatccagtgtgagaatttttaatttttttaattttgtaaagcttctgctgagaatcgattctttgtaaacagatttatttagatttaattcatacagcatgttcctcaaggatattggcctataattttcttcttgaaagtgtgttttcttgctttgatatcaaggggatgctgcctcataaaatgactctgaaggtgttacctcttttttctattttttcaaagaatttgaggatgttttatattaaattttctttgaaagtttggtagaatttacccatgaagtaatctggtcctaggctatattttggagttttgaaaaattacttctttagtttctctatttgttattggtctctttaagctctctatttattcttcattccatcttggtagtttatatgtttctagtaatttcaccatttcttctaagttgtcaagttggttggtgtataattgttcatagtagtcccttataattctgtttatttctgtaagaaataaacttctgtaataagttgtaatgtcttctctttcatttcttattttattaacatattctctctttttgttcttagtctaagtaagggctttgattttgagtttttttccccaaatcaactcttagcttcattgattaattttttgttttgttttcttttttgagacagagtctcactctgttgcccaagctggagtgcagtggcacaatctcggctcactgtaagatctatctcccggcttcaagtgattctcctgcctcagcctcccaagtagctgggattacaggagcatgccaccacacttggctaatttttgtgt

SEQ ID NO: 2490 - DNA, 6000 bp, Homo sapiens
gtgcctattaaagtcagtaatggccattattgttccattgtggaaattaaattatgtaagcttcctaatatcataaacatattaaaattcttctaaaatattgcttttcttttaagtgacaatttgactattcttatgataagcacatgagagtgtcttacattttccaaaagcaggctttaattgcatagttgagtctaggaaaaaataatgttaaaagtgaatatgccaccataattacttaattatgttagtatagaaactacagaatatttaccctggaaagaaaatattggaatgttattataaactcttagatatttatataattcaaaagaatgcatgtttcacattgtgacagataaagatgtatgatttctaaggctttaaaaattattcataaaacagtgggcaatagataaaggaaattctggagaaaatgaaggtatttaaagggtagtttcaaagctatatatattttgaaggatatattctttatgaacaaatatattgtaaaaatttatactaaggtcatctggtaactgtgggattaatatggtcgaaaacaaatgttatggagaagctgtcccaagcaaactaaattacctgtacttttttcccatttcaagggaagaggcaaccacatgaagcaatacttcttacacatgcctaagaacgttcattgaaaaaataaatttttaaaaggcatgtgtttcctatgccaccaatacttttgaaaaattgtgaaccttacccaaaaccatttatcatgtccattaagtatatttgggtatataattaggaagatatttacatgttccatctccacagtggaaaaacttattgaggctaccaaagtgtgccaagaaatgtaagtccttagagtaattagaaatgctgttttcctcaaaagcatgagaaactagcattttcatttcttatttactccctttctatatcaatgcaattcacaacccaattttaatacatccctatatctcaagcatttctatcttgtactttttcagaaaataaaccaaaaataatcctttggtctctctatcttctgacctttgtaagcaacagaaatgtaaaaacagaaggggtccaatttttacacgtttttttctcaagtagcctttctggggatttttattttcttaatgaagtgccaatcagcttttcaaaatgttttctatttctcagcatttccaggaagtgataacgtttagctaaatgagtagaagtggacttccttcaacatattgttaccttgtctagccttaggaagaaaacaagagccacctgaaaataaatacaggctcttttcgagcatctgctgaaatactgttacagcaatttgaagttgatgtggtaggaaaggaaggtgacttttcttgcaaaagtctttctaaacattcacactgtcctaagagatgagctttcttgttttattccggtatattccacaaggtggcacttttagagaaaaacaaatctgatgaagactaaagaggtacttctaaaagagatttcattctaactttatttttctgcgcatatttaactctttcctagcacttgttttttgggatgattaatagtctctataatgttctgtaacttcaatattttacttgttacctaggttctgaacaattgtctgcaaataaattgttcttaaggatggataatacacccattttgatcatttaagtaaagaaagcctagtcattcattcagtcaagaaaaaatttttgaagtacccagttaccttacttttctagattaaaacaggcttagttactaaaaaggcagtcctcatctgtgaacaggatagtttcgttagaagtataaaactcctttagtggccccagttaaaacacacataccctctctgctgctttcaaattccctagcatggtggcctttcaacattgattaaattttaaaatcctaatttaaagatcaggtgagcaaaatgagtagcacatcagtaattcagtagacaaaacttttgtctgaaaaattgctgtattgaaacagagccctaaaataccaaaagaccaggtaattttaacatttgtggaatcacaaatgtaaattcataagaagctctaattaaaaaaaaaaagtctgaagtatatgagcataacaacttaggagtgtgtctacatacttaacttttgaagttttttggcaactttatatactttttttaaatttacaagtctacttaaagacttcttataccccaaatgattaagttaattttagaggtcacctttctcacagcagtgtcacttgaaatttagtagggaaggatattgcagtatttttcagtttccttagcacagcaccacagaaagcagcttattccttttgagtggcagacactcgacggtgcctgcccaactttcctcctgagtggcaagcagatgagtctcagtaattcatactgaaccaaaatgccacatacactaggggcagtcagaaactggctgagaaatcccccgcctcattcgcccctctgctcccaggaactagagtccagttaaagcccctatgcgaaaggccgaattccaccccagggtttgttataacagtggccagtctgaaccccatttgctcgtgctcaaaacttgattcccacttgaaagccttccgggcgcgctgcctcgttgccccgcccctttggcaggagagaggcagtgggcgaggccgggctggggccccgcctcccactcacctgccggtgcctgaaattatgtgcggccccgcgggctgctttccgaggtcagagtgccctgctgctgtctcagaggcatctgttctgcaaatcttaggaagaaaaatgtccctagtagcaaacgggtgtcttctgtgcataaataagtacaacacaattctccgaaagttcgggtaaaaagagatgcggtagcagctgccctgtgtgaagctgtctaccccgcatctctcaggcgctaagctcagtttttgtttttgtttttgtttttttaaagaaaagatgtataattgcaggaatttttttttatttttttattttccatcattctatatatgtgatggtgaaagatatgcctggaaaagttttgttttgaaaagtttattttctgcttcgtcttcagttggcaaaagctctcaattctttagcttccagtttcttttctctctttttctttgttaggtaattaaaggtatgtaaacaaattatctcatgtagcaggggattttcatgttgagaggaatcttccgtgtgagttgtttggtcacacaaataaccctttctcaattttaggagtttggattgtcaaatgtaggtttttctcaaagggggcatataactacatattgactgccaagaactatgactgtagcactaatcagcacacatagagccacacaattatttaatttctaactctctgtggtccctagaaaaattccgttgatgtgcttaggttaaagttctgaagatacccgttgtacccttacttgaaagtttctaatcttaagttttatgaaatgcaataatatgtatcagctagcaatatttctgtgatcaccaacaactctcagtttgatcttaaagtctgaataataaaacaaatcccagcagtaatacatttcttaaacctcacagtgcatgatatatcttttcattctgatcctgtgtttgcaaaaatatacacatgtatatcatagttcctcactttttattcatttgttttcctattacctgtagtaaatatattagttagtacatggaatttatagcatcagctacccccaggaacagcacctgacaggcgggggattttttttcaagttgttctacatttgcataaattatttctattattattcatgtatgttatttatttctgaatcacactagtcctgtgaaagtacaactgaaggcagaaagtgttaggattttgcatctaatgttcattatcatggtattgatggacctaagaaaataaaaattagactaagcccccaaataagctgcatgcatttgtaacatgattagtagatttgaatatatagatgtagtattttgggtatctaggtgttttatcattatgtaaaggaattaaagtaaaggactttgtagttgtttttattaaatatgcatatagtagagtgcaaaaatatagcaaaaataaaaactaaaggtagaaaagcattttagatatgccttaatttagaaactgtgccaggtggccctcggaatagatgccaggcagagaccagtgcctgggtggtgcctcctcttgtctgccctcatgaagaagcttccctcacgtgatgtagtgccctcgtaggtgtcatgtggagtagtgggaacaggcagtactgttgagaggagagcagtgtgagagtttttctgtagaagcagaactgtcagcttgtgccttgaggcttccagaacgtgtcagatggagaagtccaagtttccatgcttcaggcaacttagctgtgtacagaagcaatccagtgtggtaataaaaagcaaggattgcctgtataatttattataaaataaaagggattttaacaaccaacaattcccaacacctcaaaagcttgttgcattttttggtatttgaggtttttatctgaaggttaaagggcaagtgtttggtatagaagagcagtatgtgttaagaaaagaaaaatattggttcacgtagagtgcaaattagaactagaaagttttatacgattatcattttgagatgtgttaaagtaggttttcactgtaaaatgtattagtgtttctgcattgccatagggcctggttaaaactttctcttaggtttcaggaagactgtcacatacagtaagcttttttccttctgacttataatagaaaatgttttgaaagtaaaaaaaaaaaatctaatttggaaatttgacttgttagtttctgtgtttgaaatcatggttctagaaatgtagaaattgtgtatatcagatactcatctaggctgtgtgaaccagcccaagatgaccaacatccccacacctctacatctctgtcccctgtatctcttcctttctaccactaaagtgttccctgctaccatcctggcttgtccacatggtgctctccatcttcctccacatcatggaccacaggtgtgcctgtctaggcctggccaccactcccaacttgacctagccacattcatctagagatggttcctgatgctgggcacagactgtgctcatggcacccattagaaatgcctctagcatctttgtatgcatcttgatttttaaaccaagtcattgtacagagcattcagttttggctgtggtaccaagagaaaaactaatcaagaatataaaccacattccaggctgctgttttctctccatctacaggccacacttttactgtatttcttcatacttgaaattcattctgctattttcatatcagggtacagacttataagggtgcatgttccttaaaggtgcataattattcttattccgtttgcttatattgctacagaatgctctgttttggtgctttgagttctgcagacccaagaagcagtgtggaaattcactgcctgggacacagtcttataagaatgttggcaggtgactttgtatcagatgttgcttctcttttctctgtacacagattgagagttaccacagtggcctgtcgggtccaccctgtgggtgcagcacagctctctgaaagcaagaaccttcctacctattctaacgtttttgccctctaagaaaaatggcctcaggtatggtatagacatagcaagaggggaagggctgtctcactctagcaaccatccctccattacacacagaaagccctcttgaagcaaaagaagaagaaagaaagaaagcttatctctaaggctactgtcttcagaatgctctgagctgaatgctcttgctcctttcccaagaggcagatgaaaatatagccagttt

SEQ ID NO: 2491 - DNA, 6000 bp, Homo sapiens
aatttaatatttgtagcttactatttttttaataaatgatttattcaaataaattctagccatgatgtgctgcttcctatttgctggcaattatttctggattatataaacatgttaattaccagcaagtaaatcttgttttaaaaggcaaatgataagtgtgaacaattatcaaaatggaggattcccacttgtgtctctggcttaaagtctaattagtgacttgtagtgatccaatatttttatgtaaatataaaatctaatgatttgccttcttaaatttataaggtatatgagattatagatagctttataaatacaaattttgttcagaaaactggatcttattttagaagacatgctcttaacacaaatgtattttatgaattatcttaagcttaaagacatacaattattcacttttatttttaaagaaaaaagtattataatgcattgcaaaatatgtgctactgaaaatgcatcaatttttatttccctagccttacctcacactataacatagaatcagttttataaaggcaaaaatttgatttactgtgagattagtaacatggttttaaagtcaaaagatttatagaagtagtatttccaattcaaacagaattttgccaggttttaatttttctacaaagcacttaagtaaataattttgtgaaaagttttgctttaagatgttttaaagggtttcaagtattctacagatagagattttggggagaacaccaaattctttccaaaaagacagctatttcaagttttcttttactccattgtagaaagttttaaagacttttttttctccaaaatctaattttcacctgaaataattgtattcaagggtttctcagcaggtaaagtatacattcttacaaggtttcaaatttcagatttccaataatgcatttaaactgagcactcctctttttgtgtatgtatctactatctgcagttctattatttacactaaattttagtctttttagctcctctgaaatacgttagtgaaccctcagcagttactaaccacttaataattgtgagcccgccagccccttcaagtagatcgttaaccataagagtgcctgacaatttccaaaccatatcctctgtctaaaaggaaaagatagggctttgtgaggcagaaaggaagcgaaggaaaacaaaacaaatgtagctcatgctgaaagtgaaaagtgcttggatagattagtattttcttttctgcaaggcatcctgccaaactttttctttatttttttaagagaagagttattttttggtctgatttttcagtttcttggaaagtattggtatttaccacccccattggccgctcataattattgttggttgttttgtgtttttcccatccgtccacgtcacacagtgaggatgccccccgcttcaccctgtcaaaaccccaactctgggcgaccctgggtttggaaactccgccgactcccgacgacacgtcccactctctcccactaatgccgcttattttagtcgcaggatccccctactacagtttcagcgaaagccggaaattttcatttaactctcccccccacccccacccccaccgcgcccttctagcccccgactcgtagaagggagctagggagcccggagctcggagcactgccgggactcggccgcctcatttctctccggaaggctttaatttgcacactttcttgccactgcgccacgagcccccagccccgccggggggtgggtctccggcagagttggcttcgcgggtccctgcccccaccccgcacggtcgccccagctgcctccccggctggggcccccagcgccggccggagcccagcggcccccgtccgcccccagcgagcggcgcgggcggcgccctccgccgtccctccgccctccgccgctgtgcccaccccctcgccggagagagtgctggtaactccttccccagagtctgattacctgctccgcgaggccgcggacacgtgcggagagccgactgacactcgcagccccctcgggaggcccgacgcgactgggcccctcaggtgaggagctgtgcgctcgggtgggtgggctgcggggtggggggtcccgggggagatctgggggattggccggggtccgaggcagaactgtgggtggggtaagtggagggtggcggggggtgggggggacctgtgtttccttggaatcggctttggttaaccccttacgaactgagacgggattggttatgggggccagttttggggagctagaggattctccttatctgatgagagggggagatcccagcctagggacacccgcgacaccgagatcctgcttccacgtatccgtacgcacacacacccacacggaacacgcctcatacagtttctccaaacggaactggaactctactcggacactcacataataattcacatttagggtttaaaatgcactgcctctagggactccatgctggagaatgtgcttgcatttccccctcgaaaactccctctccagctcgctgaggtgtgggtgtgggctccaccttcccctccacgagataaatgttaacgcaggcttcctgcgggcgtgttatacacagaaaagtgcacgcagccggccagtgcccaggcttggagccccgcgaagacgcacgtttgctgtagtttccaagtttacttttataatttaaaatattggagttaaacacacgccccgcagtgagcagccctggtccccgcagcgcgcccgtccgtgtgcatatgggcgcatctgcgtgtgcgcacacgcgggagtcgcggtccccggtgtggcctcttgtcgctgtgctggtggcgacccttgtggtgcttggcaggcttcgggagaggcgcatgaaggatttcattgagtgtgaagacagagagcagagacagaaagcagaaggaggcggctgcagcctttgtagtcgcggaggaatgcggaaatgttgaagcactatgtcaaactttttttgaaatggggtcaagtcacattcagccagcgtgggaaagcaacaacaacaacaaaaaaaagtggaggagagggggggaaaaggcattgctgctcccgtttctctccgccgaagccgaccgtctggggggcgagtggggggagagccagggcagtgcggggcccggcgggggcagcaggcgcagttccctgcgggggtgggacgtccccgacgcttccttcgctgcggagcccggggctagactcgagcgggagggggttggggggatgcaggacaggcgggttgggcggccggcggcggctccccggctacctgtgtggccctcgacctggctcagacccccgggcagtccctgggggctctttcctcggcttttaaggaaagttctgaatgtagtgagtgccagaagctctgctctcgccgcggtccgctccacccgctcatcgtgggggtcgcgccgtttgtttaattcctggcaaaaggcgagcgggccagcggttgcgaggcaggtaattccgaggtgccccgggaattccggacatgcggccgtcgtggtgaaagtcctgccgaggccgcggcggccctggaggagggaggccccctaggtcccagatagctgctgaatggggagggaaagttagggtaccctactctggcgctttgttgtgcagagggctccgggggcgtccggctgcagactggaccgggcctttagccggagggggaatggggcagccacctctgctacctacagcggggaggtcctgggaatgggaaaaggttcgcgagtccgggccccgaggacagagaccttctctctcacccctggaggcgcaggatttaaccccccaccccccaccctttgaaagggaggttgagttttgctcaggtcgaaatcagtttaaaacttaaggacgaggcgcgattatgctatccccttcctgaagttattctttaaggagacgacaagcgaaattgtggcgaacacccctttctcccacccttgggatcccgtgggggacggtgtctcccctcccccaggaccgctcgctcgcccacccccgataagccccaaccctccccgaccagatggctggtcttcccaaggtttccaccagggaggtcctcccagccggagagagaattccgtttccaaccgagactcctttaccccaaaaagaccatttgtgtatgcgagtcgtttttaaatgtctcctcgtagaaaaactgaaagtagaaagaaaggaagcaatttctgagcagatgtctgaccaccccttctcgcacactcccagcatcgggttacagggtcctgggagcccccacccacattctgcggccccacacggatggacccacagtccttccgctccagcttgtgcgcgacccctgaacgccctccggcacccctggaccccgtctccctgcacgtccgggcctcaggaggcggggagggtagcggcgcaacacaatgatatagggataaatattaagccgtgacattgacgtgcccggcgcctcccctcccccgcgctcccggcacactctgggctgctcggcacgccccctcccgttccactgcgtcccgcgccgctcgctcatccccgaggggcccctgcaacctctccgcgcgaagacggcttcagccctgcagggaaagaaaagtaacttcgcttttctcggaggaaccaggaaggattaagcggcttgggagagggcaggagcgcgcggagggtagcgatggaggcttcgtaaaggaggaggaggggagtctggaggaaccccgaggaaggcttctgggctgtctgattgcactttcttcttatcctcccgtctcctcctttaggtgcaatgattctggactgagacgcgcttgggcagaggctatgtaatcgtgtctgtgttgaggacttcgcttcgaggagggaagaggagggatcggctcgctcctccggcggcggcggcggcggcgactctgcaggcggagtttcgcggcggcggcaccagggttacgccagccccgcggggaggtctctccatccagcttctgcagcggcgaaagccccagcgcccgagcgcctgagccggcggggagcaagtaaagctagaccgatctccggggagccccggagtaggcgagcggcggccgccagctagttgagcgcaccccccgcccgccccagcggcgccgcggcgggcggcgtccaggcggcatggagaaggacggcctgtgccgcgctgaccagcagtacgaatgcgtggcggagatcggggagggcgcctatgggaaggtgttcaaggcccgcgacttgaagaacggaggccgtttcgtggcgttgaagcgcgtgcgggtgcagaccggcgaggagggcatgccgctctccaccatccgcgaggtggcggtgctgaggcacctggagaccttcgagcaccccaacgtggtcaggtgagccagggagctgcgccctcgccatctggggcctcgcgcgcgcggggagggccgagccgggaatcctcaggcccagaaaggtgcggggcagagggcgactggggaggtcctgcgcgacctgttggtcttacagagtgagagttaagttttgtcgacagagccgcgagccagagccggtgaccttgccagacagcgagccgaaagacaagtcaaaaaaacatgacctgagcaggcttccctgcagctgtgcaacttagaagcgttttctccctgcccaccctgaaggagggtctgggggaagtgggtgcgttttagggacaggataagccaacctgagacatgccccgctagcccccgcatatttttcgtggccatgccgttggggaatttttgaaagacagagtaggtgagactggagaatgaggatgccgtgtgataatcagtgggaactttatgggtggagccaagtgtaaatcaggttaacaagatgcagaaacatcataatatttttgccagtcatactctcagtttctctttatta

SEQ ID NO: 2492 - DNA, 6000 bp, Homo sapiens
tcagacaaaaatgtttcaaatgactaatatcggcaacacaagaaaaaacacaccaaatttaccccaagtagcaggatgacctggctctttcctgtttaagcaacatggaacactggtcctcaactttcaaatgttattctagttatgtcacggtgtaccagtctgttctgtggccgcttgactcagtaacactcctagaaggggacaagaactattactgcatttattgaccacttactagggccagaggacacaacaaggagttggaggattgctaaagggataagcatgctggatgctctggggaggactcagggtggcttagtaaggtagaaagcaaattgcctcaaggagttagagcaaagggggatgtcttccagctgagggaatctcaaaggttttatggaagagctgagcgtgcaaggatgataggacttagagaagagggctaacaaggaaaagagctgtaggtagagaaaacacatttctgaggtcctgaaatcagcacgtagatccttaaactttattaagcagttccaaagaagagggtctaaaggatgcaaagtcaacttttctgttgacatacaattattggacataaaatgcttgccagttactgtgctaggtaccggggatgcaaagatatgagtaattttgaacaaatttataacaaggtttagaaatcaaactatcgcttcaatttatggaaaatgtttgatccacagaaatatgctatgatatattttcttctaggcattcaaagaattctgcaaagaattccattctatgttattttcgggaaaaatccagaataagacaacataaaatagatttacatgtgaatatggagtcatacagtatacaacctcatttaataagacagatttaattgcataataggatagacacagaaggccattcatcctgaaagaatcgggttgcctggctacgccatacctataagcactgaggctgcatctctcagccccacgacctcagcatgtgcttccttcacttgtccctgatgccaggccattcatagaagtttctccccgggtgccttctttgtccctcctcctacctctgagatcccactttatcatcgttcactcccactgtgttatacctccactgctgcaactgaatggtctatctaaagcatgtaaacaccttttagctcaaccaaaaccagctatggtaacacaatttttaggccatgtgtgcagctgagatgcaagtattatctcagaaaagaaatgttagaaaccagtgaaaattacaggtcactgtaaatagaaagaaaatataggtattttaacgtgattatcaccatcttttgtaagtatatttccatagttatttttctgattactcagaattctaatatagatgatgaaagaatcttaagaacatgtttcaaacatgtcataacaatatgccaagaacatacaggtattcacacacacacacacacaaaggaaaaagaagatatgggtgtctatcaaaagggaaaaattaaaaaagatgatggcaattatacaaatatgaacatagtactgacatgttgcacaaagaaaattatagagtagtagaaccaatggaagcagcatgttccaaaagacagtaatgtttgttttttcctccttaaatgttataagctactactttatatctattttttccctcatggcagatatcaaaatcatttcaagtttcactgctcaaatgcagtgcaatagatcacatgcaacagtaaaaacagaaaaacccaggtcatttccaaattgacagaaagaatttatttagaagactgaactttaaaaatcatttaaagctcagaattttacaatgcaaaaagttgataatacaattgacttttcctaagctatttagcaaactttcggtaatatagttcaggggaaaacccaagaaaatatcttggaaatgtctgagaagggaaagaagaatgcattaaaatgtactgcatttatattatgctatttctgttaaaattatagtttctcatgattattactcaataaagataacatgtacacaaacacataaatcaggttaaaaagtagggtaacttgtttcaaggttaaactagaagtgtattttaaaataattgtgtagtacattatagcaaaatctcatttctgagtttctggaaaatatattttataaactcaaatagccaatataaatcagaaatgaattagatttaggtgtacattatataattattatttgtaactaaattacacatttccttaacaagttaaaaattatagaccaaaatttaaaattttatgtttattttagtgaaaacaaaattgtacaggtatttgatatataaatgttcacacatgaaatacattccttgtgtgacattaagaagtctttcagtgtaagttacaccaccatatttggaaataagtccatgaaatgtaatttttaaatacctgtaagatgatttgcaactttagaatatctggtatgtagtgtgaaaatactggttggagtcattattcttgagttctatatattaattctcagaagactcctaaacaaagaagttggaatttggttcacagtttaaaaagtttgaacatattttcttatgataacctgttacccacagcagaagttatccataaacaaaaataatctggtatttactaattttatacaatcaattgtaaaactgccttgggtctgaagctttcaccaactgggacttaatgtgaaccataagcaggaagagtgaacaatgataaattaacataaaagatagcagtatcaggaaaagaagaggacagagagttaacactcagtactaacatatataattaaataaagtttcattgttttttacattgtccaaatgatctagtaacctaaatcatggaatttctgatctagcaatggttgttgtcaaattcagtaactaaaaattcaacccagtgtagaaaagacacttctctgttaatttaatatttgtagcttactatttttttaataaatgatttattcaaataaattctagccatgatgtgctgcttcctatttgctggcaattatttctggattatataaacatgttaattaccagcaagtaaatcttgttttaaaaggcaaatgataagtgtgaacaattatcaaaatggaggattcccacttgtgtctctggcttaaagtctaattagtgacttgtagtgatccaatatttttatgtaaatataaaatctaatgatttgccttcttaaatttataaggtatatgagattatagatagctttataaatacaaattttgttcagaaaactggatcttattttagaagacatgctcttaacacaaatgtattttatgaattatcttaagcttaaagacatacaattattcacttttatttttaaagaaaaaagtattataatgcattgcaaaatatgtgctactgaaaatgcatcaatttttatttccctagccttacctcacactataacatagaatcagttttataaaggcaaaaatttgatttactgtgagattagtaacatggttttaaagtcaaaagatttatagaagtagtatttccaattcaaacagaattttgccaggttttaatttttctacaaagcacttaagtaaataattttgtgaaaagttttgctttaagatgttttaaagggtttcaagtattctacagatagagattttggggagaacaccaaattctttccaaaaagacagctatttcaagttttcttttactccattgtagaaagttttaaagacttttttttctccaaaatctaattttcacctgaaataattgtattcaagggtttctcagcaggtaaagtatacattcttacaaggtttcaaatttcagatttccaataatgcatttaaactgagcactcctctttttgtgtatgtatctactatctgcagttctattatttacactaaattttagtctttttagctcctctgaaatacgttagtgaaccctcagcagttactaaccacttaataattgtgagcccgccagccccttcaagtagatcgttaaccataagagtgcctgacaatttccaaaccatatcctctgtctaaaaggaaaagatagggctttgtgaggcagaaaggaagcgaaggaaaacaaaacaaatgtagctcatgctgaaagtgaaaagtgcttggatagattagtattttcttttctgcaaggcatcctgccaaactttttctttatttttttaagagaagagttattttttggtctgatttttcagtttcttggaaagtattggtatttaccacccccattggccgctcataattattgttggttgttttgtgtttttcccatccgtccacgtcacacagtgaggatgccccccgcttcaccctgtcaaaaccccaactctgggcgaccctgggtttggaaactccgccgactcccgacgacacgtcccactctctcccactaatgccgcttattttagtcgcaggatccccctactacagtttcagcgaaagccggaaattttcatttaactctcccccccacccccacccccaccgcgcccttctagcccccgactcgtagaagggagctagggagcccggagctcggagcactgccgggactcggccgcctcatttctctccggaaggctttaatttgcacactttcttgccactgcgccacgagcccccagccccgccggggggtgggtctccggcagagttggcttcgcgggtccctgcccccaccccgcacggtcgccccagctgcctccccggctggggcccccagcgccggccggagcccagcggcccccgtccgcccccagcgagcggcgcgggcggcgccctccgccgtccctccgccctccgccgctgtgcccaccccctcgccggagagagtgctggtaactccttccccagagtctgattacctgctccgcgaggccgcggacacgtgcggagagccgactgacactcgcagccccctcgggaggcccgacgcgactgggcccctcaggtgaggagctgtgcgctcgggtgggtgggctgcggggtggggggtcccgggggagatctgggggattggccggggtccgaggcagaactgtgggtggggtaagtggagggtggcggggggtgggggggacctgtgtttccttggaatcggctttggttaaccccttacgaactgagacgggattggttatgggggccagttttggggagctagaggattctccttatctgatgagagggggagatcccagcctagggacacccgcgacaccgagatcctgcttccacgtatccgtacgcacacacacccacacggaacacgcctcatacagtttctccaaacggaactggaactctactcggacactcacataataattcacatttagggtttaaaatgcactgcctctagggactccatgctggagaatgtgcttgcatttccccctcgaaaactccctctccagctcgctgaggtgtgggtgtgggctccaccttcccctccacgagataaatgttaacgcaggcttcctgcgggcgtgttatacacagaaaagtgcacgcagccggccagtgcccaggcttggagccccgcgaagacgcacgtttgctgtagtttccaagtttacttttataatttaaaatattggagttaaacacacgccccgcagtgagcagccctggtccccgcagcgcgcccgtccgtgtgcatatgggcgcatctgcgtgtgcgcacacgcgggagtcgcggtccccggtgtggcctcttgtcgctgtgctggtggcgacccttgtggtgcttggcaggcttcgggagaggcgcatgaaggatttcattgagtgtgaagacagagagcagagacagaaagcagaaggaggcggctgcagcctttgtagtcgcggaggaatgcggaaatgttgaagcactatgtcaaacttttt

SEQ ID NO: 2493 - DNA, 6000 bp, Homo sapiens
tcagcttccagagtagctgggaccacaggcacgcaccatcacacctggcttcctttctgttttgtagactgggtgctgccagttcatgaatccctaataaagccaactcaatctttaaaattcaatttgttggccgggtgcagtgcttcacgcctgtaatcccagcactttgggaggccgaggcagatagatcacctgaggtcaggagtttgagaccagcctggccaacatggtgaaaccctgcctctactaaaaatacaaaaacaaaaattagccgggagtggtggcaggcacctgtaatcccagctacttgggagactgaggtggcagaatggcttgaacctgggaggtggaggttgcagtgagccgagatcgcaccactgcactccagcctgggagcgacagagggatactccatctctgtatatatatacgtatcctgaagtatgtttatggtctgtttcctacaactagggtataagctccatgaggtcaggacttcgttttgtttagtgatgtacctgctgcctggtaggcactcccaaatatttgttaaattaatgactgataggtgaatagataaccactgacccataccaaaaaggagcacttgctttttgttcgtttttgtttttggggtggggatatttttttggtttgtttgtttgtttgttttgagacaaacaaatatggcgaaactctatctctacaaaaaatacaaaatttagcctggcgtggtggcacgcatttgcagtcccagctacttgggaggctgagatgggacagtcacttgagttcaggaggttgaggctgcactgaattgtgattgtaacactgcactccagcctgggtgacagagcaagactctgtctcaaaaacaacaataacaaacacaaaacaaaacaaaaacaaaaaaaaagaaacgtttagcaaacttagttctaaaatgcgcacaatcaactgattcaatgtcaaagtcatccttaaattccacaataatctcttgttttatgagctgtataattatctgaacaatgtttcaaaagcacctgaaacaacaaggcaaaggagttctttaatgtgtgagagagcagtgcaaacgatcaactttactaaccctagaataattctcatcttgtttttattttagccttctatctagctgagaagcactatgctccttggaagctgcctagcattctttaaagagagacatttttctggccaggcacggtggctcacacctgtaatcctagcactttaggaggccgaggcaggtggatcggttgaggccaggagtctgagaactgactagccaacatgctgaaaacccatctctactaaaaatacaaaaatgagccaggtgtggtggcgcaagcctgatatctcagctacttgggaggctgaggcacaagaatcacttgaacccaggaggtggaggttgcagtgagccaacatctcaccaaagagatacatttttctgacctggtttttccaaatagaaacaaggcattaggtacttttctttgacaaccctctcagtttgtccagacctggttggtttatcactggggactagaataaaataaattcctttttaacttccctttggcgagaagacccctcttcctgcaggatttctcaagtccgttccattgagggttgctggccccttcaagtttccttcatccaggctcctaaacggagagattgcataattcccctgtaaattacaactatcaccatatggggctgttcagggtcataacacagttcttcacctgctttctaggagcttacactttgggtggggatacagacacctagagccagagtatgtctggctctttctaggtgtctgtacccctctttgtaggggtggcaggaggagcagtgtgtgcaacttgcttaggtttaggggtaaggagggggtggagcagcctaggctagccagatgtgaattttgggtttttttatgagacagagtcttgctttgtcaaccaggctggagtgtggtggtgtgatctcggctcgctgcaacctccgcctcccgggttcaagtgattctcctccctcagcctctcgagtagctgggattacaggcatgcaccaccacgcctggctaatttttgtatttttagtagagatggggtttcaccatctctactggtcgagaccaggctggtcttgaactcctgacttcaggtgattcacccacctcggcctcccaaagtgctgagattacaagcataagccactgtgcctggccaggaactcagtatttaagggaagaaagcatgcaagaggaaaataaggaagaaggagaggcagtgaggcaaatgttttttgttttgttttgttttgtttttcttaagacagtgtctcgctctgtcagcaggctggagtgcagtggcgcaatctcggctcactgcaaccgctgcctcccaggttcaagcgattcttgtgcctcagcctcccaagtagctggtactacaggtgcgtgtcaccatgcccagctaatattttgtatttttagtagagacggggtttcacagtgttagccaggatagtctcaatctcttgaccttgtgatctgcctgcctcggcctcccaaagtgctgggattacaggcgtgagccactgcacccagtccagcaaatggttattttattttattttttgaaatagagtctcaatctgttgcccaggctggagtccagtgggtccatctcggctcactgcaatctccacctcctaggctcaagtgattctcctgcctcagcctcccaagtagctgagattacaggtgggcaccaccacacccagctaatttttgtatttttagtaaagatggggttttgccatgttggccaggctggtcttgaactcctggcctcaagtgatccactcgcttcccaaagtgctgcgattacaggcatgagccactgcacaccctgctgcacattgttacttttttgtgagtttctcattagtgttcagtaaatctacattttatgtaagatacaataaacatttgaaaagagggagtggaggaaaaagtcagttatgcatctgtctcaggataggtggagggatgattcctggtctcttccttgttctataattgggaagataagcttgtaatcaacattgtcagtatgagatttcacagaactcggattagggctggtttatagggggaatgtttatgctgaaagattcagaggctaatgaggaatttcctggcaagcaatttgtgaggaagaccatctggggaggtatatgccttttgccattgtaggagcctggcttatgtatgaggctatgacacagggttgtggaattacagctatctgggaacaaaaaggaagggagttttgactcacttcccaagcataaatttcctcggcatgcctctaccatacccagcgaattttgtttccatgttttgttgaaacaaggtgtcaccatgttgccaaggctggtctcaaactcctgggttcaagtgatcctccaaccttggcctcccaaagtgctaggattacaggcgtgagtcaccatgcctggccttgtggagttatcttctttctttctttctttctttcttttttttttttttttgagatggagtctcactttgtcttgcccgggctggagtgcagtggcgcgatcgcagctcactgcagcttccacctcccgggttcaagcaattctcctgcctcaggctcctgagtagctgggattacaggcgcctgccaccacgcctggctaatttttgtatttttagtagagatggggtttcaccatgttggctaggctcgtctcaaactgctgacctcaagtgattgtctggcctcggtctcccaaaatgctggtattacaggtgtgagccaccatgcctggccttgtggggttattttcgaaagtccttgagataattcctatctcagacatgcaagcatgagaccttctccttggtgttctcatggctccaatttgtttggacctgacaatgtgattttgtcctggtatctgcaactttcacaagatggagcaactaactcaacaccagattccacccctaattattccttcattcactcaaaaagtatctaggctccaatgtgtcaggcaccgtgttggtcacaggggataccatgatgaacaagagaaggaaccacaggcttttgaatgggaaactaaagcatgtgaaaaacacacggagagctgggtgcggtggctcatgcctgtaatcccagtgctttgggaggctgaggatggaggatctcttctgcccgggagttggagaccagcctggacaacctagtgagacccccgtctctatcaaaataaaaacaaataataaaattagctgggtgcggtggggtgcgcctgtagtcccagctactcgggaggctgaactgggaggatcacttgagcccaggagtttgagggtgcagtgagctgacatcaggccactgcactccagcctgggcgacagagcgagaccctgtctcaaacaaaacaaaacaaaccaccaccaccaccagacatgagggccagtgcagctgaagcctgaagatcaagggctagaagaggccaggccggggccagatcaggcagggccttgcaggttgtggttagttgtttggattttattgtgagggaaataacacgacatgtcattccttctgcaacagccttaagaactaggcgttcttatcccaatttcacagacgaggacgatcaagtcgttaatttgtcaaaggtcacccgcaggcgacaggcggggacagggtctgggaaaacccgctaggcaccgaggcccagagggcgtcgggcgtccccgcaccgagtgccgcccgccgcgacccgggaactgcctgctccccggacgccaggcccgccgcacgccgcggggacaccgaacatgcgccgctcgccttacggaagccgggaaggaagggggcggggccgaggctggcgggcgcggggaaaatggcggcggcggcggcggcggctgcagctacgaacgggaccggaggaagcagcgggatggaggtggatgcagcaggtaacgggccgtgcgggggtggcttccggagacctccttcaggggttcgttgaggcctccctgtgctcccgggagaagggaggagggcggagcagcaacatctttccctgggataagttacgggaggaaagtgtggcccgggctccgccgtcccccactgccatctccagggaagaacgtggggcccggactctcaccctctctcctttccctccacccttagtagtccccagcgtgatggcctgcggagtgactgggagtgtttccgtcgctctccatccccttgtcattctcaacatctcagaccactggatccgcatgcgctcccaggaggggcggcctgtgcagggtgagtgttgggcatagactccagtctcttctccttgctcacctcccccaggcagtggtcttttccccttcctctactggagccaattccccctcccccaaatcatcgtttccccaatacatggttcccactgatctcagaccctcaggtcatagaagtttctttaccctcaccttttccatgtcattctctttcccagtgattggggctctgattggcaagcaggagggccgaaatatcgaggtgatgaactcctttgagctgctgtcccacaccgtggaagagaagattatcattgacaaggaatattattacaccaaggaggagcagtgtgagagtggaatagatgtggggaagaggagtgggagttaaaaaaaaaatgtacagggtggggaagatggagagggttggaaagaaacaggagaggagaccaagaacaggggagaaaaagtgaagagtagctggagagatctcagaaaaagaaaacgttcagagttctttctcaaaagaaagcaaaggatgagaggagacaggatagaagggagtagttattctaaactgagccaggatttgagga

SEQ ID NO: 2494 - DNA, 6000 bp, Homo sapiens
cctatacttctgcccggaccctgctggctatcctgcgcctttccactgctctggtaagtgcccaaattgctggagggccatctgttttgacccttaaaggggtagctccttaccgtgctctcattgccgcctccccacctcccgctccagccctgccggggctaaagtgctgacagtgcagatagtggtcctctccgtgctaccgcactgtgggtacttgctgctccagcagggcacgcacagcgtccgtggagggaaaggccttttccccacttcttaaccttcactgagagggtggttggggtctgtttcactccatgtgtcctagatcctgtgctacagaccttcctttctgtcctcccgtcttggacctcagtcctgggggctccaaagtgctgttcgtgcaggtagtgtgattacccaacctactgctgagctagcacttcccgagcccccgggacacgttctctctgccaattgtcttcttggctgagctccccaagctccatctgtcatgctggggagcccagtggcgttcaaaagggtctggtctccctcacaggacagctgaactccgggactggccagtgttgagaggcggagacttgggcaattgctggacgctgccctgggcattgcacttgtctcggtctgacagtgccggcccaacactgcggatgctggggggaggggggattccactcctgttttgtgagtaggcgacccatgggctgcccagccttaaagccagaacaagggtgtcccctgacctcgttccactgccctcctcccgttcccatctttcccccctaccttccccttaggcacgtctgagaatggtggatgtggtggagaaagaagatgtgaatgaagccatcaggctaatggagatgtcaaaggactctcttctaggagacaaggggcagacagctaggtgagtggtttagtgaaggacaaagctgtgtcactttgtcttctgtggccatgtgtctgaggttggcctcaattctaacactggccaccattgttctctgttgatgtcgagcattcctgtttgtatcctgaccttacacacccactcatttccttcaggactcagagaccagcagatgtgatatttgccaccgtccgtgaactggtctcagggggccgaagtgtccggttctctgaggcagagcagcgctgtgtatctcgtggcttcacacccgcccagttccaggcggctctggatgaatatgaggagctcaatgtctggcaggtcaatgcttcccggacacggatcacttttgtctgattccagcctgcttgcaaccctggggtcctcttgttccctgctggcctgccccttgggaaggggcagtgatgcctttgaggggaaggaggagcccctctttctcccatgctgcacttactccttttgctaataaaagtgtttgtagattgtcatcttctagcctgggcctgacttccattaaaacagggttttgtgcgttttttagattcctgttcgtttttatgctatttcatccactcagtaaattacctgagtaaagtgcatctccctgccaggcccccagtatagacactggggatgcggcaaggactaagcggtccctgctgtttggagatacttaagatggggctccactttttgagccccccgactcccttatttggtcttatactgcctgtgtgcaagtcaggctctggggatatggcgccagtatgaaatgcagggtctcttggtttttccccttttctagcagacaggtcattacttagttcccaactcccactctaaagctctggttagcgggtgatgaaaatcagcacaagtgatcacatacagcaatcccaacctttagaccacttcctagctgcctctccaaaatatgtagtaaacggtcattgagaaactctccctcctggtaattcacagtgcccacaggatcaaggcttggacttctttctaataaaaatctgcttactatcccttcttttttgcgtatgtgaaaaacaagttaatttagctcaggaaagtagtcaattatcatgtttataaggttgggtgggctaggtaagatgatgtagagggtgacattaaagtgtagaacagagaccacttaggtggaagcaggcagccttggactttgctaaagaccagtccatgtgactgacatggggtcacttcaaatggtagtgcctccctcactgaagagcatcagaagggcttctgagcaaggccagaatgagcctcgatgaacatccaagttgaccaaccagtgtggtgcctaacagaggacagagccaccagcaggggtgctcaggggctgctccccttttattaatgacagcggtttctctcaaggaagtgtagtgccctcccctttgggatagttgcctgacccctgtccatcagcccttcaagtaccctcatcagaaaaagagcccgcgcattctcctgccgatgccttgtcggtcgtagaggacattgaacttgttcacaaactggttcatggtgttgcacgttttggtgatggtgccgaggtaggccatgagccccacgtcgttgcattgctgggagggaacagaaaggaccagttcctcgggatccctcgtggcatgcccggggaacaacagtccccagtcctgcacgtgaaagtgacagcataagccccgcctccccatccgggttttacactcacatcataaaaatctgtcttgaacttgtctgtgctgagcaccgggagacagtgacacagagcataggcctcccgcaggatctcatgattaaaggggacctctcctaaaggcacaaaaagagactacattagtttggatgctgtcacttccccaggagggagaggaagaatgccagggaagcccctgtcctacccgcttcagaggccttgacgtactccaagatgagcttgacgcggctgtgcagcatcttgatggcgctgtgctgtgctatcaggtgttcagccactgcaaggggatgaggacaggaggaggttgagacgggatgtggccacaccttccaaccccacttccaaggaatcccctccattaccagtggagttctctccactgcctgttgctgtcattcgggctacgtggtctacaccaatgcgttccgcttcctctgtggccagagtgtaggtcagctcagcaaacagcattgtggcctacagggcaaggtaacccacaaagggagaatcaaaagcaggaaagaggccaagagcaggatctgagggttgaagggtagggtattacctctccattgattatatcaatgacagactcaaaaacgctgacaggaagctgtgaaggagacggagaaacctgaacactatatgccaacatttgggctagctgcttttacacatttcctctcatcttcccaagaaaccaatgaagtagggattacctcctttcacagtttggagattaaatgactaagccagagtcacagctggtaagtggcatctggcattccccaatagaggagtgtcacacagtaaaaggtatagcgacaatcatgacagagtaggcatggagtattactcacatctgtgtgcttggtcatagggttcaacttcagaaagagggggctctcgatgatctcacacacctggaagagagggacaatgcacaggaagtcagtgccccctacctttctccttcccctcattctccattctctgccccagcatgcacaggtgtgagcatgcatacctgcttatggacgtggatgtccgaggggtcaggtggcccccctgtggtataccaacccagaaactccagctccttgaacacctgtttaactagaggggaaggggccagaacatatagtaattctttttttttttttttctgagacggaatctcgctctgttgcccaggctggagtgcagtggcatgatctcagctcaccacaacctccgcctcccaggttcaagcaattctcctgcctcagcatcccgcgtagctgggactacaggcacgcaccaccatgccagactaatttttgtatttttagtagaggtggggtttcactatgtttgccaggctggtcttgaactcctgacctcatgatccacccacctcggcctcccaaagtgctgggattagaggcatgagtcactgagcccggcctgacatagtaattctttaaaccatccttcctcaatgtgaagctcctggtgtattttcaccagcttctctcctccctcctcaaatcctggctcagtttagaataactactcccttctatcctgtctcctctcatcctttgctttcttttgagaaagaactctgaacgttttctttttctgagatctctccagctactcttcactttttctcccctgttcttggtctcctctcctgtttctttccaaccctctccatcttccccaccctgtacattttttttttaactcccactcctcttccccacatctattccactctcacactgctcctccttggtgtaataatattccttgtcaatgataatcttctcttccacggtgtgggacagcagctcaaaggagttcatcacctcgatatttcggccctcctgcttgccaatcagagccccaatcactgggaaagagaatgacatggaaaaggtgagggtaaagaaacttctatgacctgagggtctgagatcagtgggaaccatgtattggggaaacgatgatttgggggagggggaattggctccagtagaggaaggggaaaagaccactgcctgggggaggtgagcaaggagaagagactggagtctatgcccaacactcaccctgcacaggccgcccctcctgggagcgcatgcggatccagtggtctgagatgttgagaatgacaaggggatggagagcgacggaaacactcccagtcactccgcaggccatcacgctggggactactaagggtggagggaaaggagagagggtgagagtccgggccccacgttcttccctggagatggcagtgggggacggcggagcccgggccacactttcctcccgtaacttatcccagggaaagatgttgctgctccgccctcctcccttctcccgggagcacagggaggcctcaacgaacccctgaaggaggtctccggaagccacccccgcacggcccgttacctgctgcatccacctccatcccgctgcttcctccggtcccgttcgtagctgcagccgccgccgccgccgccgccattttccccgcgcccgccagcctcggccccgcccccttccttcccggcttccgtaaggcgagcggcgcatgttcggtgtccccgcggcgtgcggcgggcctggcgtccggggagcaggcagttcccgggtcgcggcgggcggcactcggtgcggggacgcccgacgccctctgggcctcggtgcctagcgggttttcccagaccctgtccccgcctgtcgcctgcgggtgacctttgacaaattaacgacttgatcgtcctcgtctgtgaaattgggataagaacgcctagttcttaaggctgttgcagaaggaatgacatgtcgtgttatttccctcacaataaaatccaaacaactaaccacaacctgcaaggccctgcctgatctggccccggcctggcctcttctagcccttgatcttcaggcttcagctgcactggccctcatgtctggtggtggtggtggtttgttttgttttgtttgagacagggtctcgctctgtcgcccaggctggagtgcagtggcctgatgtcagctcactgcaccctcaaactcctgggctcaagtgatcctcccagttcagcctcccgagtagctgggactacaggcgcaccccaccgcacccagctaattttattatttgtttttattttgatagagacgggggtctcactaggttgtccaggctggtctccaactcccgggcagaagagatcctccatcctcagcctcccaaagcactgggattacaggcatgagccaccgc

SEQ ID NO: 2495 - DNA, 6000 bp, Homo sapiens
gaaatggacagacagggagaaagaacaggacagtcaaagctacagctctagggtgaggacatgggtgatggaagggatcatctcccacctccacccacatctgggggggtgggagatgtgccaagatctttttctttttttttttttttttttgcatttttagtagagacaggttttcaccatgttggccaggctgctctgaaactcctggcatcaggtgatctgcccacctcggcctcccaaagtgctgggactacaggcgtgagccgctgtgcccgacctaagatcttggactcccggatcccagagcaaaaccagagcgtctgaccccatggatccttccctcacctggtcagagcgactggacaggacggggcggctggctgcactgctgggggccactttgctctgttgtgtctcagccccaaactgtaaagcatccaaagcaatcaatcatcaggtctgacaaccccagccaacccctcttctctttcctcaccctcctctttccctctactgaccaagccaacgctgctgaggtcaaagaggctgaagggcttgctgaccacagcttccgtctggatgaaattcctcagcatctccgtggatgtggtctgtacatagccatagtcctagtggtaaaggaaggacagtctgagtgatcagtggagggaaggggtaaagagggggagtggggccaggcatggtgactcactcctgtactctcagcgctttggaaggccgagacgtaggagaatggcttgaggccatgagttcaagaccagcctgggcaacacagtgagactctagtctctacaaaaaataaacaattagctaggcacaggggaggctggggcaggaggacggcttgagcccaggagttccaggctgcagtgagctataactgcaccactgcagtccagcctgggcaacagagcaagaccctgtctctaaaagcaaaaaaaaaaaaaaaaaaaaaggtagacttggcctcctaaccacggcatcccacagtagaagagcagatgtatcttcaggggaattgggtaggggccacagaaggggattgttgattctcaccagcacttcatccaggagttcgtataccagagccacattgcgggagatggtcccctcgcccagggagccacagtaatcgcccagaagggtggccaacctgaggaaacacttggagcgtgtattttctcctcctctcagacccctcctagctaccaggtgcccagcccaaccctcctcacctggagagcagttctaggaggctgaagggagaaacgttttctgaagttgtgaccaccaaatagaggccgctgtgtctgatgtgaatgaaatgacggccatggtgatgctgagacacaggcagggagaagagaggcgttaaaaaaagggaggtggagtgatcagaacccaggagacctgagctcggatcccgatgcctcttactagtcacaacagcagtgcctttgggagatacatgacatatgcctgggcccagcttcccaatgtggaaagggggttaattacactaactaccccgagttgctgaggatggagtcacgcagggagctgggcctggtgtgttgctggcgcccattgactctttttttttttttccccacccccacctaccccgagagggagtctcgctctgtctcccaggctggagtgcggtgtccggatctcggctcactgcaacctctgcctcttggattcaagcgattctcaagcctcagcttcccgagtagatgggattacaggcgcccgccaccacgcccagctatgttttttttttttttgtatttttagtagaggcggagtttcaccatgttggccaggctgatttcgaactcctgacctcaggtgatccgcccgcctcggtctcccaaagtgctgggattacaggcgtgagccaccgcgccgggcctcacgttagctttatttggcggaatgcaccccccaagtggaatctaccaatgaaccagtcctgggagggagctggcgcccacccggcccgacgggaccccgctcctcacccgcctcccgccactggttaccatgacaaccggggactcgtctcctggcagtcccgtcagcttccggtagaagagctcggccacatcccggccgccactgtccccgcggactggcgggtggaaggactcagtgaaggatcctgcgacacaggctggccctgggcgcccctcccgcccggcccctccgccccttcccagccccaagggtctaggatacagtctttgtagatgagcgggtcccccttggaggacagaatgaagaattgggaaatcatggccgttctggagagtagacaagaagacggcgaaagtcgggcctgccccgccctgcggccccggaacaaaagaacgcgtgtgcgctggccctttaagagcgattctcctccgcccgcgccagctcggaccgcgggaaacccggcgcctgcactaccccgcccggagattcccttccgacgcccgcaccgcctccccgtcactcattctaggcccgcacggtgattggcttgcggctagcgggaggtgaagaaggccgccttgtccgattggcccgcacgcagtggcgccggtcacgtggggggcgacgtttcgcgccaatttcggttggccggccacagtccaccgcgcggagattctcagcttccccaggagcaagacctctgagcccgccaagcgcggccgcacggccctcggcagcgatggcactgaaggactacgcgctagagaagggtacgggtctacgagcccgggagggcgtcctgcgcggggagcctcccggggaacacctgttggtgtgagctggggtcttgggggaccggggtcggcgggttctggggtgcgcgaggccagaggcagggtcgagctgcggcctggctaaggcccacggggcctgggaagcgtgcggggggccatcgatgttgaagaaaagctagtaatcccacctggtaaaggtgttagggtcgtggggttgggggcttgggggcgcgctaacccggctgggggctgcacagggaaaagtcgcgcccaggacctcaggagagtcttaagggctctgggctcccgtgcccgctttccttcgcgcttttgggcattcccaggttcccgcgccctccccaggcgcgcgtaggccccgggggcgggcaggccggggccgctgcgcgccgggattggccgtttgaggccgccctccgagcggaagtggagccgggcggaagtggcgcgaggaggctggagggagtgtcgtgtaaacagtgtccttccgcgcggcggccgcggagagagctgcggcccgggggggcgtgcctgggatccggagcttcgctcgggcccgggaaaggcggcagtgggctgggatcgcggtgtctctgggtgtgatggccaatggctggactggctcccgccctgggcggaggaatcccgagctgtgaagcggctggaatccgggcccatgtgcttctttgtttactaagagcggaagcgatggcgggagcgggggtggggtgcggtggcggggtgcggtggcggaggtcccggtgaaatcaggggctaaggggacccaaagaaggcgggggatcataggggtggaaagaaagctgagaaccttgagaccggagtgtgaggggccaacggggaagggcgctagaattttaaactaaagtagggaccggaattcccctggggagatgttggatggccctgtgcactgccacgggctctttattcttcgctggttagaaacagacttgtgaaaaagagttatgcccactttggggagacttcggtaggtttatttaaatgctcatattattaattagttcataggtcgtgttttaagcgaaaatgggtatctaagatttgtcttaaagtttgtgtcttacggttttacatttcatgttacagaaaaggttaagaagttcttacaagagttctaccaggatgatgaactcgggaagaagcagttcaagtatgggaaccagttggtaagtctaagattgggtaaagggaatggggagcggggtgcttaaggagccataagcagcagcttggcttgttttattaaagacataacaattagagggtttgagggctgaaaagcgagtatcgctctgtgtggcgctgcgttctcccctgtggatgcccagagcctgtgctgagttctcagtgatgcattttcacatatgaacactggtgagcaaagtgaatgtggctctgaggtgtttctgtctcttccccacttgaggttcggctggctcatcgggaacaggtggctctgtatgtggacctggacgacgtagccgaggatgaccccgagttggtggactcaatttgtgagaatgccaggcgctacgcgaagctctttgctgatgccgtacaagagctgctgcctcagtacaaggagagggaagtgagtggttagagaacaatggcaaacaaagggcgaggcgtttaagcttctgtagagaggctgctcagatactgatgttttctgagcaggcagaaaggaggggcacttctgcctggtgttctctgtgctctcctttccccatcctgttgctcttttttttttttttttttgttcttctcctttaggtggtaaataaagatgtcctggacgtttacattgagcatcggctaatgatggagcagcggagtcgggaccctgggatggtccgaagcccccagaaccagtaccctgctgaactcatgcgcagattgtgagtggtctctgtcgggaaagatgtagggattggttctccaggatcttgtttgtgactgttttctccccttagtgagctgtattttcaaggccctagcagcaacaagcctcgtgtgatccgggaagtgcgggctgactctgtggggaagttggtaactgtgcgtggaatcgtcactcgtgtctctgaagtcaaacccaagatggtggtggccacttacacttgtgaccagtgtggggcagagacctaccagccggtacgtgtggagcaagaagcaggaaagcacttacccattagttgttttgtagagattaatttgatcctgtgatgcctattgttttatttggttgtaaaagttgcctgtgtgttcgcctttcattcttgggtatgtagtggtctttctacctattttctgggtgtttgttgttgacccagagtaagttcagagggttcttgacacttacaagatgtctgccatgaagagaaaatgtgattcaaaggaccgacccaatggggctcttttccttctgagttcctttggtgtttctgttctcacatcctagatccagtctcccactttcatgcctctgatcatgtgcccaagccaggagtgccaaaccaaccgctcaggagggcggctgtatctgcagacacggggctccagattcatcaaattccaggagatgaagatgcaagaacatgtgagtttggggtacgtggccctgggcaggtggatcgggagtccacttgaatcctgtagtcacttgtggaatggcaggaagaaagaagaacaaaagagggaagtgcaggagggaggtggaactagaatttcctgggagccttgggaaggggaaaggaggtctcagcacccctgctgtgggcttgtctgtggctgggtagcctgggagcctttgagtgggatgcctagggagggaaggttgggtccttgtccatttctcctagtcttatgtgcctttccctcccctagagtgatcaggtgcctgtgggaaatatccctcgtagtatcacggtgctggtagaaggagagaacacaaggattgcccagcctggagaccacgtcagcgtcactggtattttcttgccaatcctgcgcactgggttccgacaggtggtacaggtaaggaagagtttgacatgaggaatggatcatccccttttccctcacctactcattctacccacacagagaaaagagcagcaaaaccccaaacaaaaca

SEQ ID NO: 2496 - DNA, 6000 bp, Homo sapiens
tttatgaggccaccccaaccctgacctcgccctgaggtggttgcaagcggaggattcgatgagactcaaattcgtccagattcacagagctgtgaaacgagacttcatcgacccggattcctggcccataacctggaaagagagagagagagacttctctcctgactcctgttttgggagaggagcaaggagaggggaggctctgtctgacttctctccatgaactctggcaatgacctactccaaggggagaaagacccactttctcctcacctctcagctctgacttccccacacaaaactcttccgtcaagccaatgcgcatctctgtcggaggagagaccatcaggagagctcagcaatgccatggtttaagacaccaaggaacccgccctaaccccaacccttggtcctgcctgcagatgcctcaccagagccgctaggaaggaagctcttgagccgaatctctccctgcacatccaccttcagcagggatccctgagaggcaggggcgtcaaggttagagtctttttttctttctttttttgagacggtctcgctctgtcgcccaggctggcagtggcgtgatctcggctcactgcaacctccacctcccaggttcaagacattctcctgcctcagcctcacaagtagctagggttacagatgcctgccaccataagtagctaatttttgtatttttagtagagatggagtttcactgtgttggccaggctggtctcaaactcctgaccttaagtgatccacccacctcggcctctcaaagtgctgggattacaggcatgagccactgtgcccagccttttttacttatttattttttttaagagacagggtcttgctctgtcatccgggctagcgtgcagtgactcgatcttggcttactgcagccttaacctcctgggctcaagtgatcctcctggctcagcctcccaagtagctgggacagcaggtgtacactaccatgtctgggtaatttgtttatttgtattttttgtagagacggggtctggctatgttgcccaggctggtttcaaactcctggccccaagtaattctcccacctcggcctcccaaagcactgggattacaagcatgagccactgtgcccggccgttgctgggagtcttagccaccccaccatgtttcccaagtcccatctgtcctcagctccaggtttgggagctcaaacttacattagatgctatcagtacagacaatctctcgaccacatccaaaaaaacttcattcttttggctctgagaaagagagagaatttgggtggttggaagcagaatagcctatgttctgaaatggacagacagggagaaagaacaggacagtcaaagctacagctctagggtgaggacatgggtgatggaagggatcatctcccacctccacccacatctgggggggtgggagatgtgccaagatctttttctttttttttttttttttttgcatttttagtagagacaggttttcaccatgttggccaggctgctctgaaactcctggcatcaggtgatctgcccacctcggcctcccaaagtgctgggactacaggcgtgagccgctgtgcccgacctaagatcttggactcccggatcccagagcaaaaccagagcgtctgaccccatggatccttccctcacctggtcagagcgactggacaggacggggcggctggctgcactgctgggggccactttgctctgttgtgtctcagccccaaactgtaaagcatccaaagcaatcaatcatcaggtctgacaaccccagccaacccctcttctctttcctcaccctcctctttccctctactgaccaagccaacgctgctgaggtcaaagaggctgaagggcttgctgaccacagcttccgtctggatgaaattcctcagcatctccgtggatgtggtctgtacatagccatagtcctagtggtaaaggaaggacagtctgagtgatcagtggagggaaggggtaaagagggggagtggggccaggcatggtgactcactcctgtactctcagcgctttggaaggccgagacgtaggagaatggcttgaggccatgagttcaagaccagcctgggcaacacagtgagactctagtctctacaaaaaataaacaattagctaggcacaggggaggctggggcaggaggacggcttgagcccaggagttccaggctgcagtgagctataactgcaccactgcagtccagcctgggcaacagagcaagaccctgtctctaaaagcaaaaaaaaaaaaaaaaaaaaaggtagacttggcctcctaaccacggcatcccacagtagaagagcagatgtatcttcaggggaattgggtaggggccacagaaggggattgttgattctcaccagcacttcatccaggagttcgtataccagagccacattgcgggagatggtcccctcgcccagggagccacagtaatcgcccagaagggtggccaacctgaggaaacacttggagcgtgtattttctcctcctctcagacccctcctagctaccaggtgcccagcccaaccctcctcacctggagagcagttctaggaggctgaagggagaaacgttttctgaagttgtgaccaccaaatagaggccgctgtgtctgatgtgaatgaaatgacggccatggtgatgctgagacacaggcagggagaagagaggcgttaaaaaaagggaggtggagtgatcagaacccaggagacctgagctcggatcccgatgcctcttactagtcacaacagcagtgcctttgggagatacatgacatatgcctgggcccagcttcccaatgtggaaagggggttaattacactaactaccccgagttgctgaggatggagtcacgcagggagctgggcctggtgtgttgctggcgcccattgactctttttttttttttccccacccccacctaccccgagagggagtctcgctctgtctcccaggctggagtgcggtgtccggatctcggctcactgcaacctctgcctcttggattcaagcgattctcaagcctcagcttcccgagtagatgggattacaggcgcccgccaccacgcccagctatgttttttttttttttgtatttttagtagaggcggagtttcaccatgttggccaggctgatttcgaactcctgacctcaggtgatccgcccgcctcggtctcccaaagtgctgggattacaggcgtgagccaccgcgccgggcctcacgttagctttatttggcggaatgcaccccccaagtggaatctaccaatgaaccagtcctgggagggagctggcgcccacccggcccgacgggaccccgctcctcacccgcctcccgccactggttaccatgacaaccggggactcgtctcctggcagtcccgtcagcttccggtagaagagctcggccacatcccggccgccactgtccccgcggactggcgggtggaaggactcagtgaaggatcctgcgacacaggctggccctgggcgcccctcccgcccggcccctccgccccttcccagccccaagggtctaggatacagtctttgtagatgagcgggtcccccttggaggacagaatgaagaattgggaaatcatggccgttctggagagtagacaagaagacggcgaaagtcgggcctgccccgccctgcggccccggaacaaaagaacgcgtgtgcgctggccctttaagagcgattctcctccgcccgcgccagctcggaccgcgggaaacccggcgcctgcactaccccgcccggagattcccttccgacgcccgcaccgcctccccgtcactcattctaggcccgcacggtgattggcttgcggctagcgggaggtgaagaaggccgccttgtccgattggcccgcacgcagtggcgccggtcacgtggggggcgacgtttcgcgccaatttcggttggccggccacagtccaccgcgcggagattctcagcttccccaggagcaagacctctgagcccgccaagcgcggccgcacggccctcggcagcgatggcactgaaggactacgcgctagagaagggtacgggtctacgagcccgggagggcgtcctgcgcggggagcctcccggggaacacctgttggtgtgagctggggtcttgggggaccggggtcggcgggttctggggtgcgcgaggccagaggcagggtcgagctgcggcctggctaaggcccacggggcctgggaagcgtgcggggggccatcgatgttgaagaaaagctagtaatcccacctggtaaaggtgttagggtcgtggggttgggggcttgggggcgcgctaacccggctgggggctgcacagggaaaagtcgcgcccaggacctcaggagagtcttaagggctctgggctcccgtgcccgctttccttcgcgcttttgggcattcccaggttcccgcgccctccccaggcgcgcgtaggccccgggggcgggcaggccggggccgctgcgcgccgggattggccgtttgaggccgccctccgagcggaagtggagccgggcggaagtggcgcgaggaggctggagggagtgtcgtgtaaacagtgtccttccgcgcggcggccgcggagagagctgcggcccgggggggcgtgcctgggatccggagcttcgctcgggcccgggaaaggcggcagtgggctgggatcgcggtgtctctgggtgtgatggccaatggctggactggctcccgccctgggcggaggaatcccgagctgtgaagcggctggaatccgggcccatgtgcttctttgtttactaagagcggaagcgatggcgggagcgggggtggggtgcggtggcggggtgcggtggcggaggtcccggtgaaatcaggggctaaggggacccaaagaaggcgggggatcataggggtggaaagaaagctgagaaccttgagaccggagtgtgaggggccaacggggaagggcgctagaattttaaactaaagtagggaccggaattcccctggggagatgttggatggccctgtgcactgccacgggctctttattcttcgctggttagaaacagacttgtgaaaaagagttatgcccactttggggagacttcggtaggtttatttaaatgctcatattattaattagttcataggtcgtgttttaagcgaaaatgggtatctaagatttgtcttaaagtttgtgtcttacggttttacatttcatgttacagaaaaggttaagaagttcttacaagagttctaccaggatgatgaactcgggaagaagcagttcaagtatgggaaccagttggtaagtctaagattgggtaaagggaatggggagcggggtgcttaaggagccataagcagcagcttggcttgttttattaaagacataacaattagagggtttgagggctgaaaagcgagtatcgctctgtgtggcgctgcgttctcccctgtggatgcccagagcctgtgctgagttctcagtgatgcattttcacatatgaacactggtgagcaaagtgaatgtggctctgaggtgtttctgtctcttccccacttgaggttcggctggctcatcgggaacaggtggctctgtatgtggacctggacgacgtagccgaggatgaccccgagttggtggactcaatttgtgagaatgccaggcgctacgcgaagctctttgctgatgccgtacaagagctgctgcctcagtacaaggagagggaagtgagtggttagagaacaatggcaaacaaagggcgaggcgtttaagcttctgtagagaggctgctcagatactgatgttttctgagcaggcagaaaggaggggcacttctgcctggtgttctctgtgctctcctttccccatcctgttgctcttttttttttttttttttgttcttctcctttaggtggtaaataaagatgtcctggacgtttacat

SEQ ID NO: 2497 - DNA, 6000 bp, Homo sapiens
ggcagacccgtcatgctgagctcactctctccccaggaatctccccgtggtgggtgcacacactcacctgaccacccctcgaggcagggggaggtgcagcctgacattgagggcttggctacagaggagacgggaacaaagtcagccccaggaaggcacagtcccttgtcctgttcctcttcaatgtcataacaggatttcagcacaggtgccccccaccttcccaaattctacagcctctaccttaactggcttctgaggctggcagctgcatctgaagggagaagcagcaggtgccctggccctgtcttccgtcccatagagctgaactcagccaggccagcctcactcttacctctttgagagcaggtcacatcgcaactttagataaacctggagcctggatgagagggtaaaacaccacgactcaggccatcttctactggcatctcaccattccccaccagggacctccatgtggggctgtgtgggtgtgggctgtactcccaagagggaaaagggctgaagcccagcccaactccattagccaaagctttttcctttttttttttttcagagagatggggtctcactatgttgcccaggctggtctggaactcctgggctcaagtgatcctcccgcctcagcctcccaaagtgctaggattacaggtgtgagccaccggccgcaacccaagcctttttccaatttgcactccatcaccactaccaccacccccactctgcagtgagtcttgggaacatacaggtcttggcttgggttccaaggtagttctagaacccaggaaattgtctcaccggcctgagcctcggtcccactgcacagaggggaagagccggaaggggagcggtgaggggaggtcatcggagagttggtaccgcatcacagtcagctgagagaccagagagcaacaaggttagtttggtctcacgaccccactgcccccttccccatggtggacggaatttatgaggccaccccaaccctgacctcgccctgaggtggttgcaagcggaggattcgatgagactcaaattcgtccagattcacagagctgtgaaacgagacttcatcgacccggattcctggcccataacctggaaagagagagagagagacttctctcctgactcctgttttgggagaggagcaaggagaggggaggctctgtctgacttctctccatgaactctggcaatgacctactccaaggggagaaagacccactttctcctcacctctcagctctgacttccccacacaaaactcttccgtcaagccaatgcgcatctctgtcggaggagagaccatcaggagagctcagcaatgccatggtttaagacaccaaggaacccgccctaaccccaacccttggtcctgcctgcagatgcctcaccagagccgctaggaaggaagctcttgagccgaatctctccctgcacatccaccttcagcagggatccctgagaggcaggggcgtcaaggttagagtctttttttctttctttttttgagacggtctcgctctgtcgcccaggctggcagtggcgtgatctcggctcactgcaacctccacctcccaggttcaagacattctcctgcctcagcctcacaagtagctagggttacagatgcctgccaccataagtagctaatttttgtatttttagtagagatggagtttcactgtgttggccaggctggtctcaaactcctgaccttaagtgatccacccacctcggcctctcaaagtgctgggattacaggcatgagccactgtgcccagccttttttacttatttattttttttaagagacagggtcttgctctgtcatccgggctagcgtgcagtgactcgatcttggcttactgcagccttaacctcctgggctcaagtgatcctcctggctcagcctcccaagtagctgggacagcaggtgtacactaccatgtctgggtaatttgtttatttgtattttttgtagagacggggtctggctatgttgcccaggctggtttcaaactcctggccccaagtaattctcccacctcggcctcccaaagcactgggattacaagcatgagccactgtgcccggccgttgctgggagtcttagccaccccaccatgtttcccaagtcccatctgtcctcagctccaggtttgggagctcaaacttacattagatgctatcagtacagacaatctctcgaccacatccaaaaaaacttcattcttttggctctgagaaagagagagaatttgggtggttggaagcagaatagcctatgttctgaaatggacagacagggagaaagaacaggacagtcaaagctacagctctagggtgaggacatgggtgatggaagggatcatctcccacctccacccacatctgggggggtgggagatgtgccaagatctttttctttttttttttttttttttgcatttttagtagagacaggttttcaccatgttggccaggctgctctgaaactcctggcatcaggtgatctgcccacctcggcctcccaaagtgctgggactacaggcgtgagccgctgtgcccgacctaagatcttggactcccggatcccagagcaaaaccagagcgtctgaccccatggatccttccctcacctggtcagagcgactggacaggacggggcggctggctgcactgctgggggccactttgctctgttgtgtctcagccccaaactgtaaagcatccaaagcaatcaatcatcaggtctgacaaccccagccaacccctcttctctttcctcaccctcctctttccctctactgaccaagccaacgctgctgaggtcaaagaggctgaagggcttgctgaccacagcttccgtctggatgaaattcctcagcatctccgtggatgtggtctgtacatagccatagtcctagtggtaaaggaaggacagtctgagtgatcagtggagggaaggggtaaagagggggagtggggccaggcatggtgactcactcctgtactctcagcgctttggaaggccgagacgtaggagaatggcttgaggccatgagttcaagaccagcctgggcaacacagtgagactctagtctctacaaaaaataaacaattagctaggcacaggggaggctggggcaggaggacggcttgagcccaggagttccaggctgcagtgagctataactgcaccactgcagtccagcctgggcaacagagcaagaccctgtctctaaaagcaaaaaaaaaaaaaaaaaaaaaggtagacttggcctcctaaccacggcatcccacagtagaagagcagatgtatcttcaggggaattgggtaggggccacagaaggggattgttgattctcaccagcacttcatccaggagttcgtataccagagccacattgcgggagatggtcccctcgcccagggagccacagtaatcgcccagaagggtggccaacctgaggaaacacttggagcgtgtattttctcctcctctcagacccctcctagctaccaggtgcccagcccaaccctcctcacctggagagcagttctaggaggctgaagggagaaacgttttctgaagttgtgaccaccaaatagaggccgctgtgtctgatgtgaatgaaatgacggccatggtgatgctgagacacaggcagggagaagagaggcgttaaaaaaagggaggtggagtgatcagaacccaggagacctgagctcggatcccgatgcctcttactagtcacaacagcagtgcctttgggagatacatgacatatgcctgggcccagcttcccaatgtggaaagggggttaattacactaactaccccgagttgctgaggatggagtcacgcagggagctgggcctggtgtgttgctggcgcccattgactctttttttttttttccccacccccacctaccccgagagggagtctcgctctgtctcccaggctggagtgcggtgtccggatctcggctcactgcaacctctgcctcttggattcaagcgattctcaagcctcagcttcccgagtagatgggattacaggcgcccgccaccacgcccagctatgttttttttttttttgtatttttagtagaggcggagtttcaccatgttggccaggctgatttcgaactcctgacctcaggtgatccgcccgcctcggtctcccaaagtgctgggattacaggcgtgagccaccgcgccgggcctcacgttagctttatttggcggaatgcaccccccaagtggaatctaccaatgaaccagtcctgggagggagctggcgcccacccggcccgacgggaccccgctcctcacccgcctcccgccactggttaccatgacaaccggggactcgtctcctggcagtcccgtcagcttccggtagaagagctcggccacatcccggccgccactgtccccgcggactggcgggtggaaggactcagtgaaggatcctgcgacacaggctggccctgggcgcccctcccgcccggcccctccgccccttcccagccccaagggtctaggatacagtctttgtagatgagcgggtcccccttggaggacagaatgaagaattgggaaatcatggccgttctggagagtagacaagaagacggcgaaagtcgggcctgccccgccctgcggccccggaacaaaagaacgcgtgtgcgctggccctttaagagcgattctcctccgcccgcgccagctcggaccgcgggaaacccggcgcctgcactaccccgcccggagattcccttccgacgcccgcaccgcctccccgtcactcattctaggcccgcacggtgattggcttgcggctagcgggaggtgaagaaggccgccttgtccgattggcccgcacgcagtggcgccggtcacgtggggggcgacgtttcgcgccaatttcggttggccggccacagtccaccgcgcggagattctcagcttccccaggagcaagacctctgagcccgccaagcgcggccgcacggccctcggcagcgatggcactgaaggactacgcgctagagaagggtacgggtctacgagcccgggagggcgtcctgcgcggggagcctcccggggaacacctgttggtgtgagctggggtcttgggggaccggggtcggcgggttctggggtgcgcgaggccagaggcagggtcgagctgcggcctggctaaggcccacggggcctgggaagcgtgcggggggccatcgatgttgaagaaaagctagtaatcccacctggtaaaggtgttagggtcgtggggttgggggcttgggggcgcgctaacccggctgggggctgcacagggaaaagtcgcgcccaggacctcaggagagtcttaagggctctgggctcccgtgcccgctttccttcgcgcttttgggcattcccaggttcccgcgccctccccaggcgcgcgtaggccccgggggcgggcaggccggggccgctgcgcgccgggattggccgtttgaggccgccctccgagcggaagtggagccgggcggaagtggcgcgaggaggctggagggagtgtcgtgtaaacagtgtccttccgcgcggcggccgcggagagagctgcggcccgggggggcgtgcctgggatccggagcttcgctcgggcccgggaaaggcggcagtgggctgggatcgcggtgtctctgggtgtgatggccaatggctggactggctcccgccctgggcggaggaatcccgagctgtgaagcggctggaatccgggcccatgtgcttctttgtttactaagagcggaagcgatggcgggagcgggggtggggtgcggtggcggggtgcggtggcggaggtcccggtgaaatcaggggctaaggggacccaaagaaggcgggggatcataggggtggaaagaaagctgagaaccttgagaccggagtgtgaggggccaacggggaag

SEQ ID NO: 2498 - DNA, 6000 bp, Homo sapiens
ggcgggcgcctgtagtcccagctactcgggaggctgaggcaggagaatggcgtgaccccaggaggtggagcttgcagtgaaccgagatagcgccactgcactccggcctgggcgaaagagcaagcctctatctcaaaaaaaacaaaaacaaaaacaaaactttttagtagacatggaagcggtctcaaaatcctcgcctcaaatgattctcctgcctcagcctctcagagcattgggattacaggcgtgagcaaacatgcacccctactttttgaataaacactgtggtcctgtctgtcactatattcacctcccgcaaagcccaactacttactgcgaggcgccagtcgatcaatgtatgacaggagctgagacttggccacaccaggatcccccatcagacagatgttgatgttgcctggaggaagggaaggcagccctggaatgactcttctcccagtgcttggccaacaacagagcaattttgagttctgcctacccctaacacccagcactatttctaagccctccctgtgtccacgaaggcaagatgtccactcatactgtgacctacagggacacttgtcatccttttttcctcctaaatgacttcatccaccctgagcctctcccttgtttcttcttaccccggattttcatgcctcgaggagactggtccacacccccgactagcaggagcagcagtgccttcttcacatcttcatgcccgtatatttctggggcgattgaagctgccagcttttcgtagaaatcctcctctgtagagaagttaaggttgttttattttctgggggaaaagggagctaggatgtaaacggaatttcctctctctcccctgcccctcacctgcaatttgcctcagctcctccctggtgagctctccagccccagactcatcatcctcactcttgttcatcttcacaatccgatgggcttccaggtaggtttctgagagtaaacccttgggcaggaaaatgccaggatacagatgtaatcccttcaacttgcccatcactggattccctaacaatttcttgacaaatccctgggttctgttttgtttggggttttgctgctcttttctctgtgtgggtagaatgagtaggtgagggaaaaggggatgatccattcctcatgtcaaactcttccttacctgtaccacctgtcggaacccagtgcgcaggattggcaagaaaataccagtgacgctgacgtggtctccaggctgggcaatccttgtgttctctccttctaccagcaccgtgatactacgagggatatttcccacaggcacctgatcactctaggggagggaaaggcacataagactaggagaaatggacaaggacccaaccttccctccctaggcatcccactcaaaggctcccaggctacccagccacagacaagcccacagcaggggtgctgagacctcctttccccttcccaaggctcccaggaaattctagttccacctccctcctgcacttccctcttttgttcttctttcttcctgccattccacaagtgactacaggattcaagtggactcccgatccacctgcccagggccacgtaccccaaactcacatgttcttgcatcttcatctcctggaatttgatgaatctggagccccgtgtctgcagatacagccgccctcctgagcggttggtttggcactcctggcttgggcacatgatcagaggcatgaaagtgggagactggatctaggatgtgagaacagaaacaccaaaggaactcagaaggaaaagagccccattgggtcggtcctttgaatcacattttctcttcatggcagacatcttgtaagtgtcaagaaccctctgaacttactctgggtcaacaacaaacacccagaaaataggtagaaagaccactacatacccaagaatgaaaggcgaacacacaggcaacttttacaaccaaataaaacaataggcatcacaggatcaaattaatctctacaaaacaactaatgggtaagtgctttcctgcttcttgctccacacgtaccggctggtaggtctctgccccacactggtcacaagtgtaagtggccaccaccatcttgggtttgacttcagagacacgagtgacgattccacgcacagttaccaacttccccacagagtcagcccgcacttcccggatcacacgaggcttgttgctgctagggccttgaaaatacagctcactaaggggagaaaacagtcacaaacaagatcctggagaaccaatccctacatctttcccgacagagaccactcacaatctgcgcatgagttcagcagggtactggttctgggggcttcggaccatcccagggtcccgactccgctgctccatcattagccgatgctcaatgtaaacgtccaggacatctttatttaccacctaaaggagaagaacaaaaaaaaaaaaaaaaaagagcaacaggatggggaaaggagagcacagagaacaccaggcagaagtgcccctcctttctgcctgctcagaaaacatcagtatctgagcagcctctctacagaagcttaaacgcctcgccctttgtttgccattgttctctaaccactcacttccctctccttgtactgaggcagcagctcttgtacggcatcagcaaagagcttcgcgtagcgcctggcattctcacaaattgagtccaccaactcggggtcatcctcggctacgtcgtccaggtccacatacagagccacctgttcccgatgagccagccgaacctcaagtggggaagagacagaaacacctcagagccacattcactttgctcaccagtgttcatatgtgaaaatgcatcactgagaactcagcacaggctctgggcatccacaggggagaacgcagcgccacacagagcgatactcgcttttcagccctcaaaccctctaattgttatgtctttaataaaacaagccaagctgctgcttatggctccttaagcaccccgctccccattccctttacccaatcttagacttaccaactggttcccatacttgaactgcttcttcccgagttcatcatcctggtagaactcttgtaagaacttcttaaccttttctgtaacatgaaatgtaaaaccgtaagacacaaactttaagacaaatcttagatacccattttcgcttaaaacacgacctatgaactaattaataatatgagcatttaaataaacctaccgaagtctccccaaagtgggcataactctttttcacaagtctgtttctaaccagcgaagaataaagagcccgtggcagtgcacagggccatccaacatctccccaggggaattccggtccctactttagtttaaaattctagcgcccttccccgttggcccctcacactccggtctcaaggttctcagctttctttccacccctatgatcccccgccttctttgggtccccttagcccctgatttcaccgggacctccgccaccgcaccccgccaccgcaccccacccccgctcccgccatcgcttccgctcttagtaaacaaagaagcacatgggcccggattccagccgcttcacagctcgggattcctccgcccagggcgggagccagtccagccattggccatcacacccagagacaccgcgatcccagcccactgccgcctttcccgggcccgagcgaagctccggatcccaggcacgcccccccgggccgcagctctctccgcggccgccgcgcggaaggacactgtttacacgacactccctccagcctcctcgcgccacttccgcccggctccacttccgctcggagggcggcctcaaacggccaatcccggcgcgcagcggccccggcctgcccgcccccggggcctacgcgcgcctggggagggcgcgggaacctgggaatgcccaaaagcgcgaaggaaagcgggcacgggagcccagagcccttaagactctcctgaggtcctgggcgcgacttttccctgtgcagcccccagccgggttagcgcgcccccaagcccccaaccccacgaccctaacacctttaccaggtgggattactagcttttcttcaacatcgatggccccccgcacgcttcccaggccccgtgggccttagccaggccgcagctcgaccctgcctctggcctcgcgcaccccagaacccgccgaccccggtcccccaagaccccagctcacaccaacaggtgttccccgggaggctccccgcgcaggacgccctcccgggctcgtagacccgtacccttctctagcgcgtagtccttcagtgccatcgctgccgagggccgtgcggccgcgcttggcgggctcagaggtcttgctcctggggaagctgagaatctccgcgcggtggactgtggccggccaaccgaaattggcgcgaaacgtcgccccccacgtgaccggcgccactgcgtgcgggccaatcggacaaggcggccttcttcacctcccgctagccgcaagccaatcaccgtgcgggcctagaatgagtgacggggaggcggtgcgggcgtcggaagggaatctccgggcggggtagtgcaggcgccgggtttcccgcggtccgagctggcgcgggcggaggagaatcgctcttaaagggccagcgcacacgcgttcttttgttccggggccgcagggcggggcaggcccgactttcgccgtcttcttgtctactctccagaacggccatgatttcccaattcttcattctgtcctccaagggggacccgctcatctacaaagactgtatcctagacccttggggctgggaaggggcggaggggccgggcgggaggggcgcccagggccagcctgtgtcgcaggatccttcactgagtccttccacccgccagtccgcggggacagtggcggccgggatgtggccgagctcttctaccggaagctgacgggactgccaggagacgagtccccggttgtcatggtaaccagtggcgggaggcgggtgaggagcggggtcccgtcgggccgggtgggcgccagctccctcccaggactggttcattggtagattccacttggggggtgcattccgccaaataaagctaacgtgaggcccggcgcggtggctcacgcctgtaatcccagcactttgggagaccgaggcgggcggatcacctgaggtcaggagttcgaaatcagcctggccaacatggtgaaactccgcctctactaaaaatacaaaaaaaaaaaaaacatagctgggcgtggtggcgggcgcctgtaatcccatctactcgggaagctgaggcttgagaatcgcttgaatccaagaggcagaggttgcagtgagccgagatccggacaccgcactccagcctgggagacagagcgagactccctctcggggtaggtgggggtggggaaaaaaaaaaaaagagtcaatgggcgccagcaacacaccaggcccagctccctgcgtgactccatcctcagcaactcggggtagttagtgtaattaaccccctttccacattgggaagctgggcccaggcatatgtcatgtatctcccaaaggcactgctgttgtgactagtaagaggcatcgggatccgagctcaggtctcctgggttctgatcactccacctccctttttttaacgcctctcttctccctgcctgtgtctcagcatcaccatggccgtcatttcattcacatcagacacagcggcctctatttggtggtcacaacttcagaaaacgtttctcccttcagcctcctagaactgctctccaggtgaggagggttgggctgggcacctggtagctaggaggggtctgagaggaggagaaaatacacgctccaagtgtttcctcaggttggccacccttctgggcgattactgtggctccctgggcgaggggaccatctcccgcaatgtggctctggtatacgaactcctggatgaagtgctggtgaga

SEQ ID NO: 2499 - DNA, 6000 bp, Homo sapiens
tgtcgcccaggctagagtgcaggggcgcaatctcggctcactgcaagctctgccccctgggttcacgccattctcctgcctcagcctcccaagtagctgggctgcttcccccacaagattcaaaaacaaaagaaaactggctgactcaccggtgttgttttcggtggtcgttttgctgctctcttcttcacattgcgattcaagctgtcttcaaagtcagtgtcttcatcagctaacaaagagtcgccattcctgtgagaaagtatggttctctttaaatataaccaccctattccctccatataaaaggctaattaattatggtttctctgtctctcaccgcaccccatctccatgagaaaaacatatccagattttaagaaaaaatgagcttattgttagtaggaagttgggacaaagtcttttttttttttttttttgagacggagtttcacccttgtcacccaggctggagtgcaatcgcatgatctcagctcactgcaacctccgcctcccaggttcaagcgattctcctacctcagcctcccgagtagctgggattacaggtgtttcaccgtgttggccaaggtggtctcaaactcctgacttcaggtgatccacccgcctcggcctcccaaagtgttgggattataggcatgagccaccacacccggccgggacaaagccttaaaggaaaactttcacatgaaagcaatggagatgaagaatgaggaaatgaggcaggagaaggacaactcttcctagtattctctccgaagaagagaatcaaatgatactcacttagcaggtagcgagatcactgctctttgtagagaaagataatcatggctcaggaagtcatctatcattcatccataaatgggagagtaatatgtatctagagttaaatttcacccccttgaaacataaaccacatgtcttatcaattcaagtttataactttgatataatctggtcccccacagcagcactgacagaaacagaaatgattcagagaaagccaattaaaacagccaggggataaagcagatctgtatgaaattcgcttttttccttctggaaaggtaaaaaaccaagatatattattataacctacacagaataaactcatatatggtaataaataaggatacacagacctatttacaaaatccccaagtagaagaaataggggacactagccaaaaagtatatacaatttaccaggcaacaaataaagaactctttactcccccatctgccagctctcagcccccaccagggttggtacatgctgaacatagaaatgtgtttaagagaggtttagacaagatggatgatggattaaaaacaggatgtgcttgaacccaggaggcggaggttgcagtaagccgagatcgcgccactgcactccagcctgggcgacagggcgagactccgtctcaaaaaaaaaaaaaaaaacaggatgtactactattttgatgtctacaacatctaggaccgccaaaaaaaacacctggagctggagggagggtgtcactgtgctgaacgagtatagcacttctggtgttttcacacagtcccacgcatattatcatcaatgtgggaaaacgagggggaaggctgccagggacacaggaagtggccacacaatgcaacatctacttacccctctgaggtatggtttgagtccctgtcatcaaagggtagactggcagaggaactagaagatgcagacaaggccctcttggtatctcccacagctctttgcaacggggaagacatgcttggagaggaggagctatgaggccaggaagatgaggaccacagggtaggtatggcgatccagctggggaagaaagagaagaaagggctcctaccacagcacttctccatccccagccctgaccagtccctttctttccaagggaatggttctagaactctggggtcaggtgagggggaccaaaaactaagacaaaggctgggcaccgtggctcatgcctataatcccagcactttgggaggccaaggcaggaggatggcttgagcccaggagttcaagaccagcctgggcaatacagcaagaccccatttctaaaaaaaaaataataataatcattagtcaggtgtggtagagcatgcctgtattcagctattcaggaggctgaggtgggaggattgcttgagtccaggagttcaaggctgcagtgagctacgatcgcaccactgtactccatccagcttgggtgacagaagaagaccctgtcccccctcaaaaaaatagtaatgataaataagacaaatggctgggcacagtgactcatgcctgtaatcccagcactttgggaggtcgaggcaggcagatcacctgaggtcaggggttcgagaccagcctgaccaacatggagaaaccccatttctactaaaaatacaaaattatccgggtgtggtggcatatgcctgtaattccagctacttgggaggctgaggcaggagaatcgcttgaacctagaaggcggaggttgtggtgagctgagatcgtgccactgcactccagcctgggcaacaagagtgaaactccatctcaaaataaataaataaataagacaaagagctgacctaaggcatcaagggattaagcacaacaacaccccagaaactggccagcaggtttggagttgctctccaaaagctgaggaagtcacacaccagggtagcttcagacacatctctctctagaggctgtggaagtgcaaactgcctactgcaaggaaatttaactcataggtattttctttaaaaaaaaaaattgcacactgggtgtggtagatcatacttgtaatcccagaactttaggcggctgaggcgggaggactgcttgagcccagtagttcaagaccaatctgggcaacatagcaagaccccatctctacaaaaaataagcaaaaactagctaggtgttgttgcgcacacctgtggtcccagctactcaggaggctgagacaggaggactgcttgagcccagcagtttgagaccagccttggcaacatgagacacacccaaaaaaaaaaaaacaaaacccaagcaaggtacacaccagggcagcttcagacacagccctctctagaggcttcagaagtgtaaactgcctgctgcaagggaatttaactcataattaaaaaaaaaaaaaaaaaggcaaggtgcccagggtggctcaaacctggaatcccagcactttgagcagctgaagcaggaggactgcctaaccctacgagttcaaaatcagtctgggcaatatagcaagatcctgtctctacgaaaaaaccaaaccaaaaccaaaaaaactagccaggtgtggtggtgcacctgtagtcccagctactcggcagaatgaagcgggacgatcgcctgagcccaggaggtcgaggctgcagcgagctatgactgcaccactgcactccagcctgggaaacagagcgagactctgtctcaaaaaaaaaaaaaagtaatgacaaataaataaaataaggcaaagagtggacctaaagcaccaagggattacagacaccagaaactgggcagtgggtttggaattgctctccaaaagccgaggcgtggtgcacagtgctcccgcctataatcccagtactttgggagggcgaagcgggagcatcgcttgggtccaggaattcaagatcagcctgggccacatagcaacgccctgtctctaaaaaaaaaaaattaaatggaaaaaaaaaaaaaagccaagcaaggcagacagcagggcagcttcagacgcacccctctctggaggcttcggaagtataaaccgccctctgcaagggaacttacaggttttttaaaatgaaataaaaaaaataaagaaagaaataagaaaaaaaatacaagaagaccccaggctttcgtttccagaggactagcacctgattccacctggaatggaacaggaggctcttaaggatttgggggtggaggcgccatgagaatagggctggaaacgcaaaaggaggaaaggcaggtgcgcgtttcctatttttccagaaggtaaaaatatctacgactgcccctggggtaagcggctccaggataaagagccttccaagcgcttaagagaatggactctcagtctatggaggcctggggagaggattctccagctctgtggcggaggccattggggcacggcccgggaaggctcctagtgtcagggccgggagggtcgcgagagggcctattcttgggtcaaggagaaacctgtcagagcctggaagagtgacttctggccgagcagggttcagggaaggtccccacctcaggtccctcgggtgtctctggccaccccaccttccacacaggcgcccgccgctgcccttccgggggcgaaagattccagaaaagcgcgggaacgtacaagacacgctgtgcgcaagcgcaatcccaacggctcgcccagggccagtagctatcgcgaggtttggaagtgtgcgagctgatgcgcgccacgtttgagtcacgccgctccacagcctcgtgtggcctcaagctctcaggcgtcctgccctctcacgtgggcttgggcacgcgggcggcccgctttagccccgcccccacccaggtcccacccccgctaccctcaatctcctactccattgggcgggttttggaccagactgctagtaacccctttaatctggcttctcaattgccataggctaggttccacccaggccccgccttttgagccggatcgccacgcccccgagggagaccacgcccctatttcaccaacctcctgagtgccagccgggtcccgcccccctgccgagcttccgcgctacattggcttaatttcttccttgcccccgcccctgaagccggctccgagccattattggcggggccccgcctcgggccccgccccctgtccggctccccgctcccattgtctcggcagatgccgcctggtccagctatcgtgctcggtattcagttttccggagcagcgctctttctctggcccgcggagcggtcccgcggccgagtaccggattcccgagtttgggaggctctgctttcctccttaggacccactttgccgtcctggggtggctgcagttatgtccgcgctgcgacctctcctgcttctgctgctgcctctgtgtcccggtcctggtcccggacccgggagcgaggcaaaggtcacccggagttgtgcagagacccggcaggtgctgggggcccggggatatagcttaaacctaatccctcccgccctgatctcaggtgaggagaaagaggaagactagagaattgggggtggggggcgggggcggggcctcctcatctcacaataactctcttccttttcagagtgaccgttatactaatcttttcatcccacagtaatgtctgttctcctcctgtaacttccttaccgggatcacaataaccctcctatgcaaagaatagcgctcttactccatccccaccccaggaatcccctcctcctaattaacaccccctatgtgtttctttcttcacagccatgttctcctcgctgtttctattagccccttctatgagaatactttattgctcaccaagtaaccccacccttccaagccccattcttcatcccctagaagctgttctccaagtccctcgaggtctggggtgtggacattggggagggtcacctgaggacactctgaccactgacttggccctcagggcagctgttaaatagatgatcccgtggctaatgggagtgaacttgggatgggtcaggagacaataaggtaggggataggttcaggtagggaagagggtgcagacaatagaaaagagaccaggcaggtagaagagaaggcatagtccccagagataggcgggaaatggaagggattttaggatatcacttcccaccattccttcacgtctcctctgtccaggtgagcacctccgggtctgtcccc

SEQ ID NO: 2500 - DNA, 6000 bp, Homo sapiens
tcgcccaggctggatggagtgcagtggcgcgatctcgggtcactgcaacctctgcctcctgggttcaagcgattcttctgcctcagcctccggagtagctgagactacaggcgcctgccaccatgccggctaatttttgtatatatatatatgtgtgtgtgtatatatatatatgtgtgtgtgtgtgtatatatatatacgtgtatatatatgtatatatacacgtatatatatgtgtatatatatgtgtgtatatatatgtgtgtatatatatatgtgtgtgtatatatatacgtatatatatgtgtgtatatatatacgtgtatatatatatatttttttccggtagagaaggggtttcaccatattggccaagctggtctttgtctcaaaaaaaaaagagtctcatctgtcacccaggctggagtgcaatggcatgatcttggctcactgcaatctctgcctcccgggttcaagtgattcttctgcctcagcgtcccaagtagctgggactacaggtgcatgccaccacgcctggctaatttttgtatttttagtagagatggggtttcaccatgttagccaggctggtctcgaactcctgacctcttgatccacccacctcggcctcccaaagtgctgggattacaggcatgagccatcatgcccagccggccaagctggtcttgaactcctgacctgtccttgtgatccgcctgcctccgcctcccaaagtgctaggattacaagcgtgagccaccgtgcctggccaattttaggatttttttagacagggtcttactctctcgcccaggttggagtatagtggcatcatcatagcttactgcagcctctaactcctgggatcaagggagcctcctgcctcagcctctggagtaactgggacaacaggcatgtgtgccaccatgcctgataatttctttcttttttttttttttggtagagatgcggtctagctacgttgcccaggctggcctccaactcctggcctcaagtgatcctcctgcctcagcctcaggagtaactgggactacaggcgcgggcgctaccatgcctggctgatttctttcttttctttctttctttctttctttttctttctttccttccttctttccttctttctttctctgtctctctctctctctttctttctctctctctctttctttcttgagatgacgtctagctatgttgccccagctgggctccaactcctggcctcaagtgatcctcctgcctcagcctctcaaagtgctgtgattacaggtgtgagccaccatgcctggctccaggctttcttgaatcccctcacccagatagttgccccagtcaggctccagtcccctgctgctgagacagccacgaaccacgttgaggcagaagccctggcagggcataagtgaggggaccccccggcacaggggacagccgatgagacgcatcagagcctggctgcagccttcagacaccggcacctgggggcagagagtggggctgtgtcctccacaaacgctgtggctgctctcagcctggcttggtgctgggcacagacagaaatcacataccccaccctacacctagggttggtgaccccacgtggcagcaggtgagattgtcacagatctgaggagggaggttccaggttgctgactctgattcgtgggaggggtggaaatagagaggcagttaggggtggagggaacattcaaggacaagagtgagcccatcacagctggggagggaggaggcggtcaggaggcagaaggtgaggctgggaggtcaggtagaggatgggcagtgagagaggccaagccaggcatctggccttcagcagcagggaagtggagtcattgagggatcctggggggttgggcgggggcagtatccaatctcctactgctatggagatgagcaggcccttggggactgaggagggtatgggtccacagaggggaggagggggtcagagatcatggatcgtggaccattggaggtttcactccagccccctccttcctaattcatcctaggacaccagggcctggaggcagacagagcccaaggcctgtcctgctggctggtggctgtttcttccttgtggggtctctctcacttccacctctccctccctgggccctgcccatactcaggcaccctccaaccttaagcgcttcgctgaccacatttcttccagtctccaggccctgcacaaaggctcgggcagccaccagggtccgggttatctgggagaaggcaaagaaggtgagaaaaaccacaaggttgttatgggtcagtcaagactggagccaagagactgcatcaagagcagtgagggttgggtgtgtggggttctctcagagtgggtcgagtgttgggtggtacagagaggcaggttcaagagcccccacaggaattatagtcttaaagaaaaacaaaggaaggcttgggaagagatggagggattatgttgtacagggcttagagagagagaaattgtgtatcggaactaacactgaacttgaagccagaagacctgggtgtgagccacggctctgccacttactggctgaaaagcttaatctctgggagcctcagttttctcatctgtaaaataagggcatgactgtctacctcacagggttatgatgacaactaaatgtgatactataaaagaaaatgccttttgcgtattgaatgcacaattcctgtttagttgaaccagaggaagtcaaggtgttacgattaggaaggggttggcacaaaggtggctggaggctaagggcaggtgagtgtttgtgtgaaactagggctcagaatgggaggtggcaggggtgggggcatctgcttcaagaagaccaaggggcactgggtcgggcagtggtgagtaaagctcaggatagggatcaccaggtcagaaatggcttcaatgcaggatgggggatcaccaggtcagaggtgactggagcacgccagtttggaggtgagtggtgcacagttcaggggtcactaggtcagaagtggttgaagctcaggcctcaggatccctcacctgcaggcggaggcggcggggtgagtccccaaagggctgcagagagccatcggtagatgaggccaagcgtgagaggcagagcaggtagtcaggggggaagctgtactgtgggtgcagcagcgggaacactctctccaggagctgtgcccagaaatccgccagggtgtcatccaacccctcaccagattccccatagaagtctcgcagccgagagaacaggccattgaatatgagggcgtgctgggcatacaggcggccgtaggagtgggagaagagctgggtcagagagtgctgggctactgagagcatctccagaaaaaactctgcagcaaatgcagggaacaggtggaaggcaggtcaggccaaagaatggggagaaaagtgaacaggcagaggcaggaggagatgggagagaagagaaaagacaagtgaatcagaaactgagtaactctcagagatggggcagacagggaatgggggagggcagggccctggagacagagtctggggggtgggcgggctgggaggggatggagtcttcacagatggagtaaggagtggggacaggagccttgctggggtcctaagcaccgagaggagctgtgaagctgagtttggggaccccaggtcctcaccatcaaattttctgtgcctggcagccagtgtgtgaaccagaaaggagccgctgtcctccaccaggcctcggaaggtggcctcagtctccctgatcagcctctgctctgtctcactggaacagcaggtgtactcctggggacagacccggaggtgctcacctggacagaggagacgtgaaggaatggtgggaagtgatatcctaaaatcccttccatttcccgcctatctctggggactatgccttctcttctacctgcctggtctcttttctattgtctgcaccctcttccctacctgaacctatcccctaccttattgtctcctgacccatcccaagttcactcccattagccacgggatcatctatttaacagctgccctgagggccaagtcagtggtcagagtgtcctcaggtgaccctccccaatgtccacaccccagacctcgagggacttggagaacagcttctaggggatgaagaatggggcttggaagggtggggttacttggtgagcaataaagtattctcatagaaggggctaatagaaacagcgaggagaacatggctgtgaagaaagaaacacatagggggtgttaattaggaggaggggattcctggggtggggatggagtaagagcgctattctttgcataggagggttattgtgatcccggtaaggaagttacaggaggagaacagacattactgtgggatgaaaagattagtataacggtcactctgaaaaggaagagagttattgtgagatgaggaggccccgcccccgccccccacccccaattctctagtcttcctctttctcctcacctgagatcagggcgggagggattaggtttaagctatatccccgggcccccagcacctgccgggtctctgcacaactccgggtgacctttgcctcgctcccgggtccgggaccaggaccgggacacagaggcagcagcagaagcaggagaggtcgcagcgcggacataactgcagccaccccaggacggcaaagtgggtcctaaggaggaaagcagagcctcccaaactcgggaatccggtactcggccgcgggaccgctccgcgggccagagaaagagcgctgctccggaaaactgaataccgagcacgatagctggaccaggcggcatctgccgagacaatgggagcggggagccggacagggggcggggcccgaggcggggccccgccaataatggctcggagccggcttcaggggcgggggcaaggaagaaattaagccaatgtagcgcggaagctcggcaggggggcgggacccggctggcactcaggaggttggtgaaataggggcgtggtctccctcgggggcgtggcgatccggctcaaaaggcggggcctgggtggaacctagcctatggcaattgagaagccagattaaaggggttactagcagtctggtccaaaacccgcccaatggagtaggagattgagggtagcgggggtgggacctgggtgggggcggggctaaagcgggccgcccgcgtgcccaagcccacgtgagagggcaggacgcctgagagcttgaggccacacgaggctgtggagcggcgtgactcaaacgtggcgcgcatcagctcgcacacttccaaacctcgcgatagctactggccctgggcgagccgttgggattgcgcttgcgcacagcgtgtcttgtacgttcccgcgcttttctggaatctttcgcccccggaagggcagcggcgggcgcctgtgtggaaggtggggtggccagagacacccgagggacctgaggtggggaccttccctgaaccctgctcggccagaagtcactcttccaggctctgacaggtttctccttgacccaagaataggccctctcgcgaccctcccggccctgacactaggagccttcccgggccgtgccccaatggcctccgccacagagctggagaatcctctccccaggcctccatagactgagagtccattctcttaagcgcttggaaggctctttatcctggagccgcttaccccaggggcagtcgtagatatttttaccttctggaaaaataggaaacgcgcacctgcctttcctccttttgcgtttccagccctattctcatggcgcctccacccccaaatccttaagagcctcctgttccattccaggtggaatcaggtgctagtcctctggaaacgaaagcctggggtcttcttgtattttttttcttatttctttctttattttttttatttcattttaaaaaacctgtaagttcccttg

SEQ ID NO: 2501 - DNA, 6000 bp, Homo sapiens
ggctcactgcaatctctgcctcccgggttcaagtgattcttctgcctcagcgtcccaagtagctgggactacaggtgcatgccaccacgcctggctaatttttgtatttttagtagagatggggtttcaccatgttagccaggctggtctcgaactcctgacctcttgatccacccacctcggcctcccaaagtgctgggattacaggcatgagccatcatgcccagccggccaagctggtcttgaactcctgacctgtccttgtgatccgcctgcctccgcctcccaaagtgctaggattacaagcgtgagccaccgtgcctggccaattttaggatttttttagacagggtcttactctctcgcccaggttggagtatagtggcatcatcatagcttactgcagcctctaactcctgggatcaagggagcctcctgcctcagcctctggagtaactgggacaacaggcatgtgtgccaccatgcctgataatttctttcttttttttttttttggtagagatgcggtctagctacgttgcccaggctggcctccaactcctggcctcaagtgatcctcctgcctcagcctcaggagtaactgggactacaggcgcgggcgctaccatgcctggctgatttctttcttttctttctttctttctttctttttctttctttccttccttctttccttctttctttctctgtctctctctctctctttctttctctctctctctttctttcttgagatgacgtctagctatgttgccccagctgggctccaactcctggcctcaagtgatcctcctgcctcagcctctcaaagtgctgtgattacaggtgtgagccaccatgcctggctccaggctttcttgaatcccctcacccagatagttgccccagtcaggctccagtcccctgctgctgagacagccacgaaccacgttgaggcagaagccctggcagggcataagtgaggggaccccccggcacaggggacagccgatgagacgcatcagagcctggctgcagccttcagacaccggcacctgggggcagagagtggggctgtgtcctccacaaacgctgtggctgctctcagcctggcttggtgctgggcacagacagaaatcacataccccaccctacacctagggttggtgaccccacgtggcagcaggtgagattgtcacagatctgaggagggaggttccaggttgctgactctgattcgtgggaggggtggaaatagagaggcagttaggggtggagggaacattcaaggacaagagtgagcccatcacagctggggagggaggaggcggtcaggaggcagaaggtgaggctgggaggtcaggtagaggatgggcagtgagagaggccaagccaggcatctggccttcagcagcagggaagtggagtcattgagggatcctggggggttgggcgggggcagtatccaatctcctactgctatggagatgagcaggcccttggggactgaggagggtatgggtccacagaggggaggagggggtcagagatcatggatcgtggaccattggaggtttcactccagccccctccttcctaattcatcctaggacaccagggcctggaggcagacagagcccaaggcctgtcctgctggctggtggctgtttcttccttgtggggtctctctcacttccacctctccctccctgggccctgcccatactcaggcaccctccaaccttaagcgcttcgctgaccacatttcttccagtctccaggccctgcacaaaggctcgggcagccaccagggtccgggttatctgggagaaggcaaagaaggtgagaaaaaccacaaggttgttatgggtcagtcaagactggagccaagagactgcatcaagagcagtgagggttgggtgtgtggggttctctcagagtgggtcgagtgttgggtggtacagagaggcaggttcaagagcccccacaggaattatagtcttaaagaaaaacaaaggaaggcttgggaagagatggagggattatgttgtacagggcttagagagagagaaattgtgtatcggaactaacactgaacttgaagccagaagacctgggtgtgagccacggctctgccacttactggctgaaaagcttaatctctgggagcctcagttttctcatctgtaaaataagggcatgactgtctacctcacagggttatgatgacaactaaatgtgatactataaaagaaaatgccttttgcgtattgaatgcacaattcctgtttagttgaaccagaggaagtcaaggtgttacgattaggaaggggttggcacaaaggtggctggaggctaagggcaggtgagtgtttgtgtgaaactagggctcagaatgggaggtggcaggggtgggggcatctgcttcaagaagaccaaggggcactgggtcgggcagtggtgagtaaagctcaggatagggatcaccaggtcagaaatggcttcaatgcaggatgggggatcaccaggtcagaggtgactggagcacgccagtttggaggtgagtggtgcacagttcaggggtcactaggtcagaagtggttgaagctcaggcctcaggatccctcacctgcaggcggaggcggcggggtgagtccccaaagggctgcagagagccatcggtagatgaggccaagcgtgagaggcagagcaggtagtcaggggggaagctgtactgtgggtgcagcagcgggaacactctctccaggagctgtgcccagaaatccgccagggtgtcatccaacccctcaccagattccccatagaagtctcgcagccgagagaacaggccattgaatatgagggcgtgctgggcatacaggcggccgtaggagtgggagaagagctgggtcagagagtgctgggctactgagagcatctccagaaaaaactctgcagcaaatgcagggaacaggtggaaggcaggtcaggccaaagaatggggagaaaagtgaacaggcagaggcaggaggagatgggagagaagagaaaagacaagtgaatcagaaactgagtaactctcagagatggggcagacagggaatgggggagggcagggccctggagacagagtctggggggtgggcgggctgggaggggatggagtcttcacagatggagtaaggagtggggacaggagccttgctggggtcctaagcaccgagaggagctgtgaagctgagtttggggaccccaggtcctcaccatcaaattttctgtgcctggcagccagtgtgtgaaccagaaaggagccgctgtcctccaccaggcctcggaaggtggcctcagtctccctgatcagcctctgctctgtctcactggaacagcaggtgtactcctggggacagacccggaggtgctcacctggacagaggagacgtgaaggaatggtgggaagtgatatcctaaaatcccttccatttcccgcctatctctggggactatgccttctcttctacctgcctggtctcttttctattgtctgcaccctcttccctacctgaacctatcccctaccttattgtctcctgacccatcccaagttcactcccattagccacgggatcatctatttaacagctgccctgagggccaagtcagtggtcagagtgtcctcaggtgaccctccccaatgtccacaccccagacctcgagggacttggagaacagcttctaggggatgaagaatggggcttggaagggtggggttacttggtgagcaataaagtattctcatagaaggggctaatagaaacagcgaggagaacatggctgtgaagaaagaaacacatagggggtgttaattaggaggaggggattcctggggtggggatggagtaagagcgctattctttgcataggagggttattgtgatcccggtaaggaagttacaggaggagaacagacattactgtgggatgaaaagattagtataacggtcactctgaaaaggaagagagttattgtgagatgaggaggccccgcccccgccccccacccccaattctctagtcttcctctttctcctcacctgagatcagggcgggagggattaggtttaagctatatccccgggcccccagcacctgccgggtctctgcacaactccgggtgacctttgcctcgctcccgggtccgggaccaggaccgggacacagaggcagcagcagaagcaggagaggtcgcagcgcggacataactgcagccaccccaggacggcaaagtgggtcctaaggaggaaagcagagcctcccaaactcgggaatccggtactcggccgcgggaccgctccgcgggccagagaaagagcgctgctccggaaaactgaataccgagcacgatagctggaccaggcggcatctgccgagacaatgggagcggggagccggacagggggcggggcccgaggcggggccccgccaataatggctcggagccggcttcaggggcgggggcaaggaagaaattaagccaatgtagcgcggaagctcggcaggggggcgggacccggctggcactcaggaggttggtgaaataggggcgtggtctccctcgggggcgtggcgatccggctcaaaaggcggggcctgggtggaacctagcctatggcaattgagaagccagattaaaggggttactagcagtctggtccaaaacccgcccaatggagtaggagattgagggtagcgggggtgggacctgggtgggggcggggctaaagcgggccgcccgcgtgcccaagcccacgtgagagggcaggacgcctgagagcttgaggccacacgaggctgtggagcggcgtgactcaaacgtggcgcgcatcagctcgcacacttccaaacctcgcgatagctactggccctgggcgagccgttgggattgcgcttgcgcacagcgtgtcttgtacgttcccgcgcttttctggaatctttcgcccccggaagggcagcggcgggcgcctgtgtggaaggtggggtggccagagacacccgagggacctgaggtggggaccttccctgaaccctgctcggccagaagtcactcttccaggctctgacaggtttctccttgacccaagaataggccctctcgcgaccctcccggccctgacactaggagccttcccgggccgtgccccaatggcctccgccacagagctggagaatcctctccccaggcctccatagactgagagtccattctcttaagcgcttggaaggctctttatcctggagccgcttaccccaggggcagtcgtagatatttttaccttctggaaaaataggaaacgcgcacctgcctttcctccttttgcgtttccagccctattctcatggcgcctccacccccaaatccttaagagcctcctgttccattccaggtggaatcaggtgctagtcctctggaaacgaaagcctggggtcttcttgtattttttttcttatttctttctttattttttttatttcattttaaaaaacctgtaagttcccttgcagagggcggtttatacttccgaagcctccagagaggggtgcgtctgaagctgccctgctgtctgccttgcttggcttttttttttttttccatttaattttttttttttagagacagggcgttgctatgtggcccaggctgatcttgaattcctggacccaagcgatgctcccgcttcgccctcccaaagtactgggattataggcgggagcactgtgcaccacgcctcggcttttggagagcaattccaaacccactgcccagtttctggtgtctgtaatcccttggtgctttaggtccactctttgccttattttatttatttgtcattacttttttttttttttgagacagagtctcgctctgtttcccaggctggagtgcagtggtgcagtcatagctcgctgcagcctcgacctcctgggctcaggcgatcgtcccgc

SEQ ID NO: 2502 - DNA, 6000 bp, Homo sapiens
cattttaggcaaataagaaactatgattacttctcttctgtactgcttttgtttttcctctagttaataattatcttattttagtttactattcatcactagaccaagcccaaacccctcaatgattgtgtaaatctcccctttccagaggtttagatgaggtgttctattttcatctttctgaagcagtctcttctggaacctcctggcctacgccaatctacgcctattgcacagttgttctcagggcatctctgttcctgtattgaatctttctgtttcctatatcctatgtcatctttattcttggtttactctcttattttagtggagtacaaccttcagtagcttcccgagaaaggagaaataaatgaaagcttgctgggcgcggtggctcacacccgtgattccactttgggaggccaaggcaggcgaatcacctgaggtcaggagttcgagaccagcctgagcatggcaaaaccctgtctctactaaaaatacaaaaactagcttggcatggtggtgggcgcctgtaatcccaactactcgggaggctgaggcgggagaattgcttgaacctgggaggcagaggttgcagtgagccaagatcgtgccattgcactccagtctgggtgacagagtgagactctgtctcaaataaataaataaataaataaataaataaataaataaataaaacaaaagctaaattttttgagatctttaatgtctatttttattcttgactacaagagtgttaaaaaaaaccccacatttttattctaacctcacatttgattcatagttcactaattaagtacagaattccagtttttggccaggcgtggtggctcacaactgtaatccagcaatttgggaggctgaggcgggcagatcacttgaggtcaggagtttgagactagactggccaacatggtgaaaccccatctctactaaaaatacaaaaattagccaggtgtggtggtgcacacctgtagtcccagctacttgggaggctgagacaggagaatcacttgaacctgggaggcagaggttgcagtgagctaagatcttgccaataaactccggcctgggtgacagagtgagaccccgtctcaaaataaaaacaaacaaacaaagtgtgggaagataaatgttgataaatgttctaggaaaaaaaagcaaaaaacaaaacaaaacaaagaaaaggccaggcacagtggctcatgcctataatcccagcactttgggaggctgaggtgggcagatcacctgaggtcaggagttcaagaccagcctggccaatgtgatgaaaccccatctctactaaaaatacaaaaattaggcgggcatgatggcgggcacctgtaatcctggctactagggaggctgaggcagaagaatcacttgaaccccagaggcggaggttgcagtgagccaagatcgtgccactgcactccagcctgggcaacagaacgaaactctgtctcaaagaaacaaacaaacaaataataaataataaaaggggcactcacttgtgaaaatggggaggataaaaataaataaataaaataaaaagagcattcagagaacaaaaaatatgacagcagaaattaaaagcctcctgggttcaagcaattcttgttcctcagcctactaagcagcagggactataggtgcacgtgccacaatggccagctaatattttgtatttttagtagagaccaggtttcaccatgttggccaggctggtctcgaactcctggcctcaagcgatccacgtgccttggcctcccaaagtgttgggattacaggcgtgagccactgcacttggcctatctttccactcttgaaattttaatttctgctgtcatattttttcatctctgaatgcttttcttattttatttatttttaccctccccatttacaagtgagtgctccttttattattcatttatttatctatttaattatttatgtttgagacagagttttgctttgttgcccagctggagtgcagtggtgtaatctcggctcgctgcaacctctgcctgctgggttcaagagattctcctgcctcagcctcctgggtagctgggattacaggctcccaccaccaggcctggctaatttttgtacttttagtagagacaggctttcaccatgttggccaggctggtcttgaactcctgacctcaggcaatttgttctgcctcagcctcccaaagtgctgagattacaggcaggagccaccgtgcccagccaatgctccttttaaatagtatccttttctctcatatgtgggagcttaacattaaacaaattgaattcaaggagatagagagtagaatgattgttaccaaaggctgaaagggtagcagggaggaaggcataaattggggatggttaatgggtccaaaaatacagttaggggccaggtgcagtggctcatggctgtaatcctagcactttgggaggtcaagacaggagaatcgcttgagctcaggagtagagcccagcctgggcaacatagcgagtcactgtctcaacaaaaaaaagttagccaggaatggtggtgccagtctatagtcctagctactcaggaggctgaggtgggtggatcccttgagcccaggagtttgaggttacagtgggttatggctgcaccactgcactcctgcctgggcaacagagggagaacttgtctcaaaaaacaaacaaaaaaaccaaaaccaaaacaaatgacgacaacaacaacaataaaacagagtgactacagttaataatttattgcatattttaaaataactaaaagagtggaattggactgttcctaacacaaagaaatgataaattctcaagatgatcaataccccagttactcggatttgatagttacacattgtatacctgtatcaaaacatcacatgtcagacggctgggcagccatggcgtcctatatcgatgaacacgactgtgagccgttggaccctcaagcaggagactcgaaccaacatggtgctggagctcgtaaggtcacttttgaataggatggactttgaagacttggggttggtagtagattgggaccaccacctgcctccaccggctgccaagattgtggttgagaacctctccaggacagtcatcagaggctctcaaggctgagctcaagtgccccgtgtatcttttggaatctgaggaggagactgccattgagatgcttcccaacacctttttcattccagttgcattctgccctggctaagcaagacaaattcctgtcccttgtgccgccatgagctgcccactgatgactacacttatgaggaacacagacgagataaggctcgaaaacagcagcagcagcagaaccgactggagaacctccatggagccatgtacacgtgaggaggctggggctgagcgccggtcctctgtgtcttccctacaaaccttgaatcctcattaaaatttctttacccgtcccccgccccgccccagaaaaaaaggccgggcgcagtggctcacacctgtaatcccagcactttggtacgccaaggcgggcagttcacccgaggccgggagttcgagaccagcctgactaacatggagaaacatcgtctctactaaaaatacaaaattagacgggcgtggtggtgcatgcctgtaatcccagctacttgggaggctgaggcaggcgaatcgcttgaacctgggaggcggaggttgctgcgagcagagataacgccattgcaccccagcctgagcaaaaaaaaaacaaacacacatgtacactataaatatatacgattatgttcccataataggtaatttaaaaaatagtatccttgtttttttttttttttttaaatgagacggagtcttgctctgtcgtccaggctagagtgcagtggtgcggtctctgctcactgcacgctccacctcccgggttcacgccattctcctgcctcagcctcctgagtagctgggactacaggcgcccaccaccacgcctggctaattttttgtatttttagtagagacggggtttcaccatgttagccaggatggtctcgatctcctgacctcgtaatctgcctgcctcggcctcccaaagtgctgggattacaggcgtgagccacagcgcccagccatccttgttttatgcttgcaatagtaatttgtagctcgattatatatctctgtgcacatgtatttgatttttcttctcaccgtgtggtttctttttcctctgagggttgctttcccccccccttgtttgttatggtctctatggtactccttccgtgttagtttgtttaagaggctgtcaagtccacaggtcctctacacaacccttgctgctaggtagctccctttcctcctccctggtaaaagacagggttttgggcgaaacacatgttagatgctctgttctcttcattcagctcccagaacgcttataaccacctctacaccctctaggcaggaaatcagaagctcatctctagggactctgaccaacgttaaaagaaatatctaaagatactgacattcattggaaacccccaactaaatattcgaaccaaataaccctgcaccgaagctcctagtcaacaagccccccacactctcagaacatctggatattgcctaaaatataaatttaaattattcatattgaatttaaggcgttgggagagggatatcttaaagttccatcattaagagcttcaataaagtggaggggacttttaccgcggtggagtgagcgaatcccttctctggagctccataggggagggtgcccgcttcctgagtggccgttccgacctccggtcaggagggggaggaacagagcacggccggcggctgcacgggcagggcctctctgggctgagaggaagaaaccagtgagacatcgagaggaagtcgctgtggcactcagtcctacggcctccgaggctgggtagtgagtgtgtcgctggccttagccagactccacaggccacgctggctgcgaatggagccgaggactcgcgcggaggcgagatgctaccagccggcgagatcggcgcctctcctgcagccccggtgagacggccctggcgtccctgggaggggacattggtggcccattgaggtggcacagacctcccgggggagatagtcccggtgcggtggccctgtaagcttgtgaaggtgcttcctgcggcttagattagaggcccttgtaagacctcctagaggaggcggtagtccccgtgaagtggctttggcggccctggtgagatgacagatttctctagggaggtggctctagtgagcaggcaaggtaactccaggtcctgcggaggtgacacacacctcctgggaaggtggcggtggcaccaggacagtggcactttgaggtacctgattcggacggccctggtcgctcagaaagtgggagagcgtctggaacctctcttgcctccagtgggtgccctttgggagccccgtatgctttccatccacgactttaatcttaatgtgcttgtcacatctgttcttcttctagtgctgctctgaaagtggtgacgaaaggaagaacctcgaggagaaaagtaagccagctccaaacaccttagctttttcttcccgcccaaactcagccttccagggtctgcaatatagaaaggttctttgcctatcttttagatgcagtaccgttttctgcacaatatgcttatatggtaatactgatgaccatgatacacatatttttgtctttctaaaattgtaaaatatgggatgctttggagaagagcacttcccgatccatacctagtacagggactagagtgttttcgctggaagtctgcctatcatacagtactcagaataattggggcctgcctgtcattttaatgaaacatcaacttactaagcatcaggaatttggaggggcccatgatctaggacagacgaccaccaccctaattgggttcaaag

SEQ ID NO: 2503 - DNA, 6000 bp, Homo sapiens
tggtaaatctattttctcataattgcactttaaagctgaacaattaaatatcctcaacatttttattacttatattctgtataacttgaaggagttgaagtgttaattaggttggtgcaagagtaattgtggtttttgccattttttaaatggtaaaaatggtaaaaaccacaattacttttgcagcaacccaatactttgtttgcctttgagtgactgacactgtgagggaaacaaaaatgaataatagtgcttatcatataaacatagctgaaagatgagacgttctcaaataataacaatgattacatagaggaagtgacagttaaagtgcatgcaagttatttaacaaagtcaaatattcagaccagcatcctatatatagtgctacactacgctgtatatgagaaaattcatgctgcttgtctcccctttttattcatttgttccacaggtaggtatttttttaatagcttattatggaccagacaaaaaaaagcgcatgagatggtgactgataaggagagaatgtaaatgtggaggggggacaaatgtaagcaacaatattcagtttagcacagtgtgataaaagcgatgtgtgtactattcctacttttttttttttgagacagagtctggctctgtcacccaggctggagtgcaatggtgtgatctcggttcactgaaacctctgcctcctgggttcaaacgtttctcctgcctcagcctcccgagtagctgggaatacaggtgcgtgccaccacacccagctaatttttgtatttttagtagagatggggtttcaccatttcggccaggatggttttgatctcttgaccttgtgatctgcccacctcagcctcccaaagttctgggattacaggcgtgagccaccgtgccccgccctattcctacaattttaattgctctttatctgacttaattgcacttaaaatgaggtactttttgctagcaactaaacatagagaaggtcctaggataccaaatagacgggagtagaaaatactatgtgagagtttgtgttaaatagttcagataacagtaatgatctctagaaaacttgcaggacatgagaatagtcatttgagcttgattttaaacatcgagagtgagatgaaatagaattgttgccttctctaaatacattttcatttataccaaattagacttgacaaaaactttttgggaaaaattgggataaaaaaatgagtactcctctctatgtcctgaggatacccaggtttatttctccagacttggacttcctaaatgccagatgaatatattcagctgcccaaggacctctggactcaaatttcttcctgcacagcatgcttatcacccgaggttgaacctatcctttcccttcctcccagtccccaaatctgctatcctctccagcattccctcagtcaataacatcaacataaccacccttccccaacatactgcaattacccaagctggagacacaatcattttgattcttcccttttacgttgatttttcttcctaatgtggttatagtgttaagacattagcttatcagccactgaagaaaggtcttgctttctggtcatcggagcaaaatctaaacttcagttgcatcaagaactacaggaacaggagacagatgactcacttctacaatggccatcattagctcctgtggatttcattacaacttgactgaattacctgagtactttgaactaattagaaaattaactcatttgaaaggatagtaaggtatatggaaggatatttgttggagtttaaacattcaagatgctgtctgaaaactttgagaagtacttagaccatacatgtgttcaatttctccatttagtacttgttcatgtgatttcatttgtttaccttttgacaattcaaagtgattattttcaatatcaggcaatgcatgtacttgaacttctctgtagttaagcaaagcagtcattggtgtgtcaaatatggtggaatcagggaaacacattatttcactcctaaataggatttaccggttttttgtttttcttctgttcgttttttactatctctaacaaattagaacttgatatttaagataacagaggtaactttacaaaccgctggaaagacattttgatttgacaatttcttgacatttttttgcatacattttatgtgtgtatatgtgtgtatagatatggtgactgtaccaatcaagaagaggtgttatttaaagtaactgattttttaacttcaattttatcatggaaacatctgaaagatagttaaaaactgtagttatatctgttttagtctgagagtataattagcacatgtaaaaatttccaaggagatcttactagttttgtactttgatctttgttctggcttataagttggctagttttattggtcactcaattaatgatgatgtctctggtaaatacacataagctactaatgtggtcatttagccccccacggaagtcagaagattggactaagtgtccacttaaaggtgtagcgaattctaatactagtatttaatcagttgtgactaaactatctaaatttaactcatattaaagacttggataaaaatgagaaaaagtgtgcaaaaaatgttttctatctttttattctcaataattggcacagtggtcaaaaaatggaactaaacgtttctgaatgaatggaaaaggctttatggagctattaaaggataaattattatttgtaacatattgtacaatatctggatctaaagttgaattttttttccccatttccggtgtcccccgataaaaaaaatcaccactaaggcatttggtaaaaactttaaaatagtttaacttttaaaaacaaggtttagctgaaagcagatctcacagtttgtgtactggagaggggtaaagcagtatgtcaatctcttgccagctcttttttttttttttttttaagagaaaagttttttagttttctaggaggagttagacataaatatctcaaaacaattttaaataattaggtgaacttcacagatttttcttttttgtcaagaaattacatgttggagtagagtttatattttctattctagtacacgatgaccctccattgtaaaaaaaaaaaaaaaaaaaaaaagcatacacaaagtagcagagacattcatttctttgagtcactaataatttctgaaagatgataaattcaaatcctgtcctttttcctcagggaaaaaattaagcattctgttggctctcctctgaattattttaataaaaaatagaatgctttattactatttgtgaacatagaaagtaagtatttgattacacgggaggactactttataatttcacttcacggattcaaatggggaattctcaagaattttaaactcgatttcaacatgtgggggcttattttggatttcttgatttgttacgcggctttcaggtatatttaaaaatccaagaaatgcaggaggttttaaagaaataactagctgtgtgatttctggctctgtccaaaggtttgcttttacagatttcttactaatgtaggttttcctcatcttaattctaagcatatatttagtgatctaaagttagaaaatctaaagcacaatttaaatgattaaacactaaaggttcaaaggggggaaaaagcttaatcatgcctttgtaatgtgaatggtaaagacaccaattattgactagatgcagccgactgtgaatggacagccatgtttaaagagaagttaactataaagcagggaagcgtctctggtgagtcagagaattcgtaacttgaggaactcctagtggaaatgaagtggaaagacagtttctttcatcaatgagaaaacgtctagaaggaaaagagggttaataaaactcaccagagaaacttactgataatgattcacaaattaaatcagtttacgtcatacattacaccctttgtattacgttaaccaacgagcatactaatcagtatggaaaatgccgctttaacttgcctcaatttcgtaatcgcccgcccccgcccccgctttgtaaattctctagactccagcttctcgcttgctcacagtccatcccccagcctcactcttcctggcacttaggtggcggctcaacaaacttaggtgaactgaacagagctgacaaggcaatctcaagttgctgtcctgggagtggtgaggcaaggcacaagagaaaggacttctagttcttcccactgccagtgcagcccccagcatcactttcgaccccttcgtgcctggggccgtgatttgtgggtgatcaagtccctcgctagcctgcagtacttccgctggtgcagtcatctccttcccctcgcactaaaacaataccctggcctcctgccaaactcttgagcagcgagcaactctggctgtttatggcccggattgggtgctgcaagaggcttgggccgctctaagtgttagcagaggcccggaggaaaagaagaggcccaagctttaaaacactcccttcctccgccccctcccttttgtcccagacaccaaaacaaacgagctgatacacgtgtccctatgactcttgtttactatcaagactgcgctgtgcgagcgcctctgggatacgtagtccagctcttccccggccagcagtctcccacagccaaggaccaaggcttgagactacgaacccacaatccatttcggggacaaagtttggcttgggtccccggactctcggcaatagtccaatccgaagcacttactcttgtgattgacatgccatcttctccagtaaacacaacacaaaagtcaatacatgcccgccccccgagacggaccacggtaccacccaatgggaaaggggaagaaccgaatggcagttctgcagtccaataagagggcgaaagagctgggcggggctcaacccccagggggttgaggggagggggaagacgaagcttgaaagacttggtaatggcgacgggtttggtaagtaggaaagtttcggttgaggagtaagagctgccgcgggagcagtaacccgcgcgggggaggccgacgtcggtcggagagggggtacgagagctgctggtggtgttgtcgtggccggagcggcccgcgcctgggctgccggcacttcgcggcaggtttgttgtctttcagttagggaagaggtgggggtggggaagggaggggcaggagcgcgggggattgggcagactggagggctcgggtcctcgttccttcttctcggagggttgcccttggggtgggggcagttaaccgttcgattggtgcccgcggcgagcccaccggagcagcgtctcccgcgagctcacctgggcttcggggcggcggcgctagggggtctcgggcgggggccgggaggaggcagggggagggcgaagttccgggccaggtcgcgcggtgggtggccgggccgggtgtggagatggggcgggccagggcgggggaaggggccgacgcagcgccggggctgcccaggaaagtttgacttcaactccccgtttgtgggcggagggtcggagcttggccaggggtggggggctggccggaggtgggggaccccagtgaggcgccgcctccttctggactgagggggattctggctgagctgaggagctcgcggagccgctgggccccggggctcattgttacgcagttcgaatgaatgggctcccaggcgcctgcgcgctggggctgagccgaggggaaaaacaagcccggagtccgggctgcggtcacatgatggggggaagggaggggaacgcgatgaatggcgaaagagggtgggggatggacttggcgtgaaccgggaggcaccgctctgtgtgacccaaagaggaggcttggcaggcgattccagtctccgcctttcaacctatgctgccaccgcaggccgattgaaacaaaacaaaacaaaccaggcgaagtggacagccaggtttttgtag

SEQ ID NO: 2504 - DNA, 6000 bp, Homo sapiens
ttttagtagagatggggtttcaccatttcggccaggatggttttgatctcttgaccttgtgatctgcccacctcagcctcccaaagttctgggattacaggcgtgagccaccgtgccccgccctattcctacaattttaattgctctttatctgacttaattgcacttaaaatgaggtactttttgctagcaactaaacatagagaaggtcctaggataccaaatagacgggagtagaaaatactatgtgagagtttgtgttaaatagttcagataacagtaatgatctctagaaaacttgcaggacatgagaatagtcatttgagcttgattttaaacatcgagagtgagatgaaatagaattgttgccttctctaaatacattttcatttataccaaattagacttgacaaaaactttttgggaaaaattgggataaaaaaatgagtactcctctctatgtcctgaggatacccaggtttatttctccagacttggacttcctaaatgccagatgaatatattcagctgcccaaggacctctggactcaaatttcttcctgcacagcatgcttatcacccgaggttgaacctatcctttcccttcctcccagtccccaaatctgctatcctctccagcattccctcagtcaataacatcaacataaccacccttccccaacatactgcaattacccaagctggagacacaatcattttgattcttcccttttacgttgatttttcttcctaatgtggttatagtgttaagacattagcttatcagccactgaagaaaggtcttgctttctggtcatcggagcaaaatctaaacttcagttgcatcaagaactacaggaacaggagacagatgactcacttctacaatggccatcattagctcctgtggatttcattacaacttgactgaattacctgagtactttgaactaattagaaaattaactcatttgaaaggatagtaaggtatatggaaggatatttgttggagtttaaacattcaagatgctgtctgaaaactttgagaagtacttagaccatacatgtgttcaatttctccatttagtacttgttcatgtgatttcatttgtttaccttttgacaattcaaagtgattattttcaatatcaggcaatgcatgtacttgaacttctctgtagttaagcaaagcagtcattggtgtgtcaaatatggtggaatcagggaaacacattatttcactcctaaataggatttaccggttttttgtttttcttctgttcgttttttactatctctaacaaattagaacttgatatttaagataacagaggtaactttacaaaccgctggaaagacattttgatttgacaatttcttgacatttttttgcatacattttatgtgtgtatatgtgtgtatagatatggtgactgtaccaatcaagaagaggtgttatttaaagtaactgattttttaacttcaattttatcatggaaacatctgaaagatagttaaaaactgtagttatatctgttttagtctgagagtataattagcacatgtaaaaatttccaaggagatcttactagttttgtactttgatctttgttctggcttataagttggctagttttattggtcactcaattaatgatgatgtctctggtaaatacacataagctactaatgtggtcatttagccccccacggaagtcagaagattggactaagtgtccacttaaaggtgtagcgaattctaatactagtatttaatcagttgtgactaaactatctaaatttaactcatattaaagacttggataaaaatgagaaaaagtgtgcaaaaaatgttttctatctttttattctcaataattggcacagtggtcaaaaaatggaactaaacgtttctgaatgaatggaaaaggctttatggagctattaaaggataaattattatttgtaacatattgtacaatatctggatctaaagttgaattttttttccccatttccggtgtcccccgataaaaaaaatcaccactaaggcatttggtaaaaactttaaaatagtttaacttttaaaaacaaggtttagctgaaagcagatctcacagtttgtgtactggagaggggtaaagcagtatgtcaatctcttgccagctcttttttttttttttttttaagagaaaagttttttagttttctaggaggagttagacataaatatctcaaaacaattttaaataattaggtgaacttcacagatttttcttttttgtcaagaaattacatgttggagtagagtttatattttctattctagtacacgatgaccctccattgtaaaaaaaaaaaaaaaaaaaaaaagcatacacaaagtagcagagacattcatttctttgagtcactaataatttctgaaagatgataaattcaaatcctgtcctttttcctcagggaaaaaattaagcattctgttggctctcctctgaattattttaataaaaaatagaatgctttattactatttgtgaacatagaaagtaagtatttgattacacgggaggactactttataatttcacttcacggattcaaatggggaattctcaagaattttaaactcgatttcaacatgtgggggcttattttggatttcttgatttgttacgcggctttcaggtatatttaaaaatccaagaaatgcaggaggttttaaagaaataactagctgtgtgatttctggctctgtccaaaggtttgcttttacagatttcttactaatgtaggttttcctcatcttaattctaagcatatatttagtgatctaaagttagaaaatctaaagcacaatttaaatgattaaacactaaaggttcaaaggggggaaaaagcttaatcatgcctttgtaatgtgaatggtaaagacaccaattattgactagatgcagccgactgtgaatggacagccatgtttaaagagaagttaactataaagcagggaagcgtctctggtgagtcagagaattcgtaacttgaggaactcctagtggaaatgaagtggaaagacagtttctttcatcaatgagaaaacgtctagaaggaaaagagggttaataaaactcaccagagaaacttactgataatgattcacaaattaaatcagtttacgtcatacattacaccctttgtattacgttaaccaacgagcatactaatcagtatggaaaatgccgctttaacttgcctcaatttcgtaatcgcccgcccccgcccccgctttgtaaattctctagactccagcttctcgcttgctcacagtccatcccccagcctcactcttcctggcacttaggtggcggctcaacaaacttaggtgaactgaacagagctgacaaggcaatctcaagttgctgtcctgggagtggtgaggcaaggcacaagagaaaggacttctagttcttcccactgccagtgcagcccccagcatcactttcgaccccttcgtgcctggggccgtgatttgtgggtgatcaagtccctcgctagcctgcagtacttccgctggtgcagtcatctccttcccctcgcactaaaacaataccctggcctcctgccaaactcttgagcagcgagcaactctggctgtttatggcccggattgggtgctgcaagaggcttgggccgctctaagtgttagcagaggcccggaggaaaagaagaggcccaagctttaaaacactcccttcctccgccccctcccttttgtcccagacaccaaaacaaacgagctgatacacgtgtccctatgactcttgtttactatcaagactgcgctgtgcgagcgcctctgggatacgtagtccagctcttccccggccagcagtctcccacagccaaggaccaaggcttgagactacgaacccacaatccatttcggggacaaagtttggcttgggtccccggactctcggcaatagtccaatccgaagcacttactcttgtgattgacatgccatcttctccagtaaacacaacacaaaagtcaatacatgcccgccccccgagacggaccacggtaccacccaatgggaaaggggaagaaccgaatggcagttctgcagtccaataagagggcgaaagagctgggcggggctcaacccccagggggttgaggggagggggaagacgaagcttgaaagacttggtaatggcgacgggtttggtaagtaggaaagtttcggttgaggagtaagagctgccgcgggagcagtaacccgcgcgggggaggccgacgtcggtcggagagggggtacgagagctgctggtggtgttgtcgtggccggagcggcccgcgcctgggctgccggcacttcgcggcaggtttgttgtctttcagttagggaagaggtgggggtggggaagggaggggcaggagcgcgggggattgggcagactggagggctcgggtcctcgttccttcttctcggagggttgcccttggggtgggggcagttaaccgttcgattggtgcccgcggcgagcccaccggagcagcgtctcccgcgagctcacctgggcttcggggcggcggcgctagggggtctcgggcgggggccgggaggaggcagggggagggcgaagttccgggccaggtcgcgcggtgggtggccgggccgggtgtggagatggggcgggccagggcgggggaaggggccgacgcagcgccggggctgcccaggaaagtttgacttcaactccccgtttgtgggcggagggtcggagcttggccaggggtggggggctggccggaggtgggggaccccagtgaggcgccgcctccttctggactgagggggattctggctgagctgaggagctcgcggagccgctgggccccggggctcattgttacgcagttcgaatgaatgggctcccaggcgcctgcgcgctggggctgagccgaggggaaaaacaagcccggagtccgggctgcggtcacatgatggggggaagggaggggaacgcgatgaatggcgaaagagggtgggggatggacttggcgtgaaccgggaggcaccgctctgtgtgacccaaagaggaggcttggcaggcgattccagtctccgcctttcaacctatgctgccaccgcaggccgattgaaacaaaacaaaacaaaccaggcgaagtggacagccaggtttttgtagctttaaatgctgcgtgctgtctagggtgtttcactctccgctgtgcactctacactcgagttcattcttagggagttttcagctacagtcgtttttagaaggagcactgacagcgaggtaatactcaagttttctgtttgttttgtttttggctcatggtgccactgatgccaggacgagaggaggcttagaaaaggagttatacatactgggaagcgatggagtcctactaacagctcggatggaggctttagctttattaatacttccctctgaatagccgtaagcactcctaatagtggttttgaaattaaaggtactttttgagaattagaataattttaacattggaaatacttttctggtcatttaacagtgatctaaatctgcaatgtatgtcttgtacttttggtttttttttgctattttcctttatcttgcaaatgagtgtggtagagtcggtcatctgttcagttgccttggttaaactcagttcttgcaaggtagacagtagttgacaaaatttcaaggaaatttgaattatattgagaattaaatccactccctaaagtttttgggttatgttatacttttgaggagccgtttaaccactttaaagcaaaatattgtttgtgctttctctactgataaattatagaatgaagttttgatttcactttctagtttcatcttagttttgtaaacctacttatcttttctgtctcgaaaacccttcctctttcttaacttctcaaactcctaactacataccctagttaaaag

SEQ ID NO: 2505 - DNA, 6000 bp, Homo sapiens
atctaaactgttaatattaggtgtttaaagaactcacatagtatgactagtttctctcttaagagttaataaataaggaatctgcactgagaaccattgcaaaggaagctggagacgggtggctttcatagagactgggaatgtgagtgctctctttaaaaaaaaaaataccctccttaaaatattataggtgttcctgcatactcatacagtatttcagtatgattttgtccatagactcaaagagactgttttaaagtatagttctgatcatgtcagacctcttttaaaaaaaaaaatcatcagtggttcttcattgtctgataattgctaatcataacactagccactgtacattgaaggtttgctttgtgttaggctctattctgagcattttacatgatctcactgagtttttgtagcagcctgtgaggtaggtacttttattgccattttataaacaaggcatgaagattttaagtaaattatttagggtacatagctagtaagtggcaaatctggtatttaaactcaggcagcctgatttcagagcccctattcttgtctctaaataaataaatagttttcctaaactacaattgaagactctgatcctagactacctttccatatagtagtagtagtagtagtatagcctcagtgttcatgatcacatgacacacaaggccatcctactttgtggtaaaactagattctatattctgatctcactaggactttgccagctatatgagtttactcatgtgagtttctctcattgggagacctccctctcttcttttttttttttttttttgagacggagtcttgctctgtcgcccaggctggaatgcagtggcgcaatcccagctcactgcaagctctgcctcccaggttcacgccattctcctgcctcagcctcccgagtagctgggactacaggcgcccgccaccatgcctggctaattttttgtatttttagtagagacagggtttcaccatgttagccaggatggtctctatccccagacctcgtgatctgcccgcctcagccttccaaagtgctgggattacaggcgtgagccaccgcacccggctttttttcttttttcatttttttttttcggaaatggagtctcgctctgttgcccaagctgtagtgcagtggtgcgatctcggctcactgcaacctctgtctcccgggttcaagcgattctcctgcctcaggttgctgagtaggttggattacaggcgcgtgccaccatacctggctaattcttgtatttttagtagagactgagtttcaccatgttggtcaggctggtctggaactcctgacctcgtgatccgccctcctcggcttcccaaagtgctgggattacaggcgtgaaccactgatctagccccttcttttcttttaacccattcatagccaagtcctgctctgtagaactatggtcatttgcttatatctttccactaaagtcagactcatgatgaattgttcattagtgagatccagcattgcaactaatacaatgccctgtacatagtatttattaaataaatgatttttttaataagtaggaatttagcaaccatttttagcccagtgtatctcagtattctgcacctggaaacaaaaactagtgcacaaagccataccccacaccaaacagatcagatcctctggggatggggcctggacaacatttttttaagcatatgtatgatttcgtgtgccacagagtagagaatcactgatgaaattaaatttgctccatttttttttttttttttttcagggagagagtggaggcttaaaatcgtgatttcatacttgagaaatagatttgtgttacacattttctctagtcgctagttctgtgggggaaattgttatatcctagcatatttgctgtaactatatgctaagactgattgtgatcagtacattgtactaaactggagaagcgttaatttcttccaaatttcatcttttaggggcttgaagtaatggcatgatacatgatttttatggagatgtgctggatgacttgtcataatatctcctagggaggagactgttgaaactgaatagctatctggtttccacctgttaattatgtattttcagtagctgttctatttaggacattacagacccaaagtatgtttaatattgccctatgtctggggataaaaaaatttcaaaagacgtcattttacacttttttcactatttcatttcatcttcacaactactatcagaggagagtagggcaggtatcattagctctattttacagatgaagagaaactcagtcacttaggtcatatatttggtaagtgatcaagttggaatcaaaacccgtttccttacatctaacccagtgccctttttgctacaccataatagtagcaaattgtatagtcagtattgagcaaggctctaaagcagtgcccaggctaagggttatttttgagggatataggcagatagcatccaaaatagaatattagacatacagtaaggcaatatgcatgcagttgggctatgtgtcaagaacgctgtatctagcaatctaaaataatcagatgtaagcaaatacttttaaaaaataagaatataaattcagtgtttagaagagtgaagaaactgggaatagcatattcagtagtagaggggataagtgaatttcggtacatccttctgatgtatatttaaccatttagagctttgaaaaaataacataggaaaatgcttatgaacttatattaggccaaaaggtatcaaactataatatgaaatatgaagaaaaacatgattgagtatatgtgtacatgaagaagaaattggattgtaatacatcaaaatgtaaaaatatctaagtctggttggtggggttagaagtaatcatattcctttttttccaaaaaaattttttttcccattttttttcacagtgattgtattttctagtcaggaatacatttcaaaaccaaaaagatcatgaaaaagtcttcgtagaaagaaatttatcagtgtcatcggtgtttattggtaattaacatcatgacttagaaagcttataaatattaagtgattaacattttttcagtgcagttttgatcagcctgcactgggtgcttgactttcagtgacttttaacagcaatatattttattgctttattttgaggaaaaatatgttgttgcaaaagtcaggatttttttgtgtatttcatattcactcattagaactttttctttaagagggggggtcttgctacattgcccaggctggattccaacgcataggctgaagttgtcgtcccccttcagtctaccctaagtagctggaactataggcatgagctactgcatcaggctagaacttttttaaaaaatggaatttagactagagcctgagaaatcagaaaaatcttaccattgttgcttatgttaaataaagaactaattcgatcgttgtccaaagggtgaaataaaagagacaaccacattttcctttcataataatatttagttgttggattttgctgagaaattatttaaatttattaacccatattctcttccttgtgataattttgtaggcttgcaggtagatttactagttgtttaaatttcccatgatgattattcatctttctatacataatatcctattcagaatgacaggtatcttttattatggctaggtcccaaattttcattaagaaaacctaagaacatttttatttttatgagaattgtaatatatgaccattttaagaaactctgaaatgttatttagaaaatgtactttttttggccaggtgcggtggctcatgcctgtaatcccagcactttgggaggccgaggcgggtggatcacctgagatcaggagtttgagaccagcctggccaacatggtgaaaccctgtctttactaaaaatacaaaaaattagctgggtgtggtggcacgcgcctgtaatcccagctactagggagggttaggcaggagaatcgcttgaacccaggaggcagaggttgcagtgagccgagattgtgccactgcactccagcctgggtgacagagcgagactccgtctcaaaaaaaagaaaatgtatttttttaagtgtgctgaagtagttcactttcagaatgaagaaacaaaataaaaaacacagtaaatagagacattaaaatagaatctttaaaaaaggacaaaatagaatattcttccagttttttttaacttttattaaggaaagtttttaaatttccttttgaatttgaaggtacaagtgaaaaaaagagtcctattagtctcagtttttgcatctgaaaggacggttactaggttaaataaaagtatatacaatgccatttttcctcagcagaaaagacttttttttataattcaagatattaatcttttgggattgaaatgtgatttagtgctgagtattcagttgtaggccaagatgttaaggagtcatccgggtctaaaggatttgagggagctataaatggcagtgtatgattaagttaaaatctaacactgtggccgggcgtggtggctcacgcctgtaatcccagcactctgggaggcccaggtgggcggatatcttgaggtcaggagttcaagaccagcctggccaacatgacgaaaccccatctctactaaaaatacaaaaattagctcggcgtggtggcatgtgcctgtaatcccccctacttaggtggctgaggcgggagaatcgcttgaacccaggaggtggagtttgcagtgagccgagatcacgccactgcactgcagtctgggtgacagagtgtgactatgtctcaaaaaaaaaacaaaacaacattgtcatgtctctgatttattttaggtttgtgtactgcccaaattgcatggcttgacatcatttcttaatgtcgtttttattttaagtcagagcaccataacatggtgtgggaagtgaagacaaatcagatgcctaatgcagtacagaaactcctgttggtgatggacaagagagcctcaggaatgaatgactcattggagttgctgcagtgtaatgagaatttgccatcttcacctggatataactcctgtgatgaacacatggagcttggtaagcaaaattaaaagttatatagaaatctcactaagattcagataaatttttctacttagcccgcttctccaccaaccttgactggctagaaagggatatgaagtatttgtatattaggaattttcagcattcttttattgcttttaaaatactacttaaaaccaacatgagttgggctatttatggttattgtagacactcatttacagattgttaaattaaactactttactttgtgtgtaaagattggaccccactcgtggcttttcgaaagatgctacttttgaaatatacttgagagagctcagtaaaatatgcttagccactcttcgtggcagatttgctggtatgatgtggaaattacagtggacccttgaaacttgaggatctgacatttatggttgttactattgctaaactactcctggagatatgtgacctttagaaatgtgtaagtttgttgaggtgtgtttttgaattgtattgcttcaaggctggtgttcaggagtatggagctaatgagtcaccttggcttgctgcccagcttttcagcttggctttgcccccatttaatatatgggggtttccttcatgtttataaaaaccctggggagaagatacagctgtcttaattttacaaatgatgaaatggaggagattatgtactatggtaatgtttggaaatttagagatcttaagctcttgggacacataacctgcttgaatgccaaggattttctggaccctagtatttattgagtactggttacttttgagcaaggagtgccattttaatcaggtagttgatcttcctcagtttttggtttaaggaggaactcagaaacttagggc

SEQ ID NO: 2506 - DNA, 6000 bp, Homo sapiens
tggctgccgttggcttttaggataaagtccaaattctttggaaatttgtgtacattaattgaacaattatttattgagagtctactatgtccatgaggtattgtaaagactggggacacagcaatgaataaaaagtataaaagcccctctttcttccttccttcttctctctctctctctctctttctctctgtcatttttagatggagcttcactcttgtcgcccagtctggagtgcaatggtgcaatctcagcccactgcaacctccgccttttggattcaagcaattctcctgcctcagcctcccgagtagctgggattataggcgcctgccaccatacccggctaatttttgtaatttttggtagagacagggtttcaccatgttggccaggctggtcttgaactcctgacctcaaatgatccacccgtctcggcctcccaaaatgctgggattacaggcgtgagccaccatgcctggccaaaggcctcttttttttttttttttgagacggagtctcatgctgtggcccaggctggagtgcagtggcacaatcttagctcactgcaaccccacctcccaggttcaagtgattcacctgcctcagcctccaaagcagctgggattacaggtgcgtgccaccacactcagctaattttttttttttttgtatttttaatagagacagggtttcatcatgttggccaggctggtctcgaatttctgacctcaagtgatccacccacctcagcctcccaaagtgctgggattaaagaggtgagccactgcacccagcgctaggatagataatttttgaaggacctttgccgtaaataaaagcagagaaggtgttttcttgttttctgaaatagagtcttgctctgttgcccaggctggagtgtggagttcagcggcaccacctcgtctcaccgcaacctccacctcctggattcaagcgattctcatgcctcagcctcccaagtaggtgggactacaggtgcatgccaccacgcccagctaatttttatatttttagtagagacagggtttcgccattttggccaggctggtcttgaactcctgacctcaggtgatctgccccccttggcctcccaaagtgctggaattacaggcataagccagtgcacctggcctgttttgcatgtttttaagatgggagaagtaatatcttgctgctaatggaaatgtgcagtggaggggagaattggtggacaatgttcttgagtaggcaaggggaattagatccaatgtgtaagtttggccttagataggcacatagattacagcagggcttctcaacctgtgcacatattgggtgagataattttttgttgtggcgaggctgttctggatgttgtaaaatgcttagcaacattcctggcctctatcaccactccaaccaaaaatgtctcctgacattgccaagtgtcctgtggcaggcaatatcacactcatttgagaaccactgatcaatagtaacaggagggaaggtaaagtacggttagaggatgatgagaacaccattcatcatgcgaaataaaaacacaaagccggccgggcacagtggctcatgcctgtaatcccaacactttgggaggctgaggcaggcaaatcacgaggtcaggagattgagaccatcctggctaacacagtgaaaccccgtctctactaaaaaaatacaaaaaattagccatgcgtggtggcgggtgcctgtagtcccagctactcaggaggctgaggccacagaatggggtgaacccgggaggcggagcttacagtgagccgagatgcgccactgcactccagcctgggcgacagaggaaggctccgtctcaaaaaaaaaaaaaaaaaaaaaccacaaagccaaatttcttgcttactataaacagtaagagccatgcaggtgaggcacagtcttcaagcagaccagactactaatctatcagactttgagaaagtggggagttcagagattggcaaactttcaaaggtgtgtgttagcatcatttgtagaagtgataacttgggtgaaactattgttgagtggctggcactcagaggagtgcttattgaagtgagtctttgtgattggctgaatcaagaagttgtcattcattgggtttacaaaaacacattcactgtgatgagtaatcatgggtcaattgaacttaaaactggctctgattgctggttgttaccatggctaactgtacagtcagtattttcctaggagtgtgtcattagcagaaagggaggatggataagtggaagtattgaaggtgtttgaggagagaggtatataatagtcatctatgaaggtgggtgcagtggctcacacctgtaatcctaacactttgggaggacgaggtgggcagatcacttgaggtcaggagttcgagaccagcctggtgaatgtggtgaaaccctgtctctactaaaaatataaaaattagccaggtggccaggcatggtggctcacgcctgtaatcccagcactttgggaggccaaggtgggcggatcacctgaggtcaggaattcaagaccagcctggccaacatggtaaaaccccgtctctactaaaaatatgacaaattagccaagcatggtggcaggtgcctgtaatcctagctactcaggaggctgaggaaggagaatcgcttgaacccaggaggcagaggttgcaatgagccgagattgtgccactgcactccagcaggcagcagagggagactccgtctgcaaaaaaatcaaaataaaaataaaaaataaatttaaaaaaataaaaaataaaaataagtcatctatgaaaagtgggatgagaagtggactagataaaggtagtataattactgggcagaattaaggtcccacttgaagtcaagaatataaagagacaagtttgtcatttctctttagccatatttagttgtatgggtacagaagcaataatagagaacttacttcaactgtgattgaggttttgtcaagtaagtactattaagcaagagaggttcaaggaaattcaaagggtattcaagaacatgtattttttagcttatttattttgctttttattatgatattgtcaaacatacttaatagcagaaagaataatataatgaatcccacaattctatcatccaagtccgacagtttaaaattttgcaatattttttcatctattcctccacatgttttcctggataacttcaaagcaaattccaaacatcatatcaattcacctataaacacttcaagatgcatttctaataaagaagggcttttaagaaccataactacaatgccattattacatatagtgaaatcaacaatgtttccttcatattaactaagtctcaacccatgttcaaattttgcaaagggatgatgataacaattagtaatgaatttaagctggctaagaaaagaagaaacaagggtggtggtggagttaggaagagcagaaaggtaattggatcaataggttgcaggtcctgctgctgggaacactgatagagttaggagcccacaggtagggtgctggaagggtaggaggtgatcccactttcctctttgcccattgtttagtcacatcagtcttccaacctggggtgttggaagattctgtacagatttcttcccttcaatctcatccgtctcagctccagtacctgatttttctcaggagaatgtgcaaactaaattagattctcctattataaccttggtacatccttggagcacttgtaatcataattttaaaactataggaaaatttgacatctaactccaccaagatctacagcttctttgctcacgactgtcattgctagtgcctagagactatcaataggatgctttcggccgggcgcggtggctcatgcctgtaatcccaacactttgggaggccgaggcgggcggatcacctgaggtcaggagttcaaggctagcctgaccaacatggtgaaatcccgtccctactaaaaatacaaaaaaaaaaaaaaaaaattgctgggcgtgttggcgaatgcctgtaatcccagctgctcggaaggctgacgtaggagaatcgcttgaacccgggaggcagaggttgcagtgagccgagatcgcgccattgcactgcagcctgagcaacaagagcgaaactccatctcaaaaaaaataaataggacgttttcaataaatatttgttggactaaggaaggagtatcaatagtgtcaaatgccacagacttctaaatccatccataacacggtttccaacaaggattctaaattatttgctctccaatgagggtcaccatttcctcgcttgtagaaaggtgcaacttaggagggtcgtatgagttaatttatttttatttttattttttttgagtcggagttttgctcttgtcgcccaggctggagtgcagtggcgcaatctcggctcactgcaacctccgcctcccgggttcaagcgattctcctacctcagcctccctagtagctgggattacaggcgcccgccagcaagtccagctaatttttgtatttttggtagagatggggtttcaccatgttggccaggctggtctcgaactcctgacctcaggcgatccgcccacctcggcctcccaaaccgctgggattacaggcatgagccacggcgcccggccgtattagttaatattacttgaaaattaagttgagcccctcatccctgctgaatttggactgacagcgttctaaaaatctcttatcaacctaaatatgctagttgataaaggaaacgattaatcaagattgtcctaaacagtacagccctccttaagctcgctctaaggttctaaaatgatgagaaaaggcgtgggccccgcggttagactttcccagccaggctgcctcaagaggcggatattaacctcccaggacggaagttccggagccttcaaactctcggggaagcaactcggcagcggaccaagatggcggcgccctgtgagggacaagcgtttgccgtaggggttgaaaagaattggggtgcagtagttcgctccccagaagggaccccccagaaaatccggcagctgatagatgaggggattgccccggaagagggaggcgtggacgcgtgagttcacgagttaaccctgggtccggcgttggaagattgaagaaggcttggggaaggggtggcgggttgggggaggttcccctcggtcggcgactcgggcagtggggatggcttcttagaatctgaaagaaactctggttactatgtttgatcggctttgatcttcccctcggggtgtaccagattcccaaccgcagccgaaattttgtcatcggacattatttttggaagtaaagaggaccgttaactgaatgagttcacttgacttctcttaattggggattcttaacctttttttgtgccgtggacccctttggctctctggagaagcttattaactctcagaatatttttaaatgcttaaagtaaattacataggattataaaggaaaccagttagattggaatgtagttatcaagatggtaaaaggaaaaagttacgcagtaacaatgctttttattaaagagtccataatatctagtagtatgtgttgtcaaccataattttgaagtagtgatgagcacaaaggtatttgaagacatgcaaccaccataatgtgggaacattatttccattggtgacaaattagcaggtactgctaatactactatggtgtttttaccttcattcataattgaagaaaatgctaaatcttgtcatttagagagaaataaatgtcatttttacccatccaagtttatggatgctgtgaattttttttggcctagaaccacacccgcttgaggctctctatgaatctctgagagtcttagagtaagtttatttcttttgagctataatcgttgatgtaatcctatttttattaaaataatgcctgtcgccgggcgcggtggct

SEQ ID NO: 2507 - DNA, 6000 bp, Homo sapiens
tttcttgtaatgtgtgatcaaacttcttttgatatttcagatctaattttctgtgtaagtctgagtgaggtcattgtccaagacctgctctttcagaaccttgattttagaagttctctttacaagattgagggtcttaagtcaagctgcttagatgcataagacactgataaagtcaaaatttataactttttagggagaaattgtagcaggcattgtttgcttcccaaattctgtttgcctcttcctcgtgctgaaatagtctgtatggctatgtgactagagaagctgacctattctgcactagaatttgggtctattttaaatctttaaagccaaatatgattggagctccttgaaaccatattgaagagcattgggctgcaaatttgaaaatgcagagtcaaaagatagaaagacttcagttcttgaagacttggaagcattgactttatcaatttgtgttgtttgtgagataaatttctaaaatttctaagccatttttatttgctttatgttttttaataaaatatcataattattataaaatatatctaagatagaagtaaaatttgtaatcttgtcacagcagtaaaaaacaaagtaaaagatttgtttttatcacctttcaaatatttcagagagggggagagagatgtattaatggggcttctagaacgctgtgaaagtttgatgaattgtccttttacattctagggatattaaagaacctagagtggtaatcaagactctaaacatcctgtcaagtaggcaatccaagagacaagctgacaaatttttcatcaggttccttcacctttttaaacttcatgctgatcacacttctccttgcatttgccactgcaaaatcagcagcctcattttcaaaatacccttaggagatgttataatttctgtgatttcaaatcaccttgcatagttatattttggcctggtaacactcatgcaaggggcatgttcattacacctggagaggctgagaactgacattagcaagccaaagtcactgctgacaggagcttgtgtgggcagagaaagtgctaaagggcaagtttggagttaattattttgcacaagaaacaggaagaaggggaagacttttggggagtgggttagtgcagtagcctcctactgggctctctgcttccaccctcatcctcctgtgctctattcagcatagcagagaggacgttttaaaccagagtcaggtttagtcactcttcatggcttcccacttcattcagagcaaaaatgaaattccttacagtggacaaaggtcttaggtgatctggcccattgcttcccttaatgcctctcactgagttcctgccatggtgacctccttttcttccccaaaaaacttggggcaaggtcagacctcagagtctttgcctttgttgatgcctttgcctacaggctcttcccccaaatatttacttggccagcatcctcaattcttttaagtcttctgtcaaatatcatcccaaggagacttttctcccccacattgacactttatcttccatcattgccttatttttttcatgttacttatcacatctattaaagaattttaattgactaattaagaacaacaacatagggccggacgcggtggctcacgcctgtaatcccagcagtttgcgaggctgaggtgggtggatcacctgaggtcgggagttcgagaccagccaaaccaacatggagaaaccccatctctactaaaaatacaaaattagccaggtgtggtggtgcatgcctgtaatcccagctactcaggaggctgtagcaggaaaattgcttgaacctgggtgagccgagatcacgccattgcactccagcctgggcaacaagagtgaaactccatctcagaagaaagaaagaacaacaacataggctatctgagagtagggactgtcaacagtttttcttcatagctctatcaagctaaagacttaagtgcttaaagaatattagcctaatgaatgaaataacttggactctggaatcaacagacccctgactatgccgtaggatgaagttcggatttgaaactgagtatttcactgtgtattaaaaaacattctacttcaactttgatgaaaatgctggattgaattaaattatgactaatctcaatctcataaatttctatttattaaaaaaaaaactctctttaatccgtctttgcatttttaaaataccatggtgaataacattaggttttcttaacctcagccctgttaacattttgggccaaataattctttgttgtggaggtgtcagaggtggttaaaccagagcgactccatcttgaataggtgctgggtaaaataaggctgagacctactgggcttcattcccaggaagttaggcattctaagtcacaggatgagataggagattgccacaagatacaggtcataaggaacttgctgataaaacagcttgttgtaaagaaggcgtccaaaacccaccaaaacaaagatggccacgagagtgatctctggtcgtcctcactgctcattacatgctaattataacacattagcatgccaaaagtcactcctaccagcacaggacagtttacaaatgccatggcagtgtcaggaagttaccatatatggtctaaaaaggggaagaaccctcagttccgggagctgccaacccctttccaggaaaattcatgaataacctaccccttgtttagcatacaatcaggaaatgaccaaacagatggacagccagaagccactggggctgctttgcctatggagtagctagctattctttattcctttacctctctaattaacttgctttcactttactctatgaacttgccctgaattctttcttgcaactgagatccaagaaccctctcttggggtctggaccgggaccgctttctggtaacaaaggctgtcctatgcattgtatgatgttttacagcatccccggcttctacccactagatccagagcaaccccttccaccaagttgcgacaaccaagactacctccagacattattcccttttcctggagggcaaaactgctcccaattgataatcactgatgtatacaattttagtatatacccatctgaataaagggtgatatttttggtgtaacatatgtaattgagtagaaatcatgggaatctcatgcttactttatcagccctatagagaacacctcaatcaagccagcattgttcacctaactggtagctagctgtatgttacatttgtatatgttaacataaagctgaagaacagaaagaaaatggatagctctttgttcaatgccttagaaactttgcccctatggagtgttaatagaatgctgagatatcttttttggtaaagggactgggaaaaatgccaaaaaaaaatgctaatgtgcgtttctccacactttatacaggtgaaatctgattaaaacaagcactgcttgcttcacacagaagtggaatcacaaaaggaaaacaggtaacctgaagcctgtgtgtaggagaaaggaacacagcttccttatttagttatttcatttgagaattgtatgtggtatgtatatgaagagtttgggaagggggataaattgtaggtgtgtaagtgcatctctgatgcctttccttttgaaaagcttgattgactgcttgattgagtttgtagagccacgtctggctccagtcaacttctccaagggacatttctacaggtagctgtcaatagaagagccccaagtccctaaaaactacttgccacaagacaatgcttctaatttggggatttaaggatagttctaagtaaacaaattgcttaataaatatttgtcaaattgaaatgaagggatgtaacctcagaattatgaaaaatgtggtctattttacaaccaatttgggaaggacgccatcaaatgataagctgaccagtaaaggtaaaagtaggtaaaaggagctagccacggagcaggaaaagctgataagtggcagaaaatctcgaaatttacatttcgaaaatgtttgggtgaatttgtataatacatcttaatccttttacacaatacttttatctcatctttatcataaatatttacctatgcattgccttagcgtctttcctgtattgaatgaaatgacaattccagagacgcaaagcccagcctccaagttttacaaacctcagagtttgagctactttgacgaatcctctaaattcttgggtgtcaaaggcatgttactaaataggttgctaaaggcaccaaggaaaccaaaaaaggaaagagctctccctaaaggtaagtagcacttaattgggaactttgagacgtctgtcactctttgtgacaattgagaaaaagtactttgtacattttgtgctttgcaggtgagatgtgactgacaccttactgtctctgtgtttagagagggctttcgtgggtggaagaagaggctggtttgaagagagtgcttttccattctgaatatcattaaaggattgtggggggccaaaaatgtaacctaaaatgccatcaattgtccatttaaaatatcctatttggcaaagtggctttgcactcatctgaagaatagatcatgggtggagtttggaaaagaaatgttgtgtttcgtctctgctaaaaacaaaacaaggtaccatctcatggcctcttggttcaaatccgttttcttgctccgcagggagagactgcccctggagtattctgcttttaataagcttcccaatcagctctcgagtgcaaagcgctctccctccctcgcccagccttcgtcctcctggcccgctcctctcatccctcccattctccatttcccttccgttccctccctgtcagggcgtaattgagtcaaaggcaggatcaggttccccgccttccagtccaaaaatcccgccaagagagccccagagcagaggaaaatccaaagtggagagaggggaagaaagagaccagtgagtcatccgtccagaaggcggggagagcagcagcggcccaagcaggagctgcagcgagccgggtacctggactcagcggtagcaacctcgccccttgcaacaaaggcagactgagcgccagagaggacgtttccaactcaaagtaagtgagaggaacgtacgatttctcggagggctcttcgatcgagtttgccttcaccctgtgccacttttctgggtgccagcagatgatggtggtaggggtgagagaggctgcctggtgtctttgctgataggactgctttcaaaactgacttgctccagaggccaagggaggcatatttttggggtttcaggttaggttagttcgggtgtgcttaggtaagtgaaaggaaagaagtttttgtgatgttaagcatgtatttggaccgtgttccagctaccagctggagagcaagacagggtgggctggagagtgcatctttgctttttgtaaaacctggagctttagtaggtgtgtctctggctgggtaggtgcaaagaaagtaaggcagcctgaacaagcagctctcattttcccagcctctctctgattctctgattgccccagagcctgtcagcccatgactcttagctggcatttctaggtaagctgtgggggcttgttcctcccagtgctagctgacatgaaacgtctctcacggaactactggcacccgtcttcccacctgacagcccaggaatggttccagaaatggttaggtccaaagtttagaagacacacctggagtcccatctctcatttgaatgcaaatttaaagaactgcccagtacatagacccttaaacttttaatttgacccacataaatttaggatatatttgttactaatttactagatatttagagtttctgagttgttgtttctaataagttaagaaaacattttttgagaggaatgtattcaactcctttcttaatagatggaaagtgaaacctcctctctcctctccatacacaca

SEQ ID NO: 2508 - DNA, 6000 bp, Homo sapiens
ggcttgatgccagttaatactgtgaagtggagcgtgcggtcagtggaattcagaggaaaaagaagggttggagcaaagcggcattcatctcctggactgttagcctttctagtcttcctggtggctgaggtgttcacgggctgggggagccagctgacctttgtcctcttcaacctagaagactcagcccgcccagacaccaacgtgtgagacggatggacatcaggaagggaaggggagattagcccaactgctgacagaacgatttcccttggttggaccttgggaatggcaaacactcatattggaacaagcttggggtggaagatttaggccgtgtgagcatgtgtgagtgagtggaacaaactttcttggaaactggagggaggagatgaggaggcttcgggaagtattactgatggctcatggttgagagagcgacgtggggacccagctcgccccagcttttgtcccaggttctctttgtctgatgctgagggcagggtggggtgtgggaccaccactcttgttggcctgtcaagtagaccctaggacagaaaatggaaagaaggaaatggctcggtgctctcaactagcagagagaattgaggagaggtaagggttccttctgcaggccagcctgggactccacagcgccagcaggagtgacttggccacaagacattccagccccagggactttgcaggcttcattccctgtctgtgtcttttccttctggtgtgttttacagacttctgatggggaagcttcaaacttgagcaggccagagatgtccttaccaaattggaaaggaaggtgaaactgttcctttctttagccaaagaacccttctcaaagacgcctccagaaatggacaaaatggccttcccttcgttcctttccaggcaataatgacatcattagtgatgcaattctatttgtctttctctttcctctctgtccttttttttaaaaaaaaaaaatgcatttatttcaaaactgtgctattcttttaagaggagtggaggtgaccccttcgatgctgctgctatcgggagacaaggtgccataccaatacgtgggcttgactaatcccaggccaccatgggagagagcaaagcagggctgccaggagttcagttgcatcaagggcgtagagcacgcgggggctgggctcggaatagcagtacttttccactttgatgccttagaactctcacttctcatctccacagaccagactcagtaaaatctcaggccactagagaatggaaggcggtgaaacaggatttaaatgcaaaaaaaacctattggaggcttttggcaccgtggctcactagagggacccagcatagtagaggtttctcttgttgcagcttctgaaaagttcaaaaaagaactccaggccgttcttccctcaaacccagtgagagtttgcagagaagtgccccctgcagggctcccgtcccagaacaccagcaccagagagggtcttcccgatgccccccgctggacttgcccaagcctctgggagcccctcatctcagatccctgtgttgaacatgacactgactgtcccttatttgttaaaatttgcaatatctctcaagtaaataatagccaacatttgttgaatgctttcatgactcccgggctaaggcctttatgagcgttgtctcaaggggccccaacagccatcccacagggagggggataacagcccccatttatagataagggagctgaccggatgctctgagaagtggcaggtgttgaaggaaggataaagcagtgatgggccagaatccccaaggttcccttttttgttcatcaggcccttcctgagatgtgatttttaatcttttaactttttttaattaatagcaatgcgtggcctcatatttctatgaaccatttagtgatactcccgcttcctgcatgccacacactgtgctgggaattgctcatgggttgtcctgtttcatcttctccgtagccctgtgagatcggcaatattagtccccctacagccaaggaaactgcccagagccacacaactcttgaggggcgaggagggcttgaacctgagtctgcccagctccagaactgagcttgcagccattagccacagctgtctcctgcatgtctgagcaaagaaaggcctttacacagcatcaccctgtgccatcccatgcaccgtgggactcagctaaaggactgtgcaaagagggggctcctgagttggatttaggcaaaaggggcagaattcgtttgatttttagagaaaatctctggagagtttcttttgattcatagaattccttttagatttctttccagcataccaactagctttagtagtgctgctacaaccagctcttataagtaagagtgaaaaagtattcttttcttctttaaaaaataagtttttcttgcttatagttaattctagaaaggcaatactaaaggtatatatttttttcaaaatgctattttttactgcacttgataattatcctgacagctctgatctctgtaatagattcactcttcagctctgggcagaaccagaggcagggttcacaccaaatttgtaaataccatatgtgggtctggtgtccaggaacttttttctttctgttaaaaaaaagaaaaaaaaaagaaaaaaaaaaagaagtagaggtggaagaaagacaagacttagaggaacaaaagaatgttttcttttgagatactcttctcaaagaaatagcaacaattgtataaacaggaaaaccagccagctttcatgataaaaggaaggcgtgtctcttgccctggtatgagattaacagaaatacagatgcatttttattttgattgaaagatggtgagaatgtagaaatgcttaggactagatttttaattttttaaaataactattatcatttattatgaaatatttgttcagttgttttgagtgggtttcttgttccttttttcatttaaaaccttctttgttgactggctccaggcttgtttgcctaaattcttaggtagtttacacaagttctagaatcttttagaactttaactccattggaagcaaacctaactaatcggagtttgagatcctggttggtttcaataggtattctggaattctggcagaacacctaaagattttttttttttttagaaggttttagatacattatcttacacaaactgtgacctaatggcaataattacctcaaatgtgggcattcatcctggttttagccttttttgaaatcatgtagccagcttgatcttggaatttaaagactatgaattctctgtgggctgaaaataatgattacttcatacccccggtcatcgttgcttaagtgaattctgaaaatagctcatctttacaacaaaaattaaaccaaggaagagattattctttgtgtgttgtactcaaatgcgatgttcaaatgcacatgttaagtatatatgtttttagctactgtaaaatgctgttagccttctaagctatcaaaacagtcacattttaaatgagtaaactaaacaattgactgtggatacttaagcatatttctggctacgttttatagttaaagtgttttatagtttacatttagactggtactttttaaagaaaagttctgtttataactgacatccgcaaaccccagtgaatgcctcttagttggaggttgtgtctcccccaaggcaagtgtgttgtcccagactcttctgtagtccagcatgcgcacttccctctggattattactttccacgtgaactcaagagaacatgaaaggcaatccagatggagggaaaaggtgtgagtccgcagcccgggccagatgcgaaggtctcatgcgtgtcgtctaaacacttgtcttcaaggccttctctctgacatcttggaagagtcattgagaacagataacctggttcattgatttttgtcttgatttgaatatttaacttattaatagatccactgatttccaggcaccaggcagtagaagagactgggattcaggtgaccatgaaggcacagctgctacttctgggccgggggtgatattttgatcagcgttttgtaggggaggaccatatacccctattcccatggtcgctggctgggttttccatatatctgctgtcatttattcgttttccccttaaaagcaaaatcaatgtaaaaggctatgtttacgttttactcattgtccagcttagactcaaagtctagttcggtgggagggggaccttagcatcctctcagagatggtcagggctgagcaggaggaggcagagacagaggggcagctcagcctggtccattgagacccactctaaacagacatcatatttggaacaagaagatgcttcgagacaggaatgggccccactgtcatgcagaaacagactgggggaatggcagtttccctgagtcttggtttcttttatgttttctcttgtgccaccaccaaactgcagaggacctgctgtgacctaaagggcattcctttagcagataagaccttgaaaactgcaaaacacctgggaccagggagcttttaaaaaatacaaaaaaataccacatttgctttttccctgtgaactgtattgacagcgtgttcttaggacagtcttttggtggaaatgttactgtaaaatagttttcatctcacccctcctaatcatactcccactttcctgtttgtgtggtggtgttgctgttttttcctttacatgaattaaccaaatgaattttgtgtcattgtttttggggcttatatttttaaaacatagaaattgccttttgttcatttgaaaagtaagtatgttgtatctgaaaaagggctctgcctctgctctccctcgcttccttgtaaccaatctccaaacgaatctctcctggcaccgcccccttccttatatagggtcactgtccccggggccacctctgcctccaccctgctgtcaccactgccctgggccaaggcacccaggactcccagaaagcgcgagagccagcaagaaggccccactcagccttgagactggtggtcacacctccctgtcagagtcgcctgctgggctgaaggggcaatggattgtcattgttgaaattgtttggctcaggttataaggaggaacttgggaagtagaaagtgacttgaccatgtgcatccttggtagcttcctgtaactaacaaatggaacagagagcacacccccgccccgccccaccccaagcagatgttcccgtcagcgctgccctgagtcagtcggtcccccgtttctgctctcctcccttttgtgttcctgctcacttcaagcttcttccatggactttccagggcacagtcatctctagcccccaaatcatctcttcatcctctgtgtgtgcatttttttaaccaaatgaaatagacaagaaagtcatactttggggcagcagaatttctaatttagtagaatcactgtatagagatagatgttgatatatatgtttgtgtatatatatcaaaccaaattggataggagaagtatagctttacagatgaggagaaggagctctttagaggtcggagtcaagactggtgtcttggacgtgcatgggctgtgtcccaggccactccgcacacatggggctgaggcgtggcgccgggcccttgtcatccacctcaccacggcagagccagcaggccctgtagggtgctgctgctgtctcactgggtcccagcttcaagcgcatcagtgggtgacgggggcaacaaatcagagtgactggaagtttccatcccgttttgctttgaccacgtgtactgagctgcagcctctgatactctgtcacgtttccaaaaatggtatccattaggatagaaagagaatggatctgcagaaatgtttacctttcaactgctcatgaattcaggacactggatagaaagactcactccccaaaatgagaacagggaagaggagacccggc

SEQ ID NO: 2509 - DNA, 6000 bp, Homo sapiens
cgctgtccccagacccacaaagtgctaggccccagttgaagaaaggggtgaaatagccagcttcaccgaagggaagggaagggaagtattgggcgatgccagccccacagacgctcagcaaacattagtgcacattctcctagtcctcacccaatggcctcctctacccccatgcatggagctgccacatcagaagccccaagagaagctccctgcaggagaggccagctccctggatgcccaattgcatacctggccgaatctgccattgagtcaccttagcaaataggctgctgtcactaggaccaagctctcaagcagagggatgccaacctagtccttacttagcccacgaatcatctagagcatcctctagtcttttgtgggctccctccttcccatttgaagagacattgttcagaggaagaggggaagatttgaaatgtcaggtcacggaggagtgtttaactggagcctggtgaaccgcagggcaatttgcttctgctcactgggttctgactggcccgtctggacgtgggcccccatgtctctgtgcttagggcctcttcatgatgttttggatgtttccaagggaagtgggtgagcagatcaaggggtgggagagtcgaggcttgatgccagttaatactgtgaagtggagcgtgcggtcagtggaattcagaggaaaaagaagggttggagcaaagcggcattcatctcctggactgttagcctttctagtcttcctggtggctgaggtgttcacgggctgggggagccagctgacctttgtcctcttcaacctagaagactcagcccgcccagacaccaacgtgtgagacggatggacatcaggaagggaaggggagattagcccaactgctgacagaacgatttcccttggttggaccttgggaatggcaaacactcatattggaacaagcttggggtggaagatttaggccgtgtgagcatgtgtgagtgagtggaacaaactttcttggaaactggagggaggagatgaggaggcttcgggaagtattactgatggctcatggttgagagagcgacgtggggacccagctcgccccagcttttgtcccaggttctctttgtctgatgctgagggcagggtggggtgtgggaccaccactcttgttggcctgtcaagtagaccctaggacagaaaatggaaagaaggaaatggctcggtgctctcaactagcagagagaattgaggagaggtaagggttccttctgcaggccagcctgggactccacagcgccagcaggagtgacttggccacaagacattccagccccagggactttgcaggcttcattccctgtctgtgtcttttccttctggtgtgttttacagacttctgatggggaagcttcaaacttgagcaggccagagatgtccttaccaaattggaaaggaaggtgaaactgttcctttctttagccaaagaacccttctcaaagacgcctccagaaatggacaaaatggccttcccttcgttcctttccaggcaataatgacatcattagtgatgcaattctatttgtctttctctttcctctctgtccttttttttaaaaaaaaaaaatgcatttatttcaaaactgtgctattcttttaagaggagtggaggtgaccccttcgatgctgctgctatcgggagacaaggtgccataccaatacgtgggcttgactaatcccaggccaccatgggagagagcaaagcagggctgccaggagttcagttgcatcaagggcgtagagcacgcgggggctgggctcggaatagcagtacttttccactttgatgccttagaactctcacttctcatctccacagaccagactcagtaaaatctcaggccactagagaatggaaggcggtgaaacaggatttaaatgcaaaaaaaacctattggaggcttttggcaccgtggctcactagagggacccagcatagtagaggtttctcttgttgcagcttctgaaaagttcaaaaaagaactccaggccgttcttccctcaaacccagtgagagtttgcagagaagtgccccctgcagggctcccgtcccagaacaccagcaccagagagggtcttcccgatgccccccgctggacttgcccaagcctctgggagcccctcatctcagatccctgtgttgaacatgacactgactgtcccttatttgttaaaatttgcaatatctctcaagtaaataatagccaacatttgttgaatgctttcatgactcccgggctaaggcctttatgagcgttgtctcaaggggccccaacagccatcccacagggagggggataacagcccccatttatagataagggagctgaccggatgctctgagaagtggcaggtgttgaaggaaggataaagcagtgatgggccagaatccccaaggttcccttttttgttcatcaggcccttcctgagatgtgatttttaatcttttaactttttttaattaatagcaatgcgtggcctcatatttctatgaaccatttagtgatactcccgcttcctgcatgccacacactgtgctgggaattgctcatgggttgtcctgtttcatcttctccgtagccctgtgagatcggcaatattagtccccctacagccaaggaaactgcccagagccacacaactcttgaggggcgaggagggcttgaacctgagtctgcccagctccagaactgagcttgcagccattagccacagctgtctcctgcatgtctgagcaaagaaaggcctttacacagcatcaccctgtgccatcccatgcaccgtgggactcagctaaaggactgtgcaaagagggggctcctgagttggatttaggcaaaaggggcagaattcgtttgatttttagagaaaatctctggagagtttcttttgattcatagaattccttttagatttctttccagcataccaactagctttagtagtgctgctacaaccagctcttataagtaagagtgaaaaagtattcttttcttctttaaaaaataagtttttcttgcttatagttaattctagaaaggcaatactaaaggtatatatttttttcaaaatgctattttttactgcacttgataattatcctgacagctctgatctctgtaatagattcactcttcagctctgggcagaaccagaggcagggttcacaccaaatttgtaaataccatatgtgggtctggtgtccaggaacttttttctttctgttaaaaaaaagaaaaaaaaaagaaaaaaaaaaagaagtagaggtggaagaaagacaagacttagaggaacaaaagaatgttttcttttgagatactcttctcaaagaaatagcaacaattgtataaacaggaaaaccagccagctttcatgataaaaggaaggcgtgtctcttgccctggtatgagattaacagaaatacagatgcatttttattttgattgaaagatggtgagaatgtagaaatgcttaggactagatttttaattttttaaaataactattatcatttattatgaaatatttgttcagttgttttgagtgggtttcttgttccttttttcatttaaaaccttctttgttgactggctccaggcttgtttgcctaaattcttaggtagtttacacaagttctagaatcttttagaactttaactccattggaagcaaacctaactaatcggagtttgagatcctggttggtttcaataggtattctggaattctggcagaacacctaaagattttttttttttttagaaggttttagatacattatcttacacaaactgtgacctaatggcaataattacctcaaatgtgggcattcatcctggttttagccttttttgaaatcatgtagccagcttgatcttggaatttaaagactatgaattctctgtgggctgaaaataatgattacttcatacccccggtcatcgttgcttaagtgaattctgaaaatagctcatctttacaacaaaaattaaaccaaggaagagattattctttgtgtgttgtactcaaatgcgatgttcaaatgcacatgttaagtatatatgtttttagctactgtaaaatgctgttagccttctaagctatcaaaacagtcacattttaaatgagtaaactaaacaattgactgtggatacttaagcatatttctggctacgttttatagttaaagtgttttatagtttacatttagactggtactttttaaagaaaagttctgtttataactgacatccgcaaaccccagtgaatgcctcttagttggaggttgtgtctcccccaaggcaagtgtgttgtcccagactcttctgtagtccagcatgcgcacttccctctggattattactttccacgtgaactcaagagaacatgaaaggcaatccagatggagggaaaaggtgtgagtccgcagcccgggccagatgcgaaggtctcatgcgtgtcgtctaaacacttgtcttcaaggccttctctctgacatcttggaagagtcattgagaacagataacctggttcattgatttttgtcttgatttgaatatttaacttattaatagatccactgatttccaggcaccaggcagtagaagagactgggattcaggtgaccatgaaggcacagctgctacttctgggccgggggtgatattttgatcagcgttttgtaggggaggaccatatacccctattcccatggtcgctggctgggttttccatatatctgctgtcatttattcgttttccccttaaaagcaaaatcaatgtaaaaggctatgtttacgttttactcattgtccagcttagactcaaagtctagttcggtgggagggggaccttagcatcctctcagagatggtcagggctgagcaggaggaggcagagacagaggggcagctcagcctggtccattgagacccactctaaacagacatcatatttggaacaagaagatgcttcgagacaggaatgggccccactgtcatgcagaaacagactgggggaatggcagtttccctgagtcttggtttcttttatgttttctcttgtgccaccaccaaactgcagaggacctgctgtgacctaaagggcattcctttagcagataagaccttgaaaactgcaaaacacctgggaccagggagcttttaaaaaatacaaaaaaataccacatttgctttttccctgtgaactgtattgacagcgtgttcttaggacagtcttttggtggaaatgttactgtaaaatagttttcatctcacccctcctaatcatactcccactttcctgtttgtgtggtggtgttgctgttttttcctttacatgaattaaccaaatgaattttgtgtcattgtttttggggcttatatttttaaaacatagaaattgccttttgttcatttgaaaagtaagtatgttgtatctgaaaaagggctctgcctctgctctccctcgcttccttgtaaccaatctccaaacgaatctctcctggcaccgcccccttccttatatagggtcactgtccccggggccacctctgcctccaccctgctgtcaccactgccctgggccaaggcacccaggactcccagaaagcgcgagagccagcaagaaggccccactcagccttgagactggtggtcacacctccctgtcagagtcgcctgctgggctgaaggggcaatggattgtcattgttgaaattgtttggctcaggttataaggaggaacttgggaagtagaaagtgacttgaccatgtgcatccttggtagcttcctgtaactaacaaatggaacagagagcacacccccgccccgccccaccccaagcagatgttcccgtcagcgctgccctgagtcagtcggtcccccgtttctgctctcctcccttttgtgttcctgctcacttcaagcttcttccatggactttccagggcaca

SEQ ID NO: 2510 - DNA, 6000 bp, Homo sapiens
gagtatataagtagactggagggacatccagatgtccagttttgtcaggcaaaaaaaaaaaggaaagacttaggaagtaggaaaattgtttctgtcatctctatcccaacaagagacgtcaagaaagatccaccacagaacaaaagtttaaagaagaatcaaagccttgattgggcttctgacaacatggtcaccatcaaggttgtcattttctagatcccagaggcctgggatgcgacgtcaggtggcatctcatgggctcggggaatgtcgagtcactgactgtccagcccttagccagcttctctcccacatcctcagagctctcctgtgcttctgaaatctgttaactaaatctttggcttgcctctggtatttaagcaagaaaattccctcccagaggtgaccccatccgcttccccacaatccatccttttgccatcggcgcacctggggcgtggcttaggttcttcaatgcagggacatttgccccctcccagaagctgctgggcacagtgaggtggcgtaagagtgactggcaggtggtaccttccccaggaaatttcaccacaccacccagttcctcagcctgccccctccccctgtgatgcatgcccccagcacccaattctagccagctggaagtgggtggagggacagcaggaggccagagaaaccctgaacaaagctgggcggctgctcaggcatcacaggctgcaccccctctgaaagcatccccactgggctccggccacatcttcagtgcactgtgctgtgtgcgctgggtgctcacacgctgtccccagacccacaaagtgctaggccccagttgaagaaaggggtgaaatagccagcttcaccgaagggaagggaagggaagtattgggcgatgccagccccacagacgctcagcaaacattagtgcacattctcctagtcctcacccaatggcctcctctacccccatgcatggagctgccacatcagaagccccaagagaagctccctgcaggagaggccagctccctggatgcccaattgcatacctggccgaatctgccattgagtcaccttagcaaataggctgctgtcactaggaccaagctctcaagcagagggatgccaacctagtccttacttagcccacgaatcatctagagcatcctctagtcttttgtgggctccctccttcccatttgaagagacattgttcagaggaagaggggaagatttgaaatgtcaggtcacggaggagtgtttaactggagcctggtgaaccgcagggcaatttgcttctgctcactgggttctgactggcccgtctggacgtgggcccccatgtctctgtgcttagggcctcttcatgatgttttggatgtttccaagggaagtgggtgagcagatcaaggggtgggagagtcgaggcttgatgccagttaatactgtgaagtggagcgtgcggtcagtggaattcagaggaaaaagaagggttggagcaaagcggcattcatctcctggactgttagcctttctagtcttcctggtggctgaggtgttcacgggctgggggagccagctgacctttgtcctcttcaacctagaagactcagcccgcccagacaccaacgtgtgagacggatggacatcaggaagggaaggggagattagcccaactgctgacagaacgatttcccttggttggaccttgggaatggcaaacactcatattggaacaagcttggggtggaagatttaggccgtgtgagcatgtgtgagtgagtggaacaaactttcttggaaactggagggaggagatgaggaggcttcgggaagtattactgatggctcatggttgagagagcgacgtggggacccagctcgccccagcttttgtcccaggttctctttgtctgatgctgagggcagggtggggtgtgggaccaccactcttgttggcctgtcaagtagaccctaggacagaaaatggaaagaaggaaatggctcggtgctctcaactagcagagagaattgaggagaggtaagggttccttctgcaggccagcctgggactccacagcgccagcaggagtgacttggccacaagacattccagccccagggactttgcaggcttcattccctgtctgtgtcttttccttctggtgtgttttacagacttctgatggggaagcttcaaacttgagcaggccagagatgtccttaccaaattggaaaggaaggtgaaactgttcctttctttagccaaagaacccttctcaaagacgcctccagaaatggacaaaatggccttcccttcgttcctttccaggcaataatgacatcattagtgatgcaattctatttgtctttctctttcctctctgtccttttttttaaaaaaaaaaaatgcatttatttcaaaactgtgctattcttttaagaggagtggaggtgaccccttcgatgctgctgctatcgggagacaaggtgccataccaatacgtgggcttgactaatcccaggccaccatgggagagagcaaagcagggctgccaggagttcagttgcatcaagggcgtagagcacgcgggggctgggctcggaatagcagtacttttccactttgatgccttagaactctcacttctcatctccacagaccagactcagtaaaatctcaggccactagagaatggaaggcggtgaaacaggatttaaatgcaaaaaaaacctattggaggcttttggcaccgtggctcactagagggacccagcatagtagaggtttctcttgttgcagcttctgaaaagttcaaaaaagaactccaggccgttcttccctcaaacccagtgagagtttgcagagaagtgccccctgcagggctcccgtcccagaacaccagcaccagagagggtcttcccgatgccccccgctggacttgcccaagcctctgggagcccctcatctcagatccctgtgttgaacatgacactgactgtcccttatttgttaaaatttgcaatatctctcaagtaaataatagccaacatttgttgaatgctttcatgactcccgggctaaggcctttatgagcgttgtctcaaggggccccaacagccatcccacagggagggggataacagcccccatttatagataagggagctgaccggatgctctgagaagtggcaggtgttgaaggaaggataaagcagtgatgggccagaatccccaaggttcccttttttgttcatcaggcccttcctgagatgtgatttttaatcttttaactttttttaattaatagcaatgcgtggcctcatatttctatgaaccatttagtgatactcccgcttcctgcatgccacacactgtgctgggaattgctcatgggttgtcctgtttcatcttctccgtagccctgtgagatcggcaatattagtccccctacagccaaggaaactgcccagagccacacaactcttgaggggcgaggagggcttgaacctgagtctgcccagctccagaactgagcttgcagccattagccacagctgtctcctgcatgtctgagcaaagaaaggcctttacacagcatcaccctgtgccatcccatgcaccgtgggactcagctaaaggactgtgcaaagagggggctcctgagttggatttaggcaaaaggggcagaattcgtttgatttttagagaaaatctctggagagtttcttttgattcatagaattccttttagatttctttccagcataccaactagctttagtagtgctgctacaaccagctcttataagtaagagtgaaaaagtattcttttcttctttaaaaaataagtttttcttgcttatagttaattctagaaaggcaatactaaaggtatatatttttttcaaaatgctattttttactgcacttgataattatcctgacagctctgatctctgtaatagattcactcttcagctctgggcagaaccagaggcagggttcacaccaaatttgtaaataccatatgtgggtctggtgtccaggaacttttttctttctgttaaaaaaaagaaaaaaaaaagaaaaaaaaaaagaagtagaggtggaagaaagacaagacttagaggaacaaaagaatgttttcttttgagatactcttctcaaagaaatagcaacaattgtataaacaggaaaaccagccagctttcatgataaaaggaaggcgtgtctcttgccctggtatgagattaacagaaatacagatgcatttttattttgattgaaagatggtgagaatgtagaaatgcttaggactagatttttaattttttaaaataactattatcatttattatgaaatatttgttcagttgttttgagtgggtttcttgttccttttttcatttaaaaccttctttgttgactggctccaggcttgtttgcctaaattcttaggtagtttacacaagttctagaatcttttagaactttaactccattggaagcaaacctaactaatcggagtttgagatcctggttggtttcaataggtattctggaattctggcagaacacctaaagattttttttttttttagaaggttttagatacattatcttacacaaactgtgacctaatggcaataattacctcaaatgtgggcattcatcctggttttagccttttttgaaatcatgtagccagcttgatcttggaatttaaagactatgaattctctgtgggctgaaaataatgattacttcatacccccggtcatcgttgcttaagtgaattctgaaaatagctcatctttacaacaaaaattaaaccaaggaagagattattctttgtgtgttgtactcaaatgcgatgttcaaatgcacatgttaagtatatatgtttttagctactgtaaaatgctgttagccttctaagctatcaaaacagtcacattttaaatgagtaaactaaacaattgactgtggatacttaagcatatttctggctacgttttatagttaaagtgttttatagtttacatttagactggtactttttaaagaaaagttctgtttataactgacatccgcaaaccccagtgaatgcctcttagttggaggttgtgtctcccccaaggcaagtgtgttgtcccagactcttctgtagtccagcatgcgcacttccctctggattattactttccacgtgaactcaagagaacatgaaaggcaatccagatggagggaaaaggtgtgagtccgcagcccgggccagatgcgaaggtctcatgcgtgtcgtctaaacacttgtcttcaaggccttctctctgacatcttggaagagtcattgagaacagataacctggttcattgatttttgtcttgatttgaatatttaacttattaatagatccactgatttccaggcaccaggcagtagaagagactgggattcaggtgaccatgaaggcacagctgctacttctgggccgggggtgatattttgatcagcgttttgtaggggaggaccatatacccctattcccatggtcgctggctgggttttccatatatctgctgtcatttattcgttttccccttaaaagcaaaatcaatgtaaaaggctatgtttacgttttactcattgtccagcttagactcaaagtctagttcggtgggagggggaccttagcatcctctcagagatggtcagggctgagcaggaggaggcagagacagaggggcagctcagcctggtccattgagacccactctaaacagacatcatatttggaacaagaagatgcttcgagacaggaatgggccccactgtcatgcagaaacagactgggggaatggcagtttccctgagtcttggtttcttttatgttttctcttgtgccaccaccaaactgcagaggacctgctgtgacctaaagggcattcctttagcagataagaccttgaaaactgcaaaacacctgggaccagggagc

SEQ ID NO: 2511 - DNA, 6000 bp, Homo sapiens
cagacttgttttcatcaaaaaagccaatctctcaatagctaacccactcccgagataatattaatgcactgatgaactcatacactcatgagggctctgccctcaggacctaacatcccttactggccccaccctaaacacttgcactggggactaagtttctaacacaagaactttggggaacacattcaaattatagcagatctctcctacccattttccagatgctgaaagtaacacctcccagaggaacggcactgggcctggccttaggccaccagcccaccttgcctctcctgattcttttccgctttcccttgcttcattccctcatgcagccccgaccaccctcccagccgagggagtgagccagagccccactgcatccagagtcaaggcaaagtcctagtgggtccgggggagatgaggctgatttgttactgcccggcctcaggcacatgtttcttcctggaagaccactgttctctggtggggtagcatcttctgggcagctgggaccctgccactgatctgacctctttctcctcccgccacagtcaacaccagtcaccactcgtcctcctacaagtccaagtcctccagcaacgtgacctccaccagcggtcactcttcagggagctcatctggagccatcacctaccggcagcagcggccgggcccccacttccagcagcagcagccactcaatctcagccaggtaagccccacagctggcgccccaggccaggcagggcccccatcccctcatccttccgcttcagagaggattgctgtggcggcccctcacccacctcacagggctgcagtcctggccacgggtggcagcacatgcccttggtgacctctggtggctttttctaccacaggtcacccttggggaagttgatatcaccagtgcacagagtgctggcccaaagcaaagcgacttgtctaatgttacaaagcccttagtgacatggtgccagagcttaaaaataggatggcccacatactgctgtttcaacccagcaaagggtagagcactgtgtcccggccctgtcggcctgggacatcagggacagacctgcatccgactcattgcagggagggcccgcacaccacagcccccaagtcaagggtaagatttgtcccaggacctggaggaaggggggtgggttgaggtgaaatgtgagtgacctgagtttctgtgggtgcagggctgtctgtgtcaagggctcggcatcaggcctgactcacgtggtggactcagggccctgtttctctagaaacaaagtgagataaatggggtgtttgtgttcagagcccctcatctgaagtgctgccccaggtcatcagtggagcccgtgtctctgtcacgtgacttaggttcaccaggtagaagagggctattttatttggactgacagaacttcaaacagcaacgcttctgagagccaactttttttttttaagacagggtcttgttctgtcacccaggctcaagtgcagtggcactgtcatggctctcactgcagcctctgcctcctggactcaagtaatcctccaccttagcctcccgagtagctgagactacaggcatgagccaccacacccagctaattttcaaaattttttgtagagatgttgtgagagccaataattttgagaacaagattttacagtgagtaagaaagcaactgctgctcaaagagagtgtcctggccgggtgcggtggctcacgcctgtagtcccagcttctcgggagcccaaggcggggggatcattctaggccaggagttcaaggctacagtgagctaggttcatgccactgcactccagcctggggcatcctgatacttcacagcttctgtacgtccttgggagaaatatgttctcctataactttgcagctggctttatccgtgtatcatcccagcccagtgagtggcaggccaagtcgggattttctcagtccaagtaaattttttttttttttttgagacagagtttcactctgtcacccaggctggagtgcactcgcgtgatctcagctcactgcaacctctacctcccaggttcaagtgattcttgtgcctcagcccaccgaatagctgggactacagacaaggcacgtgccaccatgcccggctaatttttttgtattttagtagagacggggtttcaccatattggccaggctggtctcgaactctagacctcaggtgatccgcccacctctgcctcccaaagtgctgagattacaggcgtgagccactgcgccaggtcccaagtaaatttttactttctcaacacacagagggaagccccttctattacttctggagtctttcccttctcttcctcctccctgccctcctgcccctcctcccattccttcctccccatgtgtcggcccctgacgtctctcttggtgcctctcctccccaggctcagcagcacatcaccacggaccgcactgggagccaccgaaggcagcaggcctacatcactcccaccatggcccaggctccgtactccttcccgcacaacagccccagccacggcactgtgcacccgcatctggctgcagccgctgccgctgcccacctccccacccagccccacctctacacctacactgcgccggcggccctgggctccaccggcaccgtggcccacctggtggcctcgcaaggctctgcgcgccacaccgtgcagcacactgcctacccagccagcatcgtccaccaggtccccgtgagcatgggcccccgggtcctgccctcgcccaccatccacccgagtcagtatccagcccaatttgcccaccagacctacatcagcgcctcgccagcctccaccgtctacactggatacccactgagccccgccaaggtcaaccagtacccttacatataaacactggaggggagggagggagggagggagggagagaatggcccgagggaggagggagagaaggagggaggcgctcctgggaccgtgggcgctggccttttatactgaagatgccgcacacaaacaatgcaaacggggcaggggcgggggggggggggggggcagagggcagggggacgggtcgggacaccagtgaaacttgaaccgggaagtgggaggacgtagagcagagaagagaacatttttaaaaggaagggattaaagagggtgggaaatctatggtttttattttaaaaaagaaaaaggaaaaaaaaaaagtcaataacaaaaaacccagctcaagaacccattctacgccaaactggaaaggagaagagagcaacaggaagattccagaaacggggggccccagtttttgaagaactttatgaacttttcaaagattattttcatatggcagcaagtgatacggaagactgctgtcagggacacctgatatggaaatcaaatagatttttaattaattgaacataagatttagggatttttccagaactcgaaagggtcaacagccctccagaatgtcgggctgcagcctgaggaggctgatgtttggagctggtgtgggattggcgaagcccagtccgggctccctagtcaggaaagacgggggacggccaggctgctggaaggcccccgggggcgcggggcgagttttctttttctgagcactctggataaatccctaagcaacgttgtttctcaaatgtcattaataatgtgtgttgcaaactttaggtttttttcttttctgaaaatgtattttctctttgaatccacccctagtcgcgtagcgtagggctagcggtcgtcacagacaccctagtagaatgtagcactcagcacccttgtctcctaccttgtgttcaactccaatgataccaatagaatattcctcaatgtaattgcacaaaaaaaagcgatataacataggcatgtaaccaatgtggcggtgcaggtgtgcgggtgagcgagcacgtgtgggtgtgcacgcgccgccctccccgcgtggccctcggcgccgccaccctagctggcgcagtcttgacactgcatccttccctcctagtgccttaccgagcgacagacgcggcgtgagggtttacttccactggtactccaagaaactgaggctagtcagacacaatctcagctcttctgttgtgctgttgtaacagtttacgctggccttttttttttctttttctttttctttttaaaatgttaatgcccgttgtctttcctgggctgtttgctagcggaaggatgccagggaagccagcaggagctaggagagagtccgtggatctcgaaagaaatatgggagacagatgcccggcgggtgcgtctggagatggggacggcgggagttgagttgtggcagtagttgagttgtaatttgtgggcggaggcccagagagactccccacccttcacccctgccccactctgtccccagttccgccatttgtgaggccagaggtttccggactgttggcctcgccaggcagccgtctcccgccccaggcggcatcccccagtccctcccgcctccacgagagcctggagctctcagcctcgcccggggctccactctctcctccggctccctgggctgttttgctctaacgatcttgccagatccctccctctgtagacaaccaccaacctctgtttgctgttgaattctctcctcacattacccaggtctgctcaagacatgattttggttttggtttctgagggttctagtgggcagaaggttggagggacacttatgagggtggccgggggtctgacgctgcactttggaaaaactcacacagttgaatttccaaagaaatctgccctttgccctctttgcacctttgatacattctggaagttttctcaggctttggacacttctggggatggaggtgtggagaagtggggagttccctctcttcatagtaaataactctgaaatatgtgaatgtgaatggcaggagaatctggccaaggatggggccgaaaagggtggttctaattgtttgcttctgatgttgagtctttagctgaccccacaggcaggtttccaaggtgcaaagagatctttcccgagtcagcggccccatcctcatcctccctccctttacttcctcactgtgcagtctccctcaaggatctactgtgaaaggtgtgtttgtagtgatatccaacctaactcagtaacgaagtcgttacttagctcttagctgtgaaataactctggaaacttccccaccccaaccataaattcttacttataaagaaacaggtccccaaactggaaacagcttagtccaggcctcagcgagaaggaaggacaccatgactgctccatgctgggcacagccgggcagtcttgccaagtgcctgctggaggctgtgccggcaagaggcctgcagcaaggagattcccttccctcgggccattatcaatactgtctttatctggaggtggggaagcgcagccctctgagacagcaggacaatggtcagttcagagagggtgagggcagcaaacgcttcagaggacacagaagccagaggacccccccccgccccacagctgggtcagcctggaaaatccatctattagggactttttggcagccagatggcagcaatagcccattaggtctcatcccgagttccaagtcttggctgcaaatgagcctcagttcgccttactggagagcacccccagattcctgggcacagttcatttccagccctttctagatctgatcttttagggggaaagacagcttaaaatgttcttttcattttaaagaaaattattctgtctgcttaagttggaggctacttactctttcacctgacattttctttccttttattcttccagatcaggaatgaaatttccatgctgctcataaagataatattattgtactaattatttttattaccattgtaattatgatcattatgttgatattttagtcagggttttaaatgcacatttattccaag

SEQ ID NO: 2512 - DNA, 6000 bp, Homo sapiens
tttatcctctggcctcgccacctcatctgcgtgatctgtgatgcctcctccttattcacgctctcagccttctccctgccacccccgtccctggtggtacacagtcaccgtccttagcacagggcaggagctcagaaaatacttggatgagttaaaaccactgggctctgaagaggctcctggctcccctggctctctggctgggtaacatggaagccatccagctcagggtttaacccacctctctcagagcccctggctactcagagcgtggtcccccaagcagcagcactggcaccccctgggagcttgtcagaaatgcaggtgctcgggccccccagagctgctggccagagtctgcactgaacaagatgcaggaattacatttgagaactgttgatggagccacctgctgaccatgaggtcacctctggagggttgcagtgttttttccactcttcagcccccttggcaataacatggaggcagttttgtgcttggccatgtttggctcacagggccattccccggatgatttagtctcatcctgcctagaggcaggtaactggaccaggtgactctgagggttattttagcttctagtagtttattaggtcccaccacagacactgtctcctctgatactcatagtcacccatggtggggaccaagcagggatcctgtcttagtctattttgtgttgctgtaacagagtacctgagactgggtaatttataatcaatagaagtttatttggctcacgattctgaagactggaagtccaagaacaggatgccagcatctggcaaggacctttgtgctgcatcttcctagcacaggaggcagaaggacaaaagagcatgagggtgagggggccagacttgttttcatcaaaaaagccaatctctcaatagctaacccactcccgagataatattaatgcactgatgaactcatacactcatgagggctctgccctcaggacctaacatcccttactggccccaccctaaacacttgcactggggactaagtttctaacacaagaactttggggaacacattcaaattatagcagatctctcctacccattttccagatgctgaaagtaacacctcccagaggaacggcactgggcctggccttaggccaccagcccaccttgcctctcctgattcttttccgctttcccttgcttcattccctcatgcagccccgaccaccctcccagccgagggagtgagccagagccccactgcatccagagtcaaggcaaagtcctagtgggtccgggggagatgaggctgatttgttactgcccggcctcaggcacatgtttcttcctggaagaccactgttctctggtggggtagcatcttctgggcagctgggaccctgccactgatctgacctctttctcctcccgccacagtcaacaccagtcaccactcgtcctcctacaagtccaagtcctccagcaacgtgacctccaccagcggtcactcttcagggagctcatctggagccatcacctaccggcagcagcggccgggcccccacttccagcagcagcagccactcaatctcagccaggtaagccccacagctggcgccccaggccaggcagggcccccatcccctcatccttccgcttcagagaggattgctgtggcggcccctcacccacctcacagggctgcagtcctggccacgggtggcagcacatgcccttggtgacctctggtggctttttctaccacaggtcacccttggggaagttgatatcaccagtgcacagagtgctggcccaaagcaaagcgacttgtctaatgttacaaagcccttagtgacatggtgccagagcttaaaaataggatggcccacatactgctgtttcaacccagcaaagggtagagcactgtgtcccggccctgtcggcctgggacatcagggacagacctgcatccgactcattgcagggagggcccgcacaccacagcccccaagtcaagggtaagatttgtcccaggacctggaggaaggggggtgggttgaggtgaaatgtgagtgacctgagtttctgtgggtgcagggctgtctgtgtcaagggctcggcatcaggcctgactcacgtggtggactcagggccctgtttctctagaaacaaagtgagataaatggggtgtttgtgttcagagcccctcatctgaagtgctgccccaggtcatcagtggagcccgtgtctctgtcacgtgacttaggttcaccaggtagaagagggctattttatttggactgacagaacttcaaacagcaacgcttctgagagccaactttttttttttaagacagggtcttgttctgtcacccaggctcaagtgcagtggcactgtcatggctctcactgcagcctctgcctcctggactcaagtaatcctccaccttagcctcccgagtagctgagactacaggcatgagccaccacacccagctaattttcaaaattttttgtagagatgttgtgagagccaataattttgagaacaagattttacagtgagtaagaaagcaactgctgctcaaagagagtgtcctggccgggtgcggtggctcacgcctgtagtcccagcttctcgggagcccaaggcggggggatcattctaggccaggagttcaaggctacagtgagctaggttcatgccactgcactccagcctggggcatcctgatacttcacagcttctgtacgtccttgggagaaatatgttctcctataactttgcagctggctttatccgtgtatcatcccagcccagtgagtggcaggccaagtcgggattttctcagtccaagtaaattttttttttttttttgagacagagtttcactctgtcacccaggctggagtgcactcgcgtgatctcagctcactgcaacctctacctcccaggttcaagtgattcttgtgcctcagcccaccgaatagctgggactacagacaaggcacgtgccaccatgcccggctaatttttttgtattttagtagagacggggtttcaccatattggccaggctggtctcgaactctagacctcaggtgatccgcccacctctgcctcccaaagtgctgagattacaggcgtgagccactgcgccaggtcccaagtaaatttttactttctcaacacacagagggaagccccttctattacttctggagtctttcccttctcttcctcctccctgccctcctgcccctcctcccattccttcctccccatgtgtcggcccctgacgtctctcttggtgcctctcctccccaggctcagcagcacatcaccacggaccgcactgggagccaccgaaggcagcaggcctacatcactcccaccatggcccaggctccgtactccttcccgcacaacagccccagccacggcactgtgcacccgcatctggctgcagccgctgccgctgcccacctccccacccagccccacctctacacctacactgcgccggcggccctgggctccaccggcaccgtggcccacctggtggcctcgcaaggctctgcgcgccacaccgtgcagcacactgcctacccagccagcatcgtccaccaggtccccgtgagcatgggcccccgggtcctgccctcgcccaccatccacccgagtcagtatccagcccaatttgcccaccagacctacatcagcgcctcgccagcctccaccgtctacactggatacccactgagccccgccaaggtcaaccagtacccttacatataaacactggaggggagggagggagggagggagggagagaatggcccgagggaggagggagagaaggagggaggcgctcctgggaccgtgggcgctggccttttatactgaagatgccgcacacaaacaatgcaaacggggcaggggcgggggggggggggggggcagagggcagggggacgggtcgggacaccagtgaaacttgaaccgggaagtgggaggacgtagagcagagaagagaacatttttaaaaggaagggattaaagagggtgggaaatctatggtttttattttaaaaaagaaaaaggaaaaaaaaaaagtcaataacaaaaaacccagctcaagaacccattctacgccaaactggaaaggagaagagagcaacaggaagattccagaaacggggggccccagtttttgaagaactttatgaacttttcaaagattattttcatatggcagcaagtgatacggaagactgctgtcagggacacctgatatggaaatcaaatagatttttaattaattgaacataagatttagggatttttccagaactcgaaagggtcaacagccctccagaatgtcgggctgcagcctgaggaggctgatgtttggagctggtgtgggattggcgaagcccagtccgggctccctagtcaggaaagacgggggacggccaggctgctggaaggcccccgggggcgcggggcgagttttctttttctgagcactctggataaatccctaagcaacgttgtttctcaaatgtcattaataatgtgtgttgcaaactttaggtttttttcttttctgaaaatgtattttctctttgaatccacccctagtcgcgtagcgtagggctagcggtcgtcacagacaccctagtagaatgtagcactcagcacccttgtctcctaccttgtgttcaactccaatgataccaatagaatattcctcaatgtaattgcacaaaaaaaagcgatataacataggcatgtaaccaatgtggcggtgcaggtgtgcgggtgagcgagcacgtgtgggtgtgcacgcgccgccctccccgcgtggccctcggcgccgccaccctagctggcgcagtcttgacactgcatccttccctcctagtgccttaccgagcgacagacgcggcgtgagggtttacttccactggtactccaagaaactgaggctagtcagacacaatctcagctcttctgttgtgctgttgtaacagtttacgctggccttttttttttctttttctttttctttttaaaatgttaatgcccgttgtctttcctgggctgtttgctagcggaaggatgccagggaagccagcaggagctaggagagagtccgtggatctcgaaagaaatatgggagacagatgcccggcgggtgcgtctggagatggggacggcgggagttgagttgtggcagtagttgagttgtaatttgtgggcggaggcccagagagactccccacccttcacccctgccccactctgtccccagttccgccatttgtgaggccagaggtttccggactgttggcctcgccaggcagccgtctcccgccccaggcggcatcccccagtccctcccgcctccacgagagcctggagctctcagcctcgcccggggctccactctctcctccggctccctgggctgttttgctctaacgatcttgccagatccctccctctgtagacaaccaccaacctctgtttgctgttgaattctctcctcacattacccaggtctgctcaagacatgattttggttttggtttctgagggttctagtgggcagaaggttggagggacacttatgagggtggccgggggtctgacgctgcactttggaaaaactcacacagttgaatttccaaagaaatctgccctttgccctctttgcacctttgatacattctggaagttttctcaggctttggacacttctggggatggaggtgtggagaagtggggagttccctctcttcatagtaaataactctgaaatatgtgaatgtgaatggcaggagaatctggccaaggatggggccgaaaagggtggttctaattgtttgcttctgatgttgagtctttagctgaccccacaggcaggtttccaaggtgcaaagagatctttcccgagtcagcggccccatcctcatcctccctccctttacttcctca

SEQ ID NO: 2513 - DNA, 6000 bp, Homo sapiens
aacagaagcaatgcttgttgtaactatggtttctaactatacaacacaaaccacacagtcttcaggctgctttgtcgtagccttcacttactaaacccctctttttctgcttccgttgtcattgaagttagagaaaggtatctggaattttctgcctcccacactttcctaggccattatgcagtttgctcctaaagaagcccagtgttggcccagcgcggtggctcacgcctgtaatcccagcactttgggaggccaagggcaggtggatcacctgaggtcaggagtttgagaccagcctggccaacatggtgaaaccctgtctctactaaaaatacaaaaaagttagccaggcgtggtgccgggtgcctgtaatcccagctacttgggaggctgaggcaggagaatcacttgaacctgagaggcagaggttgcagtgagccgagatcgcaccattgcactccagcctgggcaacaagagtgaaactccatctcaaaaaaaaaaaaaaaaaaaaaaaaaggaagcccagtatcttctcactagtctgggtctgtttgttgcttttgccattacaaaagtgcttgcatttaatgaatggctatgactggtgcatctgggtgcatttgattggaaatttcatttaggtgtgtattaatactgcactgtgtgttaggcagccctctcctggaggagagctgaggcacagggacatggggggctagtaaagcatctcttctgcttttatcaaggggtgatggtcctgtctgcagaactccccaagctggggtggggagatggcccccactcggcagcagagctcccgccctctggggctcttgcccctgctgggctggacactcatgccctgtcctgccctgtcctgttccatcagccttcttggacttgggctgtccctgactgtcagcgtcttcatctggtttatcctctggcctcgccacctcatctgcgtgatctgtgatgcctcctccttattcacgctctcagccttctccctgccacccccgtccctggtggtacacagtcaccgtccttagcacagggcaggagctcagaaaatacttggatgagttaaaaccactgggctctgaagaggctcctggctcccctggctctctggctgggtaacatggaagccatccagctcagggtttaacccacctctctcagagcccctggctactcagagcgtggtcccccaagcagcagcactggcaccccctgggagcttgtcagaaatgcaggtgctcgggccccccagagctgctggccagagtctgcactgaacaagatgcaggaattacatttgagaactgttgatggagccacctgctgaccatgaggtcacctctggagggttgcagtgttttttccactcttcagcccccttggcaataacatggaggcagttttgtgcttggccatgtttggctcacagggccattccccggatgatttagtctcatcctgcctagaggcaggtaactggaccaggtgactctgagggttattttagcttctagtagtttattaggtcccaccacagacactgtctcctctgatactcatagtcacccatggtggggaccaagcagggatcctgtcttagtctattttgtgttgctgtaacagagtacctgagactgggtaatttataatcaatagaagtttatttggctcacgattctgaagactggaagtccaagaacaggatgccagcatctggcaaggacctttgtgctgcatcttcctagcacaggaggcagaaggacaaaagagcatgagggtgagggggccagacttgttttcatcaaaaaagccaatctctcaatagctaacccactcccgagataatattaatgcactgatgaactcatacactcatgagggctctgccctcaggacctaacatcccttactggccccaccctaaacacttgcactggggactaagtttctaacacaagaactttggggaacacattcaaattatagcagatctctcctacccattttccagatgctgaaagtaacacctcccagaggaacggcactgggcctggccttaggccaccagcccaccttgcctctcctgattcttttccgctttcccttgcttcattccctcatgcagccccgaccaccctcccagccgagggagtgagccagagccccactgcatccagagtcaaggcaaagtcctagtgggtccgggggagatgaggctgatttgttactgcccggcctcaggcacatgtttcttcctggaagaccactgttctctggtggggtagcatcttctgggcagctgggaccctgccactgatctgacctctttctcctcccgccacagtcaacaccagtcaccactcgtcctcctacaagtccaagtcctccagcaacgtgacctccaccagcggtcactcttcagggagctcatctggagccatcacctaccggcagcagcggccgggcccccacttccagcagcagcagccactcaatctcagccaggtaagccccacagctggcgccccaggccaggcagggcccccatcccctcatccttccgcttcagagaggattgctgtggcggcccctcacccacctcacagggctgcagtcctggccacgggtggcagcacatgcccttggtgacctctggtggctttttctaccacaggtcacccttggggaagttgatatcaccagtgcacagagtgctggcccaaagcaaagcgacttgtctaatgttacaaagcccttagtgacatggtgccagagcttaaaaataggatggcccacatactgctgtttcaacccagcaaagggtagagcactgtgtcccggccctgtcggcctgggacatcagggacagacctgcatccgactcattgcagggagggcccgcacaccacagcccccaagtcaagggtaagatttgtcccaggacctggaggaaggggggtgggttgaggtgaaatgtgagtgacctgagtttctgtgggtgcagggctgtctgtgtcaagggctcggcatcaggcctgactcacgtggtggactcagggccctgtttctctagaaacaaagtgagataaatggggtgtttgtgttcagagcccctcatctgaagtgctgccccaggtcatcagtggagcccgtgtctctgtcacgtgacttaggttcaccaggtagaagagggctattttatttggactgacagaacttcaaacagcaacgcttctgagagccaactttttttttttaagacagggtcttgttctgtcacccaggctcaagtgcagtggcactgtcatggctctcactgcagcctctgcctcctggactcaagtaatcctccaccttagcctcccgagtagctgagactacaggcatgagccaccacacccagctaattttcaaaattttttgtagagatgttgtgagagccaataattttgagaacaagattttacagtgagtaagaaagcaactgctgctcaaagagagtgtcctggccgggtgcggtggctcacgcctgtagtcccagcttctcgggagcccaaggcggggggatcattctaggccaggagttcaaggctacagtgagctaggttcatgccactgcactccagcctggggcatcctgatacttcacagcttctgtacgtccttgggagaaatatgttctcctataactttgcagctggctttatccgtgtatcatcccagcccagtgagtggcaggccaagtcgggattttctcagtccaagtaaattttttttttttttttgagacagagtttcactctgtcacccaggctggagtgcactcgcgtgatctcagctcactgcaacctctacctcccaggttcaagtgattcttgtgcctcagcccaccgaatagctgggactacagacaaggcacgtgccaccatgcccggctaatttttttgtattttagtagagacggggtttcaccatattggccaggctggtctcgaactctagacctcaggtgatccgcccacctctgcctcccaaagtgctgagattacaggcgtgagccactgcgccaggtcccaagtaaatttttactttctcaacacacagagggaagccccttctattacttctggagtctttcccttctcttcctcctccctgccctcctgcccctcctcccattccttcctccccatgtgtcggcccctgacgtctctcttggtgcctctcctccccaggctcagcagcacatcaccacggaccgcactgggagccaccgaaggcagcaggcctacatcactcccaccatggcccaggctccgtactccttcccgcacaacagccccagccacggcactgtgcacccgcatctggctgcagccgctgccgctgcccacctccccacccagccccacctctacacctacactgcgccggcggccctgggctccaccggcaccgtggcccacctggtggcctcgcaaggctctgcgcgccacaccgtgcagcacactgcctacccagccagcatcgtccaccaggtccccgtgagcatgggcccccgggtcctgccctcgcccaccatccacccgagtcagtatccagcccaatttgcccaccagacctacatcagcgcctcgccagcctccaccgtctacactggatacccactgagccccgccaaggtcaaccagtacccttacatataaacactggaggggagggagggagggagggagggagagaatggcccgagggaggagggagagaaggagggaggcgctcctgggaccgtgggcgctggccttttatactgaagatgccgcacacaaacaatgcaaacggggcaggggcgggggggggggggggggcagagggcagggggacgggtcgggacaccagtgaaacttgaaccgggaagtgggaggacgtagagcagagaagagaacatttttaaaaggaagggattaaagagggtgggaaatctatggtttttattttaaaaaagaaaaaggaaaaaaaaaaagtcaataacaaaaaacccagctcaagaacccattctacgccaaactggaaaggagaagagagcaacaggaagattccagaaacggggggccccagtttttgaagaactttatgaacttttcaaagattattttcatatggcagcaagtgatacggaagactgctgtcagggacacctgatatggaaatcaaatagatttttaattaattgaacataagatttagggatttttccagaactcgaaagggtcaacagccctccagaatgtcgggctgcagcctgaggaggctgatgtttggagctggtgtgggattggcgaagcccagtccgggctccctagtcaggaaagacgggggacggccaggctgctggaaggcccccgggggcgcggggcgagttttctttttctgagcactctggataaatccctaagcaacgttgtttctcaaatgtcattaataatgtgtgttgcaaactttaggtttttttcttttctgaaaatgtattttctctttgaatccacccctagtcgcgtagcgtagggctagcggtcgtcacagacaccctagtagaatgtagcactcagcacccttgtctcctaccttgtgttcaactccaatgataccaatagaatattcctcaatgtaattgcacaaaaaaaagcgatataacataggcatgtaaccaatgtggcggtgcaggtgtgcgggtgagcgagcacgtgtgggtgtgcacgcgccgccctccccgcgtggccctcggcgccgccaccctagctggcgcagtcttgacactgcatccttccctcctagtgccttaccgagcgacagacgcggcgtgagggtttacttccactggtactccaagaaactgaggctagtcagacacaatctcagctcttctgttgtgctgttgtaacagtttacgctggccttttttttttcttttt

SEQ ID NO: 2514 - DNA, 6000 bp, Homo sapiens
agcctcctgagtagctgggaccacaggtgcgcacctccatgcctggctttttttttttttctttttgcgacggactcttactctgtcacccaggctggagtacaatggcacgatcccggctcactgcagcctctgcctcctgggttcaagcgattctcatgcctcagcctcctgaatagctgggattacagacctgcgccaccacgcctggctaatttttgtatttttagtagagacagggtttcaccatgttgaccaggctggtcttggactcctgacctcaagtgatcctcccaccttggcttcccaaagtgctgggattacaggcctgaaccactgcgcctaacccctttttttttttttaagaaacagggtctcactctgttgcccaggctggtctgaaactcctgggctcaagtgatcctcccatctcaccctcccaaagtgctgggattccaggcatgagccaccacacctggccaaactccattttacttgtgaaaaatcagaacttggtaataagacatttttgggttttgtttgttttcttcttttcaatactattatataaagaaaaaagattagcaatgagaacaaatttaaagggggaagaggaggtactttttcagtagagaaaaattcagctagaagatccaagaccagtgggggtgtttctgatcgccctcttcctccccactctcatgctaggtgtgtgaaaggtaaccaagagaaaggtctccccagctcccttcactcccactccaggctgcagaaagggtaggaaagtagcctcttctaccatctcttagtgaagtggaaaatttatagagaaaacaaaaatcaggctaatgcatttcattatcagcagaatgccttgagctactttctttcttttttttttttttttttttttttgagacagggtctatttctgtcgtccaggctggagtagagtggtgcaatctcagctcactgcaacctccacctcccgggtccaagcaatcctcccgcctcagcctcccaggtagctgggactataggcacacaccaccgcaccctgctaatttgggtttgtttgtttgtttgtttgtttttggtagagacagggttttgccatgttgcccaggctgctcttgaactcctgggttcaagcagtccacctgcctcagcttcccaaagtgctgggataacaggcatgagccaccgtgcctggccttgagacatatttttttaaaaaaacataagctgtgttcatatctcaaactttgagcctggttttgtccaaaacatacccctacctaatcatgacagattcttagaaaagaagatgtacctgggtggtctctttagtgttgattaccaactccctgtgaaatgttctcttggggtttaggtgatttccttgaagggacagaactcctgcattcaggaacaggttgttcatggagtttacgctggaatcctggttgataccagactctgtattcatgaatggggttctataattgtaatattaggtaacttctaagaagattagctttttagaagctaataaaaaatagcaatgtttccttaagaaagtgtgatgtaaattcttaagaaaggataattggcataaacagatattggacttaatcccgttattttgggaaggggacagcttgttttacatcttcctgaagatagaatacctcgagttaggtgtggttgtgcattcctatagacccagctactcaggaggctgaggcagaaggattgtttgagttcagaagttcaagactatagcgagctatgatcatgcctgtgaatagccactgcactccagcctaggcaacatagtgagttcccatctctagatagacagaagaaaatagaagacctgcgtttcagaactcctttgtaaaaaccaggcattctctgaagattagtttcccagactttcagctacaaaagataacttcagaatatctctaaaatggttgttagctcatctgattggcgtgtgaaggtaatgaagtcagtagacgtggttctctgtaggtgtgttctaaacacacagacttatccttcatctcagccaaccttccaagtgggccctccactaatggaggggaccaagccaaagaatggaaggattgttgtagcacagcgcctctcctgagagccacaggcccttcagaggaggagtcagtaatggcaccccaggtttgaaagatagtattcatatagaaacagcttcctgcatttccaacttgctaatggtttcttccattcttccttttcagggcccctgagatcatccttggtttaccattttgtgaggcaattgacatgtggtccctgggctgtgttattgcagaattgttcctgggttggccgttatatccaggagcttcggagtatgatcaggtgggtccagatgacacagatattcacaagacctcattcttcatctggaaaatagcctggattagcatttcattgattacatgacaaatgggcgggactgtggaatgtcacgttgtctcccaaaccttgcttcccttaaccttgctattttttctttattcctttctcttttccctttttcttttttctcttttttgttaacttctttccctacaaaaattgtcattttcatttttctcaaagccagcagagccattagtataccatatgtatagtgacaggaaaagccctgacctcattcttatcttttcttgcagattcggtatatttcacaaacacagggtttgcctgctgaatatttattaagcgccgggacaaagacaactaggtttttcaaccgtgacacggactcaccatatcctttgtggagactgaaggtaggaagagcgtctcctccactcctcacagtggcccagcgcttagggaagagggccgtagacccattagtggggagcttttgattcagtcagcaaaatgagggcactgggggtgctgttgttaatacatggtatggctgaatctgaatgctcagaagcccctctttcccttggcctatcgccgcctgtgagagtccaaccttatgattgctgaactcccaggatttaatccgataagccttgatgactgtctgatttgtgctagggagagaaacgaaccccactctgcccttgagagctggcagtccagagggagacaggaccatgtgccacaagctcccgcccactgtagtaagggccctgttcctggtcaagaatgggtgtgggtgccaagaggaaggagcatttaattctgcctgcagcagaggggcaaggaggagcatttgaactgggccctaaagaatgaagagggagcgtggtggctcacgcctgtaatcccagcacttcgggaggctgaggcgggtggatcacttgaggtcatgaattcgagaccagcctggccaacatggtgaaaccccgtctctactaaaagtataaaaattagctgggcgtggtggcatgctcctgtaatcccacctactcaggaagctgaggcacgtgaatcacttgcacctgggaggcggaggttgcagtgagctgagattgtgccactgcactccagcctgggcgacagagtgagactgtgtctcaaaaaaagaaaaggaagaatgaagcgggtttgcccagtatagaagtgtggggtggcggctggggtgatgggggttagggagaggggttccaggcaaaggaggctgcctggtgagcccatgggaatatcctaaggcccagggaggtgtctggttcacacaagtaaccataaacctgaaactccgggggcaggggcttcactttaacagaaacatagtttgctttcactttgatctgtgcctagcaattaaaatcaaagtattttcctggtaaaaagaaaataataaagtcttaaatatgtttcattttaggtatttctttttttgcagcagggtgggtgggtgtttgttttgttgttgttttggatttgtttttttaatggaatctgcagccaaatcctaatatggtttaaagataatatatatccagtagtcacaaaagactgagaaaagagatttgggaactgagcaagcactcaggctattgatgggaggcctggcatttggcaactgtgagggtgagtgtcaaggtcaggtccagtaaaaagagtcctccggtggaggagggtgaggctggagtttgctgttgtgttttattgaagagcctcagtcccacatgtccagctgttcccaggacttaagccgctccaggtgtgctgtccttgagtgagattttgaagacgaattacctctggattacctcatggatgagtacagaaatccatagtaattggaaacagcagtatctccagccatttggggaatgtaggtctgtgtctcagccaccaatagaggggcagcccagccacaaactctggggccagctgccacctattggccatgtgaccatggcaagtgcctggagctttctcttcctgtttccccatctggaaaatggggatagtaactgtgctacctaatgtggttgtcaaaactattaaatgaataaatgtgctttagaacaatgtctggcacgtagcaagagctatgtgcataagggtttattaaataaaattggaaaatgcatgggaaagccctttgcttttccacaatggaatcttgccttattccttagactcagagaaggctgtaagctgatcgaggatgtggcataccttgatcagcctgtggtatggagcaagactgctccatacctgacccggagccagcccctgacacgtgtgcataggaaggaggagggatgggttggtgtggatgaagagagaagggaattgcaggtgtgcaggtcattgaagaatcaaaatctcttccgaaatgtgggaaagagaccctctgtgagacacaggagttccaaggcttgagtcccagtgatgaggagctaagtcacgctaccaattggcttttgcctctcttgacagacaccagatgaccatgaagcagagacagggattaagtcaaaagaagcaagaaagtacattttcaactgtttagatgatatggcccaggtaagcttcatgggtgagtatgcaacgtaagccctttaaaaccaagggcagcaagacttctgcaatagtaatagaagataatgggttgaaatccacattattcaactgcagtggttgaccttgaccttaaatagttacagccagtcttagtaagaataccatttggtgtgtgaaacatttttaaaacttcataccagctcctttaaaatcgttccagttggccaggcatggtggctcatgcctgtaatcctagcactttgggaggccaaggcgagtggatgaccttaggtcaggagttcaagaccagcctggccaacatggcgaaaccccgtctctactaaaaatacaaaaattagctgggcatgatggtgagcacctgtaatctcagctactcgggaggctgaggcaggagaatcacttgaacccaggaggcagtgagccgagatcacaccactgcactccagcctggacaacaagatcaaaactccatctcaaaaaaaacaaaaaaacaatcattccagtgtattggttcccagttgtaatatagtactggcctatctgcctgatgttatcatgagaagaattccagcccattagtacccatgggtttaatgcccataatttagtgtgtatgtttcctggggcagccgttagaaggtgccatgaactggatggcttaggacaacagactttcattcccccacagttctggaggccagaaattggaagttgggcttcagcaggcccatgttcactgtaaaggccataggggaagagcatccgtgtctgtctcccagcttctggcagctctggcaatcctcagcgttctttgacttgtagctgcatccctctaatctctgcttccttcttcacatggcttttgtcctgtgtctcctctgtgcctctgtgtccacatctcccttgccttgtcactgggcccac

SEQ ID NO: 2515 - DNA, 6000 bp, Homo sapiens
gtggctccaggtgttccttggcttgtggcagcatcactccaatctcttcctcccttttcacatgaccatcttgctgctgtgtcagtatctatgtccagatttccctctgatatggatgcaagtcacattggattagggcccacctactccagtgtgacctcatcttagctaattatatctgcagcaactccattcctaaataaagtcacatgccaaggtgccaggaattaggagttcaacataacttttagggggacacaattcaacccataacaattatctagggctgggtggaaggagagaagacggtgggcttaggacttggccaacacacagcagttggatagaagagggcgagcctacaaaggaaatgggcaagccacaagcagagaggcgggacagatatggggagcaagcgatgtcatgaaaaccaagaataagtgtttcagggcaggaaggaatgatcacccgcgtgaaaaaaatgtggctcccaggtcacagagctaagaagttgatcaacagatgtgacagcgtggagatcactgctgatctcaacaagtgcagcgcgtcagtgacgcagagtgtccaactccaattagaggaagctgagcaaatgctgtgaggtgaagaggtgggaaccacagggggagatgactctctccagagagtgggccttgaaggggagctgagaactagggcagcagctgctgggagacgaagggattaggaaaggtttgtgtttggggcttttgttttgttttttgtgttctgttttgttcttgtgttctgctttgttttctaacgtgggagccgctagagcatgtggtgtgctgtgtcggctcgatttttatgtctgtgtctttctgtgacacacgttttgtattcgactcgagttgtcctgtgtgctttgatgtggctttcgcagcatcagaggccttcgcagacagtactgtctcccagccacctagccagatgcctgggcatttgttctttacggtcgcagcaggaacattctgcggcacgtatcatggtaccgtgaatggctgccatttcattttcttggtggactacaagcaattttcccaggccccgttcatgtcacgtcagtcgtcaaaatctatgtctggtgtttcctgctaaagaacatcactaaagtgcctttgtgtggccattttagttgttgcagtctgccttgttcatcactggggaatggaaactggaaaacgaggtttccgtgggttaggaacagccttccgggccatgagaaccacgtaactaacctgataggaagggcaggcccatagtcaagttcagagaagtcccctggggccagaccggccttcctaagacttacttgagtgtcaaacatccaaacctacagactggagcgtcagacttccaaacgtcaggctgcaagagggcaggggccagccaagaggccaggtgacaagaatcgggggacagaggtgagaatgtgcttgatccttgagccagcagtccaggccaaaactctcctcccatgaagaggcctagatccacgtgagaggaggcaggaggccacccctgactctagaacagggagggcagagagaaaagcaggttctgacaccataatactttttttggtagtgttcttttcagatattcccttcttttctggccaggtatggtggctcctgcctgtaatcccagcactttgggaggctgaggcaggtggatcacttgagatcaggagcttgagaccagcctggccaacatggtgaaaacccgcctctgctaaaaatacaaaaattagccagacctggtggtaggtgcctgtaatcccagctacctggaaggctgaggcacgagaatcgcttgaacccaggaggtggaggttgcagtgagccaagatcatgccactgcactccaggctgggcaacagagcaagactctgtctcaaaaaaaaaaaaaaaaaaaaacctgaaacagatagtcccttcttttttctaagggatgtgatgttttaaataaactgaaacgatctctaaaggcactgctagaggcaacctggcagtaatcttatcagttacacacaatgatgagtgaacctgggggccctggtatgtggccaacactgacacaggtggcctaggcaggtggtgggctcgtggtcacatggaagacaagggtgcagcagggacatgtcttggagccaccacaggcatccccagctcatcagtgccagtgagtaagagtggcccctgacaatacatgcgcagtccaatgtggggaccaaaggagacaaaggccaaagggggtgaagtgccaagcagaacactggcagctgaagacgcccagcagcaggcgatggggacaacggaaggttcattaaatagcaacaaggcaactcactccagcccccagcggtcactccttctgctgcccagaccggcaagtgtgactggtactctagaagcacgtagtagccagtacccagtctctagttgtgaggaaaggaataaactaaaatttttttttttttttgagacagggtcttgctctgttaccaggctggagtgcaatggtgcaaatcatggctcatggcaccctcaaactcctgggctcaagcagtcctcccacttcagcctcctgagtagctgggaccacaggtgcgcacctccatgcctggctttttttttttttctttttgcgacggactcttactctgtcacccaggctggagtacaatggcacgatcccggctcactgcagcctctgcctcctgggttcaagcgattctcatgcctcagcctcctgaatagctgggattacagacctgcgccaccacgcctggctaatttttgtatttttagtagagacagggtttcaccatgttgaccaggctggtcttggactcctgacctcaagtgatcctcccaccttggcttcccaaagtgctgggattacaggcctgaaccactgcgcctaacccctttttttttttttaagaaacagggtctcactctgttgcccaggctggtctgaaactcctgggctcaagtgatcctcccatctcaccctcccaaagtgctgggattccaggcatgagccaccacacctggccaaactccattttacttgtgaaaaatcagaacttggtaataagacatttttgggttttgtttgttttcttcttttcaatactattatataaagaaaaaagattagcaatgagaacaaatttaaagggggaagaggaggtactttttcagtagagaaaaattcagctagaagatccaagaccagtgggggtgtttctgatcgccctcttcctccccactctcatgctaggtgtgtgaaaggtaaccaagagaaaggtctccccagctcccttcactcccactccaggctgcagaaagggtaggaaagtagcctcttctaccatctcttagtgaagtggaaaatttatagagaaaacaaaaatcaggctaatgcatttcattatcagcagaatgccttgagctactttctttcttttttttttttttttttttttttgagacagggtctatttctgtcgtccaggctggagtagagtggtgcaatctcagctcactgcaacctccacctcccgggtccaagcaatcctcccgcctcagcctcccaggtagctgggactataggcacacaccaccgcaccctgctaatttgggtttgtttgtttgtttgtttgtttttggtagagacagggttttgccatgttgcccaggctgctcttgaactcctgggttcaagcagtccacctgcctcagcttcccaaagtgctgggataacaggcatgagccaccgtgcctggccttgagacatatttttttaaaaaaacataagctgtgttcatatctcaaactttgagcctggttttgtccaaaacatacccctacctaatcatgacagattcttagaaaagaagatgtacctgggtggtctctttagtgttgattaccaactccctgtgaaatgttctcttggggtttaggtgatttccttgaagggacagaactcctgcattcaggaacaggttgttcatggagtttacgctggaatcctggttgataccagactctgtattcatgaatggggttctataattgtaatattaggtaacttctaagaagattagctttttagaagctaataaaaaatagcaatgtttccttaagaaagtgtgatgtaaattcttaagaaaggataattggcataaacagatattggacttaatcccgttattttgggaaggggacagcttgttttacatcttcctgaagatagaatacctcgagttaggtgtggttgtgcattcctatagacccagctactcaggaggctgaggcagaaggattgtttgagttcagaagttcaagactatagcgagctatgatcatgcctgtgaatagccactgcactccagcctaggcaacatagtgagttcccatctctagatagacagaagaaaatagaagacctgcgtttcagaactcctttgtaaaaaccaggcattctctgaagattagtttcccagactttcagctacaaaagataacttcagaatatctctaaaatggttgttagctcatctgattggcgtgtgaaggtaatgaagtcagtagacgtggttctctgtaggtgtgttctaaacacacagacttatccttcatctcagccaaccttccaagtgggccctccactaatggaggggaccaagccaaagaatggaaggattgttgtagcacagcgcctctcctgagagccacaggcccttcagaggaggagtcagtaatggcaccccaggtttgaaagatagtattcatatagaaacagcttcctgcatttccaacttgctaatggtttcttccattcttccttttcagggcccctgagatcatccttggtttaccattttgtgaggcaattgacatgtggtccctgggctgtgttattgcagaattgttcctgggttggccgttatatccaggagcttcggagtatgatcaggtgggtccagatgacacagatattcacaagacctcattcttcatctggaaaatagcctggattagcatttcattgattacatgacaaatgggcgggactgtggaatgtcacgttgtctcccaaaccttgcttcccttaaccttgctattttttctttattcctttctcttttccctttttcttttttctcttttttgttaacttctttccctacaaaaattgtcattttcatttttctcaaagccagcagagccattagtataccatatgtatagtgacaggaaaagccctgacctcattcttatcttttcttgcagattcggtatatttcacaaacacagggtttgcctgctgaatatttattaagcgccgggacaaagacaactaggtttttcaaccgtgacacggactcaccatatcctttgtggagactgaaggtaggaagagcgtctcctccactcctcacagtggcccagcgcttagggaagagggccgtagacccattagtggggagcttttgattcagtcagcaaaatgagggcactgggggtgctgttgttaatacatggtatggctgaatctgaatgctcagaagcccctctttcccttggcctatcgccgcctgtgagagtccaaccttatgattgctgaactcccaggatttaatccgataagccttgatgactgtctgatttgtgctagggagagaaacgaaccccactctgcccttgagagctggcagtccagagggagacaggaccatgtgccacaagctcccgcccactgtagtaagggccctgttcctggtcaagaatgggtgtgggtgccaagaggaaggagcatttaattctgcctgcagcagaggggcaaggaggagcatttgaactgggccctaaagaatgaagagggagcgtggtggctcacgcctgtaatcccagcacttcgggaggctgaggcgggtggatc

SEQ ID NO: 2516 - DNA, 6000 bp, Homo sapiens
agaatgtgtggaaaagatagaaagatacagagaaaaagaaaattagacacacagtcagaaagagaggaaaatagagatacagcaagagaccaaaagagaggtgtgatatcaaaagacagaacttgagatagtgacctacctccctcaggcacatcctccagagataaaccacaggcacaggctcacacatggaaaataaagagctgtcaggaaaataagagcaacacacaccaagtgagaataagatacaagccacacagacatcatgctaagaataccctgagagtaagagagacatacacacctaaatgcatacaccaaaaagagggttatctctatcctgtggccttgaagatattgtgatgttgtgcagtttcacaactataggcatacatgaaaaaaaaaagaccctttgttccatgtcctgtaagcaaaatgaacttgaaatgaggtcaaagctcccccatgttcactctaccaactcctgagaaagatatgacttgcaccattttgtagaaaggcaaattaaggagaggtaactggtataaatggttactaaatcctttccagttttcttgcctttattattgttcttcaatgcaccctgaagttaaatggtattttggcaacctagagttccatgtactgttaaaaaaaaaaaaaagtgatttttttaaatgattgattaaactccttagaacactgactgctaatgtgcttattaaataaataaaatacaatgcacactatctctagccaaatgggacagctcccagacccctctcattgtctcaggcccatgactggtaaggccctctctgcttggagcaatctctggtgctcttttctggtacctccttagccctccccatccttctactatctccacccataaaacaggacacatattcaggtagaatttaagaaacctgtatttccctccaaactagtttcaccaaagtcactaatgcaactcttgttgctaaatccaattgatgcctttctgcctttttttttttttttttttttttgagatggaatttagctcttgttgcctaggctagagtgcaatggcactagaactcggctcactgcaacctctgcctcctgggttcaagcgattatcctatctcagcctcccaagtagctgggattacaggtgcccaccgccacgtctggctaattttttttgtgtttttagtagagatggagtttcatcatgttggccaggctggtctcaaactcttgacctcaggtgatctgcctgcctcagcctcccaaagtgctgggattacaggcgtgagccacagcacccagctgcttttctgctttcatctgacgtgggcctctcaatagcatgcagcactgttgaccttgctgggatgttgaggaatcccccgtcctggctgtcctccaacttctctgccctcttgtccatggggagctctttttcctcttcccatgtctcaaatactggtactccccaggttctgtcacagatcctctctcctcccagctcccatgctctccttcagtgacatttcactgttaggtttataccttgctgccacttgactgcagtcaccggaaggaaaggagacaattagtatactcagtctgccaattcatgaaggaaaatctaagctcatttcaagaatatttttccgttatatcatacgaacttcgctagctcaattgaatgcatgttttgcatctcatggatacagcttcagtcatggtggtctgaagagaaggtggacctctgtctgtatggctccatcttgttccccttccatgggactctatttccttgcccaagattgttcccttcttatggggaggagactacctgtaaaatgttttcggttgacacaagtgatattcattttaagactgcctagaatcactcactgctagacagcagctgggatggacttagaggcagttactgaacactggtcagtgctgaattcaggggcagtcctataaagcagggccttgctccaagacgctgccaatccagttatgaacacagggtacctacacagaagacaagagtcagccatctagggtgcgggtatgctgtggacaacagagtgtgagcaacaggcaggaaatgttctgtgagcctaaggaaagatgagacaaaagtcagtggggctggtcagagggaggagttagaataataataacttttattgaacccctactatgtgtctgccctctatataaaactctctctctaatctaacccagcctcagaggctgtgatgaggactatatgaaatgccttttatcgagtttgtagtgttgtgctggacacaagggagcatgcaacaaattgcagctatcatccattcaacaaatatgtgtgcagtactcaccatgcgttaggcaatgcagttattggacatacaatccaaaacaagaaaaacatggtttctgtccttactgagcttacagtctagagacaccttgtccaaaatggtagccactaaccacccatggttattaaaattaaaaattcagttcctcagtcatactagccacatttcatgtgctccacagacataagtagctacactgccattatggcagcaagttctaatggccagcactagaaaggggcagagagacatgcatgtagggtatgtattaacagggagttacatacctgtgtggtgaaggctatgatagagatttacagatgcaaaaggagaacattactattgttctccttctcataatcaaaatacagacactgaggctcagagaggttaagcattttgaccaagatcacatagttaagtggaagagctaggatttgaacctaggtctgacttactcccacgctatctcgggctgttttgtggaggaggtgagccaggcacaggtagaatctgcttaaagagagaagatggagaaggtacccctctgggaaagtgggtgggaaagtgaccgcttgggcaaaggcacagtgacagagatgggtgaagctggcactgggctacaagtaaaccagtttggctagagaagcagtgacttgctgaactcatgtccttagaaagctaagtcaggactcgcctgccttgatgaaaagccaaggcactcagccccacctgcagaggttgagtccttagaggatgttagccaggagcgtggcatggccagaaccacgtattatgaagatggcaatatttaggatgacctgggccaagactaaagttaaagattgcagggaggatagaagggaaggagataaatgaccggtgtggagcaaaaaacactagagtgggagccacgagacctattcctaagcttcaatactgtgtgacattgggcaacagattttacttctctggactccatttcttcaactctaaaagggcagggctggcccagatgacctctgaggtccttttagcaacagtagtctaggattctgcaaacgtgaatggcattaggttaagagaagggataggaagtgtagcattgattatgggggcaaggaagaccgcagagtacaagatcacacagaggaaggtgtcgtgatgtaccactaaaaaagtgtgaaagagcttgccttttttgggaaggactgaaggatgggaacggaggatggagaccggaaaggataagaagtagtgagaaaatcacgaggttgtttttaagaaagttatacagtgttagagatcattattttacacagatagcttttcaacttttttaaacccacgattcacagacggaaataaaattgacatcatggtccagtacacttgtccagtacctataatcgaaacaaaaggtttatgaaacaatagttgcccttactaagggcaatggactctaatattttctattggattccatttcgttctttttgaaagctggttgccttccgctgcatttattttatgatctattactgtgtcacgacccacagttttaaaaacagtgcctaagaggagactcaacaagtcttcctaagttggaggggatggcagggcatcctatccaagcatccgggaggcagctggagaagcaaacctggagaggctcccggctggggagagtctggagagtgtttagcggaagccctgataggagagagcgctgagaaaagcgaggacccagagagttgtgagctcccattcaagtgatggagtggcggccctcgggacagtgtagacgcgaggaggagaagatcagggtggcgtggaagccagactccggcaggaacccagcgaccaccccgggggctgcatttccgcggcgtgcacggcagggcttcggtgcctctgacctcgtgtggctttccgaagctcctccactcacccgccctcctccggagcacggcgcgcgcccactccttcattcattcattccactcctacctccgcgagcgccaaccggctgtgagatgggcgagccactttgccagcgtggggctctctttcgggtcggttccctccccgccagcacacgcgcgaaccctcgcacctgggcacacacgcgcgcgcgtgcacacacacacacaaagttctgggggcccctctgcagaccggctcggctgcgctgggctcggagccgtgcgcccgccgggtccaggccggccctctcacccactacccggggcccgccctgcgcccagtccccccgcgctgcgcggcagcccctcccagcgcggtcccctcgggccgccggcgcggctctgcccttcggttcggccttccccgcctcgcatccgtgccatcggcgctcgattgcgcgcggactccctgtggctctcccggccccgcgccccgcccccgcccccgcccgccgcccccctccgccagcaacttttgcggagcccccgcgcccagccatgctgagctgagccccgccggccctggccgcgcgctgcccccggctcccgcccctccgcggatccgctcgggggccgcggccgctcggcgcctcggcctcggccgctccgcccgcccggccgccccgagccccgagccccgagccccccgcgccgggcccgggcggcagcggcggcggcggcggcggcggcgcgcccggccccctcccccggcgccggccacgggaggcggtgatgcgggcgcgggcggcctcggctgcgccgagagcggagacacaggctcaagatggcagattccgactgaggctgggggggccgagctcgcgcgccgctttcccgtccccgttgccatgaaccgcggacaccccggccccgatggcccccgtgtacgaaggtaaggggcgcccggccccgccgaccccgcgcccgccgccctccgcggcccccgcagctttgttctgcccgcggccccgcgcccgcagcccccggcgcctgccccagcccccacccggggcccgagggggccgcgaccccctccctcgcccggaagatgaccgggacccggcgccggcagggtcttgcttccagggcggggagaggggccgggggcgcaggaggggagggggcgtgtgcgagggtgggcggctgcccggggagggcagggacgccggggaaggcggaccggtgactgtgctttttatttatttgcgataaatgaaggtgatgcggcttagcttccaccgcccccccacattacctttcggagcacctcctttccacttcgctctccgccccgcgccccttcccatttctttccgcgcccaccccacgctcctttattctccgcgagcctccgattttgggggggctgtggaatcggaatgcacggggctaggtggggagagaggagagagatgaaaagtccatgtcagagccaggcagaacaatgaaataggcgaaaatctcccctcattagcgtgtggaaggggacgtggactttgggttttccagccgggggagcggcggagacgtttttctggctcggtctgggtcgatctgtgttgtgcaccttcacctggcatcggggtatttttccccatttgactgcctttagcaagaaagaaaagaac

SEQ ID NO: 2517 - DNA, 6000 bp, Homo sapiens
ggttatataaagtctactgccattattctgaagcccgtctttgacaccaacccaaagtccttgaattgtcatcaataagactaccagaaagcacaggcgaattacacgttcagagaacaataagaaatgctcacatatcacaccctcttgatcatcactactttgctccacacaaacctcaaaggtggttccccaagactggtctctatgggaggaagggagagagagagagatgaagaaatataaaacataaaatacaaagaatctgagcccctgtaacttacagaaagcaccaaattgtcttttgtaggaaaatgatgtttaatgcatggtgaggcagaccctggcttgtggtgggcgaggagcctccccttggaggaggctcttggtgaaccacctctgggtgctcccttgcccagcctgctgccttgtttaggaatggatcttggttaacggcaaaggttatctttcatacttggggatactttccaagaggcacagctgcagcccctgaaactctgccccagcagtttatttccacatttttcaagtagcacagaaagtgccactatagaagagaaattctctacctgaaaccagcagaagctcaatgcaaataaagaatctggaaaggtcacagagggagtaaaaagaaggttctttcttctatggctatagggggtttattgttgctggtgcccaaactggaaagggaatcgcaggagattaataattgaaatgttgctattattggttttcgaaactatttgtgggttattctttccctggagtcatcatgtctgtaagcatctcagaagatagagggatttaacacactctgagaagatgcctactacagccagggactttacgtgcactagtttctaatggagttcctgcacagtccaataaagcccaaagtcgtatcactagattcaaactcaggtttctctgattcaagtatcatagcacattgtctgaaatcaaggataaaattaaggcaccttactcactactcaaatgtggcgagaagaaaagcaacatttatacttactcatttttaaaatataaaacctaaacacaggaacagatattttagggcatgtgtcatcaaactctgctaacccaagatgattcagaatctcatttcttggtagacagcttggtagataggcatcttcaggtccatctgatgatgaattgcagcagacagtttttggaagtctgtgaagtgttcctttacataagccaatagtaatcaacacagcatatctcagggagaggaaaacataaataacttggaatttaggctcctctcattcagaacccataatagagaccttggtggttggcctttgcactagatattgaaaaagcctcgcaaagcaagttgatggaggaaatacaatcacaaggcaaatgtttaaccttctaaagaaaataaacctttttataagaagttcagttccaaaccaccaaaaactaacatgctatttataaacctatccttcaagcaagccctggaagactgattctctttgccacccattaattggtattatcaaataccccttgtttcaaaaacagcatttctgtctaaatctctggcggttcagaacgctccattaatgtatctgggccttcacctggtattccaacttggtgcagcagcaccccattgaaacaattccctctcgtgtcgttatacttttcctgagaagaatcatgcacactctttaggagctcaaaacccacaaggaatccctcttcttatagaaatctacaggaaaagctctgctcgtttagcatgcacacagggagtccatgtgctctgattgagacaggggaaaaatcaggtttcctgaacccagaggatgtcaccacggcaggagaaaggaggtcatcagagtcttggcacactcatcacagtgagtgaatgcgggtcctagcaacctaatccttgattctagaagtcacctgtctgttttagagcatgtccaacaatctctttcaaaaacacccagatctgggcttttggcagactgatgtgggccagttgaggtgggatggggaggaagattagaaaaataattataaaggtgcacagataaacatccggaataaaagggtgcacagcgcaggaacaatgaagagggcacacggacaagatggagggaaactgagggctgaaagaggccaccgcggaggtcacctgagacagggaaggaaggctggcaaataaaaacagttcatgagacttttgagatccatgattattcttaaaccgtaacaccctacacacctgcagttctttatctggcgtaaggaactggaagaacaatgtagcaggaacggggagagccaagtctcagcctcgggggcatggcctaccttccatatggatttaaaatgaaaggagcaggaggagaacagtgcagttcccaagatggctttccacaaagttgacaaaatacaccccaactcacatacccggtccctagtaacagggaaaccagccgtttactatagttctgaattcaatgccaagttccttctctcaactcaccgggagtgtccagcagagggagtctcaaggaggtacttaataaagagaaaattgtttcattttaacactctagacagtgggagcattgactgtagccccctcctgtagacgcagatgaacaatgaacgcccgacatgggttctcccgcatgttcacatgtccaccggcatgttctattctgcgtggtggagtgatcagaaatttcgttttgttttgtcgaatggttaaatggaccttgtgttcttcagaatcaaagaggaaagcccctggaataacatctctctgttgccttctaaacagcccctttgtttctaagagagtctgaaaaaaaaatatttacagtctataggttatttacagcctcgttatccagggcctgactggtaactttattccggccagaaacctaattcatttggagccctgaaactaataacagattttcttttaagtttttttttttttaatcagcctcttataacagagataaaactattaatgccttccctgtctcactggccacaactgttctccggatttacaggaggattacattcccccctcgtgccctcctctgtgccacacaaaccctgtcccctctcatttgcgatttcatccacagaatatctgaacaaaaccgaaagaaagccgggggacccacgctaaaagtatgtgaaggctgcgatttcaatgatttcatgagacaaacatttacacgatgaaacgactgaaaaatcagacacacttgggtttaaaatttctcctactacaagcacacaaaaacacatcgaagtgtaaaaacttagttgattctgggttgctttctggctggaagctgacagaacggactgaagagaaacgaaagacagtgtgcgaggcagacctactgcttttctgccttgcgttcttttctttcttgctaaaggcagtcaaatggggaaaaataccccgatgccaggtgaaggtgcacaacacagatcgacccagaccgagccagaaaaacgtctccgccgctcccccggctggaaaacccaaagtccacgtccccttccacacgctaatgaggggagattttcgcctatttcattgttctgcctggctctgacatggacttttcatctctctcctctctccccacctagccccgtgcattccgattccacagcccccccaaaatcggaggctcgcggagaataaaggagcgtggggtgggcgcggaaagaaatgggaaggggcgcggggcggagagcgaagtggaaaggaggtgctccgaaaggtaatgtgggggggcggtggaagctaagccgcatcaccttcatttatcgcaaataaataaaaagcacagtcaccggtccgccttccccggcgtccctgccctccccgggcagccgcccaccctcgcacacgccccctcccctcctgcgcccccggcccctctccccgccctggaagcaagaccctgccggcgccgggtcccggtcatcttccgggcgagggagggggtcgcggccccctcgggccccgggtgggggctggggcaggcgccgggggctgcgggcgcggggccgcgggcagaacaaagctgcgggggccgcggagggcggcgggcgcggggtcggcggggccgggcgccccttaccttcgtacacgggggccatcggggccggggtgtccgcggttcatggcaacggggacgggaaagcggcgcgcgagctcggcccccccagcctcagtcggaatctgccatcttgagcctgtgtctccgctctcggcgcagccgaggccgcccgcgcccgcatcaccgcctcccgtggccggcgccgggggagggggccgggcgcgccgccgccgccgccgccgccgctgccgcccgggcccggcgcggggggctcggggctcggggctcggggcggccgggcgggcggagcggccgaggccgaggcgccgagcggccgcggcccccgagcggatccgcggaggggcgggagccgggggcagcgcgcggccagggccggcggggctcagctcagcatggctgggcgcgggggctccgcaaaagttgctggcggaggggggcggcgggcgggggcgggggcggggcgcggggccgggagagccacagggagtccgcgcgcaatcgagcgccgatggcacggatgcgaggcggggaaggccgaaccgaagggcagagccgcgccggcggcccgaggggaccgcgctgggaggggctgccgcgcagcgcggggggactgggcgcagggcgggccccgggtagtgggtgagagggccggcctggacccggcgggcgcacggctccgagcccagcgcagccgagccggtctgcagaggggcccccagaactttgtgtgtgtgtgtgcacgcgcgcgcgtgtgtgcccaggtgcgagggttcgcgcgtgtgctggcggggagggaaccgacccgaaagagagccccacgctggcaaagtggctcgcccatctcacagccggttggcgctcgcggaggtaggagtggaatgaatgaatgaaggagtgggcgcgcgccgtgctccggaggagggcgggtgagtggaggagcttcggaaagccacacgaggtcagaggcaccgaagccctgccgtgcacgccgcggaaatgcagcccccggggtggtcgctgggttcctgccggagtctggcttccacgccaccctgatcttctcctcctcgcgtctacactgtcccgagggccgccactccatcacttgaatgggagctcacaactctctgggtcctcgcttttctcagcgctctctcctatcagggcttccgctaaacactctccagactctccccagccgggagcctctccaggtttgcttctccagctgcctcccggatgcttggataggatgccctgccatcccctccaacttaggaagacttgttgagtctcctcttaggcactgtttttaaaactgtgggtcgtgacacagtaatagatcataaaataaatgcagcggaaggcaaccagctttcaaaaagaacgaaatggaatccaatagaaaatattagagtccattgcccttagtaagggcaactattgtttcataaaccttttgtttcgattataggtactggacaagtgtactggaccatgatgtcaattttatttccgtctgtgaatcgtgggtttaaaaaagttgaaaagctatctgtgtaaaataatgatctctaacactgtataactttcttaaaaacaacctcgtgattttctcactacttcttatcctttccggtctccatcctccgttcccatccttcagtccttcccaaaaaaggcaagctctttcacacttttttagtggtacatcacgacaccttcctctgtgtgatcttgtactctgcggtcttccttgcccccataatcaatgctacacttcctatcccttctc

SEQ ID NO: 2518 - DNA, 6000 bp, Homo sapiens
atcccagctactcgggaggctgaggcaggagaagcgcttgaacccaggaggcggaggttgcagtgagccgagatcacgccactgcactccagtgggggcgacagagtgagactctgtctcaaaaaaaacaaaaaacaaaaaacaaaaaaaccttcactagtacatacacactttatacatattttaaatggctgcacccatttcatacaatctattttccgaagtattttctaacacagacctttaaaaaaattgcagcttgttatatttgaacagtcttgaatggttttataaatttttgcaaggccaatgagtcataacatcacacccaatttaacaatagccccaaagttccagaactgttcgtgtctatgctatcagtgcccaattactctcccacaatgttactaaaagaccaggaagaataagctcattcttggtagtggatcacagttctgcataatgaattctgccataatgatcagatatcagtccttaaagcattttcattttaatctcttctagtcttcttccatcttcacataaactagtcaaacactcagggaacatctggttaaaagcctgagctccggagttatcctgtcccgtttaactcgggcttgactaccttcctagcccttacctgcaccactcaaagtctcagctccttcacctatattctgtaaagtgggttaaaccatagtacccacacttcagagggcactgtaaagatttccagtggaaggatgtatgtgaatgttgatgcatgcagtatgctaggcactggggacagatgcatatcacagtgtccctgtcccaaaggaggtcagtttggtgggagaaaccaccaactacaatcaaaaggttaaatactgtgatagtgacataggcaggacaacatgggaacccagagaaggctcctaacccagaccaggacatcagggccagctttccagagatggtgatgtgtgagccgtcaggtgatagaaaaggcaaagagtcagatccagaatggaactgcaatagcgctgaagcatggagtcaacactaggaaaggcagaccagtgcttacttggtccaagtttcccaagggaaaaaatttaactatcaaacttaggcttcacaaccctgctttttaaacatgaatacaatacttaatgttctttaagaccgtttttccaaaatcctgttaatgttaaaagctgtggcattcccatggaatccacatactttcggggcctaaggaaatcaacagtgtcaattaaaaaccatctcattttaaaaacgaggaaatatatgccctgcaaaggtaagcttgaactagactccatgtcttctctcccaagcaagatgttctatacctaagcaaaaataaatgacttcaatctctctccctcacggaatttttagaaatgaaacacctccatgagtgaataaaaaacttaagtcattaaatgttataataattctgtttatagtgtgtttactaaatcttcatattataaacaggaaacctcctataaacaggaaattatgtcctcagtagtaaacataaggcttttatccaaataggatctatttttcatttaatgctcatttcttcatttggaagcaaaacaaacacactgataaactaccaaatgtttttaaaaagcaaggcaaccttagaattggcccttaaaatggttaacactcttttctccagacatacctaaaagacaagttcaaaatgaagctgacagtcccccaaagacattttattccagaatgactcaaggtcactggctttaggacctacggaaggctgaaacagcaaaacaaacaaaaaaccaagttcctaagtttttaaggccctaatatttttaatttgaagaatggcaagtaacaactcctcaatttaaagtacattcattttaattttccatgctgaaagacagacaccactgggtatactgggaatgacattctgatgaatggccctcagagaccaagggatggttcctcctacagcaacttcctatcccactccagcagaaccatggggcttgcctcatctacaaggaggagccttaactaccaaactgcttcattgcaaaggcaaggctggatactcaacctggggggaaaaacctgatcgtgtttccaaaaaaacaccaaacacaaaaagtaaaaacatccacaccttaaaactagttttaagggggaaaaaagttaaagtttcacaacctgttttcttggcactttcccagacttccataggtatagaaaacctgggcatttttctgttagggccctgtactagatactggggtgtttcagggagaagggaagtgaagagggaagggggaatagaaaaggagggatgagagagacgatcaattttactcgagaagtgtataataaagcttgaattcttaaccggcttaagcacaacgactgtgttttctgtagccaaaaatcagcgcatgttttcaaacgttaagtttaagttagaattattccagaaaactcattcattaaaaaaaagcaactgaggcaccaccacaaccaagttctgttactctggggacgcaaaaacaaataaggaatatctcctgcgctggaggaattcacaatcggaaatgtatgggaaataaggctgtcatgtagttaattacagctagaagataatattcagtaagtggcaagagtctaatgaactgtaatatctaaggaaaccatgcagaatcagctcaggcatgcgtgtctgtcttctgatgtggtacacacattaggagtggggggtggggctggctataaggacctgagcatgtggctctcagggagggaggcttttataaattggtgaaaaaccctagcatatctaaatttggtttgttttttgacaaaatcgtttttaaaagatgaagccaatgagaaaaaaagtttaacatatttagaaagcaattcagccatccctctcaagcttaaggaacactctcctgaaacctccaaaaatgggcattaatagagttaaagcgagccagtcttgtgtttgcatgctttggaatttgaaatgtaacgcaactatttcgactcaccatggaaaacaacaaatagaaccttcaagtaaaacatttttcaatatccaaaaacaaaccttctttaaacaaagaaaaatctcatctccaaatatctttttcaaacagaatgactggttttacattttaaacatcattacatattttactacgtaatacactctccaggatttcagaaaatcgggtacattttcgggtgcaccatgaaatgaagtgttaaacttaaaactgcacacacttctgcgaggcgttaagctatgcttaggtcctagaagctcatggcttgaagtaaaaaaggaatctagttcctcttctgccgcttcgttaagtgcattccaaaaagtgtgatcgtttactccactcagaacttttgacgattttaatgctactacaggaaagagcaattacacagagcaaacaaatatttaagtagactgcaattcagtatttgcgcacttaccactaacccctactacgaaccagaagcaaccaagagtgacccaatcggaaaagagaatcctctttttggcaaagccagccagggagaaaaccctaactttggggattcatttcaaggaatgtctacaagcattcctctctttcttatcttatgtctgcgctacacaatactgcacgggtggcagaaacgggggtctttcagatcttaagggaaaaaaaagcgacgacccccgagtctggggaccccaagtcccagcggcctggcgggcgcacggctaccctcagggtcagggcgcgcgctcccgttgggaccgggggcgcgccgaggccgcagcgcagggcccggcccgactagcgagcgataggcgggcgccggggggctctgtccggttcggccgccgggctagcatccctgcgcgcatgccccggcccgctctcccaggagaacggggcaaaagggcgactgttacccaataatagcgccctgcacgttcgcaacaatgcaggcggggaacccgagagccgcgggcagggaaccggaaagcgagagagcccggctccgcggctgctcctgcgcttgagcccagagctcacaggggaacacgcgtcggccggaaagcagcgccgggaagaagcgtgggcgcgagggggcaagggcacgggtcccggcgtcccgcggaggtcgcctcaccaggcgaggcgcggacgcccgagccgccccgggccacacgtcggcccaccctccgagaacccagcccggtcgcggcggggaaaggggccggcgccaccaggccgccgcctccaggcgcgatgaatcgtgctttttcccagtgcgtagtccaggcctggccgccccggcccgtccggggtgactcagggcccggccccgctcgctcctctgccaccttcggcgtcctccgcccacgagtcccccggcccggccgccattctgcccggccgcgtttcggcggctcaggcctcgccaggcgcctggtttcggccgtcgcggcccgagtcactgcgacaccgcggctcggggccgggcctgcgccgccgccgccgccgccacctcctctcggccccggcggctgccgacactcacccgcatctctgtggtgccccaaaggctcccgcgacgcctccgcctggtccctgggcctgggccccggcgaaagccccgtcccgccaaggtctagctgcgtccctcagctaccggggctgccccgcctggagctgcgtgcgacacggcgcccgcctcctcctcctcccctgcccgcccggccctcctcctcccgccgccgccgcctgcaccacgcaacctccgccctctcgccttccctgcgcggctccccgccctctcggcctcaccggctccggcgaccgcgggggagaagctgttgggggagggccggaacgcaccgccatcggcgtccggggcgggggagccgggaaaccgtcgtcgccatcgccccgccagcccgaggcgcgggaggggcccggaaagctccctcccgcccgctcgccgctgccggcggccccgggggcgccccttccgcggccgaggcccccgctcgcgtggggaagcttctacctgcgagcctgcggcccctgcccccggcacccgagacatccccgacccggcgcgccggattctctgccaggttttacagcctccctcgccttgggaccgccgcggaggacccgttcccgccacttcggacctcgcgagcggggctgagctgcttgggtcggggacaccaccagcctctggagaaacggcccgaagcaccccgaagaagagggggtcccagtcccctgcccctcccttgtgcgcacccccacccccagcttgcctggaacctgactccacacctttgtcgaccgggacagggactgggggttgcaccccagatcagaaagtcagaggtggccctccgaatcggcgcggacttccgaggaacctcagccaattctcgacccccttaccacctgcaaggccttaggaatcggctccagaaagctcgagcttatctgcgtgtttcgttttaaaaatcacttctaagataaaacctaactaggctttccccttcagactttcagtaactcctgtttggcaaattttgacattcactctatccttcgtctttgtaaggacatatcaagacttagaaggctttgattacacatacggatggcatgagtcgtgatataaaatagtattgttttcacgtgtacttcgaagtcatctcatttgaaattaactgtcataattgactatttggaatattcaacctaaatactacccgctgctgtggtgacggggggtggaggaagcgtggtggaaccccaacacctagtgaggggtggctgattaataccacggctcacaacataacagagcggctcattccatgaacaaccccggggggatttcgaattctatcatctgggcaaaagatgt

SEQ ID NO: 2519 - DNA, 6000 bp, Homo sapiens
acagagtgaaacccatctcaaaaaaaaaaaaaagcaacctgattgaactagttaatgccaatgtgtgaacaactatcaagcactcctacctcctagagccatttgcatctttaagaaatgatacttaagaatctttggtggaattccaggcaataaaaacaaggcctttgtgtatttgtttacataggcaacttataagtcaagagtcgagaggatgaggtctaccaatactatgtttccccttcagacagtttgtgactttggtaagtgtatttctgcatcatactttacatctagttacctctattattacaatcttgtttatttggcatttgatggaccaaaattagctacaaaatcctttttaatgaaaccaaagtaggggattaggccgggttacagtaatgcctgtaatcccagcactttgggaggctgaggtgggaggatcacctgagtccaaaaagttgaggctgcagtgagccatgatcatgccactgcactccagcctgagcaacaaagtgagatcctgtctcaaaaaaaaaaaggacagaaggtaagaaagaaattaaactaggggacttaaacacctacttcttcaaaaagaatttaaaaatctaggtataagaaatcgttcgattatttcatctctttccagcttcctttggatactaatctagttgaattactctgtatagttagttacagcatatacgtaactacgtttataagcagaactattttttttaaaaaaatcacaagtaatgtatatttcatgatttggattaaataaacaagtttaattgaaaaattatcattgtcataggtaatatttattaaggatttaacttacaacaaccttatatgagatactattattattaattttttgaggcagagtctcactctgtcaccctaggctggagtgcagtggcgcaatctccacttactgcaacctctgtctcctgggtccaaacgattctcttgcctcagcctcctgagtagctgggattacaggtgcatgccaccacacccggctaatttttgtattcttagtagagacagggtttcaccttgttggccaggctggtcacctcaagtgatccacctgccttggcctcccaaagtgctgggattacaggcatgagccaccatgcccggccaagctactattattatcatccctatgtcatagacgaagaaactgaggcacagagaggttaagtaacttgctcaaagttccccagataataagcaacgatgccaggatataaactctggcagtttcatgttccctcccggctgcttcccacctacttttgattcagtagatctggaacagggccctcggaattagtaaagtccccagctgattctgaagcaaagccaggtttgagaaccatcctgctaattcactttgcgctggatggctagttacttacctgtgtcttagaaataacagttcatatggttaatcaagtaacacctgtaccctttcatttcagtagtaagcaaatttgcttggaatctgcttcagtgttctttgggcacagtgctgagggggcaggtgaaccttaggaaattgtctctcaccccacagcacagaccacctagtttaaaggcacatgtgaacaggcaatcagggagagatcacaaagcttgggtagaaggtgtaaggtgggcttcctgggagggggtgtgagctggatcttgaaaagtgagcatgatttggagatggaggaaagaagtgggaaatggtatctgttaagggaacaactgaaggaggccctcataaatggcgactcacagctcatctgtgggccagtgagtacaaccaacaggaccggatggcattgagagttccttctgggaagtggcaggaaataaatttggaaatgcaagtttggacaagatctggtaaaccttaagtgccaggtccaaatttggattgaacactataaacaatatggaaccactgaagcttgaaaggacaaaattataatgatgaaggtatcagtttagaaggaataatctgccatcagtcaggacacaagtggaaggataaagagataagaaccaggaaaagcatttagaaggctaaaggaccaacataagtgtgggagaatatcttagtaaaggagtggatatacacagaatcatgagtcactgggtcaggttatgccactgatcaggctgagtgatttggagcaaattgcctaacatctctgagccttaggttttttcattgaaaaaatgggtatgatgatgataatgactgacccaaaagaggcaaacgatttctctacgatggtgacagctctgggatacaaggtgaacgggccaggattttgagtctgtttccaggtctgtatgaattaaagaatgtgttatgaatggcaacagagacaaccactttgtggacgatgaggaagggaggggaactaatggttggtgaatgttccacgaattacgtgggaattataaataaattactcttcacactcttatgaagtaggtatttttatctcaaattaacagttgaccttactagagcaaaagatagtaatttgagttactggatatgactcaaatttgggtaactagatacaaaccaaggtctaaaatctaaaacttgggcttttccagctagtacatcatatttagatttgaaagttatattttatttcattgcttttggcctaatgttgtagcctgttgagactgttttgaactttgattctgacatctatcaaattaattatccctccaaactttgggtcatccgagagagacatcaattttgctgagttggggggtaaagatggaggaaggatgttttaaagtagaaagagagcagcaggtggccttgacttgtgaggtaggcggcaaggttatctgcgcaaagtaaatgcaatctggatgttaagtggacgtaaaagtcgatggaataaatttgctgctaagaatgatcgtgtaggcaggtggagagtaaagaatagaaaggagttaagaaccaggaatggaggcagtgagaagagagagggtggtgtgggtggaccaaatactgctattaaggaaaaagagagggtggaggaaacaaacaatacagggaaggttgacccactcagcccttctattcagctggaggaagtcacagaaaaggaggctatattgaatggtaagattggagaagactggttagggaataggaagataagctgttgtctaaaaaacgcagtctccagtaaaaggaagaaattgggacatttttttaaaaccccacataggtacactggaaaacatgggccacagggataaaccttccatttttacttccaaccttaccatgtgctcacaaaaaaaggtgttaaatacatgtaagttttgacgaggttatttaaaagtgtaggatataaaccaagaatttttcacaccccaaaaccccgcacaaattaagggattacatatctgagtgacaagtacatacaaacgcattacttctagagatacttagatgtagataaaagaccacatttcaatagaaggatcacacagaccagtgggatgtttcttctgagataacccactttatgcaggaaacagtgtggactctggggacggcctctgctctggctgaggatttctgtcccagagcggtacaggaatctgcgtagtgttttagtttggagaaaacaggaagttacactcatcacatcttttgcccagatgatagaattcgaaatccccccggggttgttcatggaatgagccgctctgttatgttgtgagccgtggtattaatcagccacccctcactaggtgttggggttccaccacgcttcctccaccccccgtcaccacagcagcgggtagtatttaggttgaatattccaaatagtcaattatgacagttaatttcaaatgagatgacttcgaagtacacgtgaaaacaatactattttatatcacgactcatgccatccgtatgtgtaatcaaagccttctaagtcttgatatgtccttacaaagacgaaggatagagtgaatgtcaaaatttgccaaacaggagttactgaaagtctgaaggggaaagcctagttaggttttatcttagaagtgatttttaaaacgaaacacgcagataagctcgagctttctggagccgattcctaaggccttgcaggtggtaagggggtcgagaattggctgaggttcctcggaagtccgcgccgattcggagggccacctctgactttctgatctggggtgcaacccccagtccctgtcccggtcgacaaaggtgtggagtcaggttccaggcaagctgggggtgggggtgcgcacaagggaggggcaggggactgggaccccctcttcttcggggtgcttcgggccgtttctccagaggctggtggtgtccccgacccaagcagctcagccccgctcgcgaggtccgaagtggcgggaacgggtcctccgcggcggtcccaaggcgagggaggctgtaaaacctggcagagaatccggcgcgccgggtcggggatgtctcgggtgccgggggcaggggccgcaggctcgcaggtagaagcttccccacgcgagcgggggcctcggccgcggaaggggcgcccccggggccgccggcagcggcgagcgggcgggagggagctttccgggcccctcccgcgcctcgggctggcggggcgatggcgacgacggtttcccggctcccccgccccggacgccgatggcggtgcgttccggccctcccccaacagcttctcccccgcggtcgccggagccggtgaggccgagagggcggggagccgcgcagggaaggcgagagggcggaggttgcgtggtgcaggcggcggcggcgggaggaggagggccgggcgggcaggggaggaggaggaggcgggcgccgtgtcgcacgcagctccaggcggggcagccccggtagctgagggacgcagctagaccttggcgggacggggctttcgccggggcccaggcccagggaccaggcggaggcgtcgcgggagcctttggggcaccacagagatgcgggtgagtgtcggcagccgccggggccgagaggaggtggcggcggcggcggcggcgcaggcccggccccgagccgcggtgtcgcagtgactcgggccgcgacggccgaaaccaggcgcctggcgaggcctgagccgccgaaacgcggccgggcagaatggcggccgggccgggggactcgtgggcggaggacgccgaaggtggcagaggagcgagcggggccgggccctgagtcaccccggacgggccggggcggccaggcctggactacgcactgggaaaaagcacgattcatcgcgcctggaggcggcggcctggtggcgccggcccctttccccgccgcgaccgggctgggttctcggagggtgggccgacgtgtggcccggggcggctcgggcgtccgcgcctcgcctggtgaggcgacctccgcgggacgccgggacccgtgcccttgccccctcgcgcccacgcttcttcccggcgctgctttccggccgacgcgtgttcccctgtgagctctgggctcaagcgcaggagcagccgcggagccgggctctctcgctttccggttccctgcccgcggctctcgggttccccgcctgcattgttgcgaacgtgcagggcgctattattgggtaacagtcgcccttttgccccgttctcctgggagagcgggccggggcatgcgcgcagggatgctagcccggcggccgaaccggacagagccccccggcgcccgcctatcgctcgctagtcgggccgggccctgcgctgcggcctcggcgcgcccccggtcccaacgggagcgcgcgccctgaccctgagggtagccgtgcgcccgccaggccgctgggacttggggtccccagactcgggggtcgtcgcttttttttcccttaagatctgaaagacccccgtttctgccacccgtgcagt

SEQ ID NO: 2520 - DNA, 6000 bp, Homo sapiens
aaaaattatcattgtcataggtaatatttattaaggatttaacttacaacaaccttatatgagatactattattattaattttttgaggcagagtctcactctgtcaccctaggctggagtgcagtggcgcaatctccacttactgcaacctctgtctcctgggtccaaacgattctcttgcctcagcctcctgagtagctgggattacaggtgcatgccaccacacccggctaatttttgtattcttagtagagacagggtttcaccttgttggccaggctggtcacctcaagtgatccacctgccttggcctcccaaagtgctgggattacaggcatgagccaccatgcccggccaagctactattattatcatccctatgtcatagacgaagaaactgaggcacagagaggttaagtaacttgctcaaagttccccagataataagcaacgatgccaggatataaactctggcagtttcatgttccctcccggctgcttcccacctacttttgattcagtagatctggaacagggccctcggaattagtaaagtccccagctgattctgaagcaaagccaggtttgagaaccatcctgctaattcactttgcgctggatggctagttacttacctgtgtcttagaaataacagttcatatggttaatcaagtaacacctgtaccctttcatttcagtagtaagcaaatttgcttggaatctgcttcagtgttctttgggcacagtgctgagggggcaggtgaaccttaggaaattgtctctcaccccacagcacagaccacctagtttaaaggcacatgtgaacaggcaatcagggagagatcacaaagcttgggtagaaggtgtaaggtgggcttcctgggagggggtgtgagctggatcttgaaaagtgagcatgatttggagatggaggaaagaagtgggaaatggtatctgttaagggaacaactgaaggaggccctcataaatggcgactcacagctcatctgtgggccagtgagtacaaccaacaggaccggatggcattgagagttccttctgggaagtggcaggaaataaatttggaaatgcaagtttggacaagatctggtaaaccttaagtgccaggtccaaatttggattgaacactataaacaatatggaaccactgaagcttgaaaggacaaaattataatgatgaaggtatcagtttagaaggaataatctgccatcagtcaggacacaagtggaaggataaagagataagaaccaggaaaagcatttagaaggctaaaggaccaacataagtgtgggagaatatcttagtaaaggagtggatatacacagaatcatgagtcactgggtcaggttatgccactgatcaggctgagtgatttggagcaaattgcctaacatctctgagccttaggttttttcattgaaaaaatgggtatgatgatgataatgactgacccaaaagaggcaaacgatttctctacgatggtgacagctctgggatacaaggtgaacgggccaggattttgagtctgtttccaggtctgtatgaattaaagaatgtgttatgaatggcaacagagacaaccactttgtggacgatgaggaagggaggggaactaatggttggtgaatgttccacgaattacgtgggaattataaataaattactcttcacactcttatgaagtaggtatttttatctcaaattaacagttgaccttactagagcaaaagatagtaatttgagttactggatatgactcaaatttgggtaactagatacaaaccaaggtctaaaatctaaaacttgggcttttccagctagtacatcatatttagatttgaaagttatattttatttcattgcttttggcctaatgttgtagcctgttgagactgttttgaactttgattctgacatctatcaaattaattatccctccaaactttgggtcatccgagagagacatcaattttgctgagttggggggtaaagatggaggaaggatgttttaaagtagaaagagagcagcaggtggccttgacttgtgaggtaggcggcaaggttatctgcgcaaagtaaatgcaatctggatgttaagtggacgtaaaagtcgatggaataaatttgctgctaagaatgatcgtgtaggcaggtggagagtaaagaatagaaaggagttaagaaccaggaatggaggcagtgagaagagagagggtggtgtgggtggaccaaatactgctattaaggaaaaagagagggtggaggaaacaaacaatacagggaaggttgacccactcagcccttctattcagctggaggaagtcacagaaaaggaggctatattgaatggtaagattggagaagactggttagggaataggaagataagctgttgtctaaaaaacgcagtctccagtaaaaggaagaaattgggacatttttttaaaaccccacataggtacactggaaaacatgggccacagggataaaccttccatttttacttccaaccttaccatgtgctcacaaaaaaaggtgttaaatacatgtaagttttgacgaggttatttaaaagtgtaggatataaaccaagaatttttcacaccccaaaaccccgcacaaattaagggattacatatctgagtgacaagtacatacaaacgcattacttctagagatacttagatgtagataaaagaccacatttcaatagaaggatcacacagaccagtgggatgtttcttctgagataacccactttatgcaggaaacagtgtggactctggggacggcctctgctctggctgaggatttctgtcccagagcggtacaggaatctgcgtagtgttttagtttggagaaaacaggaagttacactcatcacatcttttgcccagatgatagaattcgaaatccccccggggttgttcatggaatgagccgctctgttatgttgtgagccgtggtattaatcagccacccctcactaggtgttggggttccaccacgcttcctccaccccccgtcaccacagcagcgggtagtatttaggttgaatattccaaatagtcaattatgacagttaatttcaaatgagatgacttcgaagtacacgtgaaaacaatactattttatatcacgactcatgccatccgtatgtgtaatcaaagccttctaagtcttgatatgtccttacaaagacgaaggatagagtgaatgtcaaaatttgccaaacaggagttactgaaagtctgaaggggaaagcctagttaggttttatcttagaagtgatttttaaaacgaaacacgcagataagctcgagctttctggagccgattcctaaggccttgcaggtggtaagggggtcgagaattggctgaggttcctcggaagtccgcgccgattcggagggccacctctgactttctgatctggggtgcaacccccagtccctgtcccggtcgacaaaggtgtggagtcaggttccaggcaagctgggggtgggggtgcgcacaagggaggggcaggggactgggaccccctcttcttcggggtgcttcgggccgtttctccagaggctggtggtgtccccgacccaagcagctcagccccgctcgcgaggtccgaagtggcgggaacgggtcctccgcggcggtcccaaggcgagggaggctgtaaaacctggcagagaatccggcgcgccgggtcggggatgtctcgggtgccgggggcaggggccgcaggctcgcaggtagaagcttccccacgcgagcgggggcctcggccgcggaaggggcgcccccggggccgccggcagcggcgagcgggcgggagggagctttccgggcccctcccgcgcctcgggctggcggggcgatggcgacgacggtttcccggctcccccgccccggacgccgatggcggtgcgttccggccctcccccaacagcttctcccccgcggtcgccggagccggtgaggccgagagggcggggagccgcgcagggaaggcgagagggcggaggttgcgtggtgcaggcggcggcggcgggaggaggagggccgggcgggcaggggaggaggaggaggcgggcgccgtgtcgcacgcagctccaggcggggcagccccggtagctgagggacgcagctagaccttggcgggacggggctttcgccggggcccaggcccagggaccaggcggaggcgtcgcgggagcctttggggcaccacagagatgcgggtgagtgtcggcagccgccggggccgagaggaggtggcggcggcggcggcggcgcaggcccggccccgagccgcggtgtcgcagtgactcgggccgcgacggccgaaaccaggcgcctggcgaggcctgagccgccgaaacgcggccgggcagaatggcggccgggccgggggactcgtgggcggaggacgccgaaggtggcagaggagcgagcggggccgggccctgagtcaccccggacgggccggggcggccaggcctggactacgcactgggaaaaagcacgattcatcgcgcctggaggcggcggcctggtggcgccggcccctttccccgccgcgaccgggctgggttctcggagggtgggccgacgtgtggcccggggcggctcgggcgtccgcgcctcgcctggtgaggcgacctccgcgggacgccgggacccgtgcccttgccccctcgcgcccacgcttcttcccggcgctgctttccggccgacgcgtgttcccctgtgagctctgggctcaagcgcaggagcagccgcggagccgggctctctcgctttccggttccctgcccgcggctctcgggttccccgcctgcattgttgcgaacgtgcagggcgctattattgggtaacagtcgcccttttgccccgttctcctgggagagcgggccggggcatgcgcgcagggatgctagcccggcggccgaaccggacagagccccccggcgcccgcctatcgctcgctagtcgggccgggccctgcgctgcggcctcggcgcgcccccggtcccaacgggagcgcgcgccctgaccctgagggtagccgtgcgcccgccaggccgctgggacttggggtccccagactcgggggtcgtcgcttttttttcccttaagatctgaaagacccccgtttctgccacccgtgcagtattgtgtagcgcagacataagataagaaagagaggaatgcttgtagacattccttgaaatgaatccccaaagttagggttttctccctggctggctttgccaaaaagaggattctcttttccgattgggtcactcttggttgcttctggttcgtagtaggggttagtggtaagtgcgcaaatactgaattgcagtctacttaaatatttgtttgctctgtgtaattgctctttcctgtagtagcattaaaatcgtcaaaagttctgagtggagtaaacgatcacactttttggaatgcacttaacgaagcggcagaagaggaactagattccttttttacttcaagccatgagcttctaggacctaagcatagcttaacgcctcgcagaagtgtgtgcagttttaagtttaacacttcatttcatggtgcacccgaaaatgtacccgattttctgaaatcctggagagtgtattacgtagtaaaatatgtaatgatgtttaaaatgtaaaaccagtcattctgtttgaaaaagatatttggagatgagatttttctttgtttaaagaaggtttgtttttggatattgaaaaatgttttacttgaaggttctatttgttgttttccatggtgagtcgaaatagttgcgttacatttcaaattccaaagcatgcaaacacaagactggctcgctttaactctattaatgcccatttttggaggtttcaggagagtgttccttaagcttgagagggatggctgaattgctttctaaatatgttaaactttttttctcattggcttc

SEQ ID NO: 2521 - DNA, 6000 bp, Homo sapiens
acaatgtgcaaaaattctgcatgctgcaaaattgttttacctaatttatttttgcaagctaattgaaaactttaaaacatcttgctaacagactgtatgtagttggctggccataagttgtgactagtgtattattttcatcttccccaaatggtgtttctaaggtcttgctgaagccactgttctttttattcacaacacatcataaagtgaatgttgtaattaattaattattctttagtactaaagtaagaaacagtatattgtgctaagtaaaaaggttgatgaccatgccatcagtgatatttttgcattttaaaaaggtcaagtaccatcatccaaaatagcttagctttacattttaaagttcatttcatattatttaaatttaaatgaacaaaaaattatttgtctcaagagatgatccggtttttacatggcttgtttggtcactcgtgtaccttatacatgtggagcttccagtctgttgtagccatttagttttcattgaagacactgaggctcagagaagccagtgggctcgccccagcccttcctgcagccctcctgcccccaccttcctctttcgtgcttctctgctgcacacacctaaatggcagtgctgccatacagtaccattaacgtttttaaagggtaaggtttactttgtagatgccattaatccctaagaaaaaaaattccggttagtctccttcaaataaaaatttgtgactcaagttgtggaaatctggataaaaataattttcgtaaatgcacattttcttgaaatattgttatactattgtacttaccttatttttacagatcaccacaaaaaagtgtttttatggtttttaagtaaatttaaagaaggaagaagatgcatgtaaaaattgaatagtattagtctcattgtctgaattgctaagtaggacatgttgatttcttttttttttgggaaggggtgcggcggagtcttgctctgtcgcccaggctagagtgcagtggtgcgatcttggctcactgcaacctccgcctcctgggttcaagcgagtcccctgcctcagcctcccaagtagctgggactacaggcatgtgccaccacgccccggctaatttttgtatttttagtagagacagggtttcaccatgttggccaggctggtcttgaactcctgacctcaagtgatctgcccacctcggcctcccaaagtgctgagattagaggtgtgagccactgtacccagccaatttttttttaaacaaatatcaaaaatacagatgattttgtggtatatttcttaataaaaaggaattacccgcatatcaaatgttcagggtactttttttgagtgtgtttgcatatttaataccatgaaaaatgttccagtttaatttgagatgaaagaattattttactatattcttgtgagtttatatatattagcatgtttttgtatacagaataatttaaagaagccatctaaaatcacatgtgtcaatgtattttaatacagtagatgttattcaccgttatttttaatttataatgtgacaaattagtcatcttaaagctttagttaacttgtttttaggatggagaagatttgatggatgagagtgtactgaaattctacactcaacaatgggaagattatcgattttcaagcaaagtgctgaatggaatttgtgcctacctcaatagacattgggttcgccgtgaatgtgacgaaggacgaaaaggaatatatgaaatctattcggtaagagttttgttttaaaacgttttaaatttgtttttgtttttgttttttttaatggcaaattgtctttcagcaagagaatctaggcaaatattaagcttttttcagaatagtaaactaattttcattgttttatcaataaatgtcacttaaatattttttagcaagaaagtagaagaatgggtaaattggagttctaaaatacaatttgcccatttctgcatttgctttttaaaaatttcttctttaattacctgaccctaccatcacagtttgcctggaactgcctgagttttcgcactgaaagtcctgagtcctggtagtcccaggcaaatcaggtgccatacctgagggcgagccctgaggattagccctcccatgctttagagtctgggaaacgctgcttcatggagaggaccctgaattaattaattactaaatcaccctcagtaatatacgtttcttcagtcaatgaaaggggtttttttggtccattggttttcaaagtatggtcctgtattagtctgttttcatactgctgataaagacctacctgagactgggtaatttataaagcaaaggaagtgtaatgggctcaacagttccacgtggctgggaaggcctcacaaccatggcagaaggcacatcttagatggcggcaggcaagacagaatgagagccaagcaaaagcggaaaccccttataaaaccatcagatctcgtgagactattcactactatgagaacagtatgggggaaccacccccatgattcagttgtctcccactgggtgcctcccgcaacatgtgggaattacgggagctatagttcaagatgagatttgggtggggacatagccaaaccatatcaggtccccaaacctgctctgtcagcatcacctggggacttgttagaaatgcacattctcaggcctcatcctagacttaaagagaaactctggagatggggcccagcaatgttttaccaagctctccagacaattctgatgcatgctccagtttgagaaccagtgttctagagcagttaagggaggactcagaacagtctgttcataggctgtcagatccacacagacaatgccctttaaaactagttttgttaaaatgtcagattctacataaaggagttaatcaccatatccaagaatgttgctataatagcagtactttgtagcttcacttttgacaaatttaaaagaaaaacaatgctggttgcagtggctcatgcttgtaatcctagcactttgggagaccgaggcaggagaccagcctgggcagcataatgagacctacaaaaaaaatatccaggcatggtgacgcacctatagtcccagccacacatgaggctgaggtggaagcatcacttgagcccaggaggtggagggttcagtgagccatggtggtaccactggactctaccttgagtgacagagtgagatcatgtctcaagaaaaaaagaaaagcataatgtatcccagatgcatgactagtttttattgtctgtatagctccagtttctataccaaaattgttattgcttcataatgatactttgctatgtagttaatccagttctaacaaaactttctaggtttagttgtttgatttggggtttttgtgcttcccctttaacattttatttatttttttaactgacaaaaatgtgtacaccatgcctttttgaaatatgtgtatattgtggaatggctaatgggattttttctttttcacatataaatgctttcttgagactcaaaagttgttagtgtaggaatcaggatggtcttggttcatttccttttggaaacctgcttgacctaaatgtgtaccttacagtaacatcacagactcctaaaaatcattacggtttttaaacttttcctatactgtttccaacaacagttaaagaaaatgtaaataaagaagttgagctgacaaatgtctgtgcttggatacctcttgaagttgttgactctagagagtggctttctgcttttgtcctgatagcagattttgaccaacttgtaatctagaaattttgataaagtaatttgagatttaggttatttcctatgacttcaatcttggaaaaacatggtaaaagtatagacattttgtacttttttttctccagcttgcattggtgacttggagagactgtctgttcaggccactgaataaacaggtacctactggtgtgagcgtgtgcatgttccttttaaaatcccttcgcagtttcgttgcttagcttttgtctcgtcactccttcggattatcccatcttacattgtttagtggctgtgaatgtttaagggatatgtagtaatatatatcatattctataacctgtgtaatatttttctacatcctttctaaaggtaacaaatgctgttttaaagctgattgaaaaggaaaggaatggtgaaaccatcaatacaagattgattagtggagttgtacagtcttacggtaaataatttccctttagtttattcaaagttttcacatcaaatggcaattacaacaatgctctaacagatgtcatttttaaaatattttaatattataaaggatattgttagcatttacgaaggtacttacatttctttttaagtcagtgtgactttatttgtttttatccatcataaaagctgtttgatccgtgtgccttaaggaaattttgatgaaatagacattttgattattttcttttctggtctcatagtgaattactggatatgttagagtgtgagctcaatgataaccagaaatctatatcagcttgaaaaattgagattgagaaactgataaagtaatacaatgtcttaaaaacttgggtagcattgtatttctttgcaaatttaaaattagttatttttattgcttttggaaatacaaaagttctctaaaggaacttcataattttgaagcatacctggccatgggtcagaattacttgctttttatacgtcttggatttttttccttttttattttattgaaagagtgtactttaatactagtgagtaagagttacttatgtcctgccatttcacatttaccttttaaacataacttaaactgaatgctacacctaagtatattctgtgaaatataaccaaaaaaatagggtaattgaaatatagctcatattcatttctagtggaattggggctgaatgaagatgatgcatttgcaaagggccctacgttaacagtgtataaagaatcctttgaatctcaatttttggctgacacagagagattttataccagagagagtactgaattcttgcagcagaacccagttactgaatatatgaaaaaggtaagcttaaatatagtactttaagtagacttaagttaaagtcattgctactcaagtgagttctttttagcatatacagctttctttacaagtcatttgttgggcattgtttttctagagtgtttttatcaggtgcaagtgcttctcctaattctccaaggagcttctataaattaatttggtaatcgtgactgagagttctccttgctgttctaaggatataaccacaatagctacatgaattttttttaactgtttattgtagaatgtggatttatataaaatgggcatcacagtcatgtcaatgagaaaattttaagaaacaaatattttcagatttgcaaactttaattttttgcttctaaaatatccctaagaatctattacatagctttcatgattatattagaggaaaagttcttctgaaactaggctttaaattctaatatgagaggacggctgtcctcccgcttcagcctccagaagtaatgggattagaggcgtgagccaccacactcagctaattgttttatttttgtagagatagggtctcgctatttttgtagagataggttgcccaggttggtctcaaactcttgggcttaagtgatcctgccacctgggcctccgaaagtgctgggattacagatgtgagtaaccatggcccgctgataataaagatctagtagaattactctttgttctctttcttagaaatatagatatcctggctgggcgtggtggctcatgcctgtaatcccagcactttgggaggccaaggtgggtggatcacctgaagtcaggagtttgagaccagcctgaccaacatggtgaaaccccgtttctactaaaaatacaaaaaaatttatctgggcatggtggcacgtgcct

SEQ ID NO: 2522 - DNA, 6000 bp, Homo sapiens
tttgagaccagtctggccaacatggtgaaatcccgtctctactaaagataaaattagctgggtgtcatggcatgcacctgtaatctcagctacttgggaggctgaggcagaagagtcacttgaaccagggaggcagaggttgcagtgagccgagatcatgccactgcactcctgcactcctgccagggtgacagaagaagaccctgtctcaaaaaaaaaaaaaaaaaaaaaaaaaaagaagaagaagaagaatgaggaaagagagcacttactgaattgttagtgtttttgtctcagtattttaaactttaaaccatgctccatctgaagaactgttggtttctgcttattgaaagaggtgagatgatacagtagaaaaggcctattaagaaaatgcaagattatttctaaatgatttttgagatctaacatttatgtccccctttttttgcctattaatatcaaaattaatgttttcccctgagcacgcacagactggtagtggtgggaacctcagaaccatgctgggtggtggggataccattgagcaccttcccagataatggtccaagtgcatggtctgcacacatactctctatggttttatttctgaagcctttgcttctctgtgttttgcatggagataatgttacttgaagaccaagtgctgatgctaatgggaagaatgacactgcccccaaacaactgcacgatatgtttttgttacttagtggggcctcatttctctcccctttttaaggaaaaattatctagaggtaagactgtggacagtgtcaagccaggtcctggtgtcctgaggttgatctgttcttgttgactgcctgtcctcagggaactctcctaaagctcttgtaattgatctgctctctttagcccctggctggatgaaagatgtggaggctgaatgtaccctcagaggtagtgtaggcaagagcagctttccacggactgtcagatctgtcccctcagcctggagagcaccagtttatgtagatgaaatggtgaaggatgctcccctcgagcctgtagcaccccattattcctctttagcaatattcttgaatggtgctgggttactaggaagtgttcgagtgttaaagtatcacttagcaccacaactgatccccagaaattgtgtgtaaatatataccagctctccatgagatgatgccctcacacctcttgtatgccatattcggtttacctttttaagaaagagtaagataaaaagttatgtgagactcttaacgtgattttctcttcgtgaaattggcctttagaattatccttttagtggaaatgtatggaataaaaggtcgcaattcagttgtgattatcattatgttcctggtttagccatttaggagattatttgatgaatgccacttcactaggtacttagaagtacggcagtggtagcaggcagacacggtcccagtgggcaacactgagatgtacccagcaaggaattggcaggtgtgattagtgttgggatggggtttgggaagtcttaacagggcagcctcggcctatcttggaaattcagagaaagcatccctgaaaaaagtgtttgagatggagaaaagagttagagctagctaggcaaagggggatcccagacacaacaaagcccctcagtgggcgtacacacagcccattctaagaacgaagaaggcagcatgggctggccagaccagggaaaaccttgaaagctgtattgatgatattggcttaatcctgagggtgcaagaggaaaccaacggagagtgatacagtcatggaatcgacgggatatatgtgcttgctgccatgtagaaagtgggtgaaaaggaagaagagttgttacaagttgtgatgattaatattgagtgtcaacttgattggattgaaggatgcaaagtattgatcctgggtgtgtctgtgagggtgttggcaaaggagattagcatttgagtcagtgggctgggaaaggcagacccaccctcaatctggtgggcacaatctaatcagctgccagcgaatataaggcaggcagaaaaacgtgaaaaggcgagactggcctggcctcccagcctacatctttctcctatgctggatgcttcctgccctcgaacgtcagactccaggttcttcagttttgggacttagactggctctccttgctcctcgagcttgcagatagcctattgtgggaccttgtgattgtgtaagttaatacttaataaactcccgtatatatatatatctcctgttagttctgtccttctagggaaccttgactaacacacaagtataccagttaggttagttaggtttgttgtcgtggttcagatagtgatagtggcccactggagactgggctggtcgtgcggggaatggagagaagaatgatgcagagacactggctttgtaatggacaggttttgtgtttcgatatttgttaaaactgaatgatgagtacatggggtaagttttactactctttctaattgtgaatatatttgaattttttccacaataaaacgttgaaaagaaatggacgggttgtatggattgagtggattcacaggattcatgagtcggaaagcaggaactgagtcctgggtgcctggctcgagccgctgggtgagtggtggcacttgccgagaagagctccagagaacacaggactggggagcagatcaggccattcgtgacataggctttggaaatcccatgatagcccagggcaggccacacgggctcacctgggggaagtttggtgtggatgtgaatgtgtccgtcctaggtataacaacaactgaaatcatataggagttgaatgagcccttagggacaagccctgggagatgtcctgtttcttacatgtgaaaagctctcgtgaatacacagagggtcctgaatcaaacccattactactttatttttttaaacctcaaacctttgttctttgctttcttgaaaaaacatccatttgatccagctgatctctctcctctctgttttataacctgtcttcgttgtttacctcctgaatgctaaatctactccccttttgaacatcttttctctatttgctgactagttccttaaaattctctcccgtatattattctagtgtgttgtctgcttcttgaccagttcctaaatggcttttctctgaacctcaaatgctaaattcacattttcaaggccagattttttttttttttttttttttgacagagtctcgcaccgtcacctgggctggaatgcagtggcgcgatctcggctcactgcatcctccatctcccggttcaagcgattctcctgcctcagcctcccgagtagctgggattataggcgcctgccaccaccctcagctgatttttttgtatttttagtagagatggggtttcaccatgttggccaggctggtctagaactcctgacgtcatgatctgcccgcctacgcctcccaaagttctgggattacaggcatgagccaccgcgcccggccaaggccagtgttttgacacttttcctttagtaggttccatgcaagtcctcccatctcaccagccagactgctgtagttgaaagaattttggaattggagtctgaagacttctttactcctggagatttggctttccatgtgagaagttgttcctggcattccttgggaaattggtatttttccaaattacaaatctgaggaaaaatggccaaaacattttgagaaaatacagaaaagtattataatttggaaacgttatagtcaacatagagacatcactggttcagaggagtccaccaatgacaagtcgcaagcaagagcgtgagtaagttgaggctggcgttttcgggaatgagggtgaaggcgtgtggcagggaagccgtgcaggccgagtggtcaggctgccaggtgggcaaggccttctaagtgtggatctgtagcccctctgctgctaagggtgaagtcattcttgcaaataaaataagtattaatatttatatacataacatgctatatataaaccctgtgaggggtcttccaaaaaaatagcaagttttggaagcaaattgagtccttcaattggcagttgtgacacgcagttctttgtagggccgttaacttgttaaggatcctgcatgttaccgtattcgaaaactacccaatagcgtttctagcattttccagtgtttgaatcctcgctgtaggctggagcactttgtaaatactgtaacagaaggaaggcagagagaagaatatgtgaatgttctggaataatttgacatgaaatctgaaagtgatctaaaatctgaattggcagaagcaatatctatttcagtgacaaaaccacaattaggtcaagcagaaaatattttcattgtttaaaagaagcaagcttatatgaagtaagatatggcccaacttggaggtgcttttggttcactctgaagattaagaccatccaggcaaagtggaagaagtttccctacgtctgggatagccatgaaacaaagagcaaggctatctggtagtgcagttcacgctctgtgtgttttaacatttttaagatggtaattttaaaatattaaatatctgcaatactgcctttcaatattaagtgatttttatttggcaattattttgcattaagttcccttttaatgttttctcttatcaaatgtttatgtcaggtggagaccatatttatatcttattgaacttagcacaatatattcataataaaccttgcatttattatatagagctttttttaacaggaaacttctgacactcttaagtgtaaccctgttgcagaaaaatcattcatccttactgatactcattgttatttaaaaacaagtaaatcaaatgttataaaaaatgcagaataggtagaattgggaatgctgatttctggcacctgagccctgcagattaatgtatcgtgatgtggaaacatgggcgtgccgcggcgcctggatctgtgcttggctgggggtgacccggagctccctcccaccaaccttcccagccgggctccctcgcagcccggagccaagcctgtgcctgccaccatttcctggcagtgtgcttagctgtgacagtttctacgtctgtagaatggggatgaaaacagcacctgctgcccagtgtgggctttcgcggtctcatgaagggtggtggcggcgtgcgctgcatgcctagcagcagcgctgtttttctcattagcacttagctccgtctcctttgccttccattgtcgccgccttcctttggccacaggagcctctgcggccagccttcccgttgcatttccatgttgttccttgttccggggaggcccctttgctgccctgcgccgcgctccgcccctcttcccgtcctgcgatgaggccctggcccccggcatcgccacgcggatccgcgcctctggtttgcagtgggtgggggccgcagtcagactcccgccctgagccccgctttccctcgcgttgcctgcccagccgggctgatgaccgacctcggcggctaaacgccttctccagctgaaacagagtccagagttccactgtttaacaaggaggaattggcaaagcagaactgtcacttggaaaatgctgttttcatgatctctttgagttttcactgtttttaatgcaagctcggaatcaatatttagttttgagtgtggagaatagattgttttttcttttatatatataaacaaaatgtcctatgtgtttcaacgatggtaccaaaagtatttcttgctcttatctcttaactttgaaaaggtatctatagcttttagaatattttgtatgctagtacatgcattgtataccttaatacacaatttaatccccaataaccaacttttgtttctatttctgcccccatttaaggaccccaaaatgtatgtacagacagtgcttgatgttcataaaaaatacaatgccctggtaatgtctgcattcaacaat

SEQ ID NO: 2523 - DNA, 6000 bp, Homo sapiens
ggcagaacaccggataagagaaggtgagcgggccagggggctggcttctcccctctgtgaggaaggctcctgtccatctcctggctcccctaagcgcccagccccactcccaccagaagcagccccgtgggacgaggggacggggagaggcgcagggagcttgccgccatggggagagagggtcgcagacccctcgcacctgaggccgcaggaggaagtccatggccggcaggggtgaacctgagaaggagggggaggggaccagcctgtgccccttcccagtcacgtgcccctctgggccagtgtgaccaatagcggagctgattgtggcacggggttaatcattaagactccttaggaaaatccaaagggggccatgtggagcggtggccacgtgggggcagggaggggcgggcctgggtggcacgtgggcagggggcgtggccagtcgtggcaggcgagctccgcccagaaccctggcccgcgtgcagacttgacctgcgcctctaaggccagccgggtctgagacgggttgctgggtgagagacccagggttctcaaagttcctcaaccgctgaggctaagctacctaggtcttcaggtaacagcctcaactccctccccaggactggaagacgtctgatacccccactacccatccccccctacgaccatcatgcaaagtcagggtagggatggcagcatcctcccagtctccacactcacacacgctcacacccctggttggcgaggacccttggccggagcacccaaggctgcccagggagggaaggttgggctggcgacctgggggccacactcaccgtacagaaagaatctgcgcccttggcggggcgccgaggggcgctgctcatggccgaatcttagcccttttcgctgtcgctgcggctttcagggcaacgaggcggaggcataacctggatgggggagaggcctgatcaccatcgagagccctgggagggcaggagccaccacgcgcaggctgcgctgctggggatcctcctggagtatgaagggcctcagagtggcccttagcggcagccacagcacagaggagagttatttataggaagaaaagagaagaacaaggagacaggagaggactgaggcgaggggggccgaaaagggccgagaggctgagtagagggaggaggagagaggaggtgggaaaggccgcaagaaaaatgagggagaaaggagtcaaggcccaggcccggagagaaagcaacaaagatgagggagggagtgataatgagctggggaaagaggggagtgaaggcccaggcagacaacggagcctcgcagggtcagggcacccaccagaggtgggcctgagaccagagagggtgtggtggggagggtgagacaccccgtggagccggggccgggctgccgagacaggaagcagacgaatggaagaactctggagagagcccaagatgcccctgcagggagggggtgccccctccccagtacaggccggcaggaggcttccctcccccaggtccttggggaccggcaggagggaagcaggctggctgggtggagggcaggagctcaactccactcactcactgagagagaggaaggcacagaaggtgggcatgggctgggcagagctttataatgggggaggggcatgtgatgggctgggagggggtgggcaccgcaaccttgaggttctgcctctgaggggcagtctggatcccgcccctctagagcctggagccaggaaaatctgagtggcagtgctgccaccctcctgactgtgactgtagggagtctggggaggacactgtgtggtgggggcagagaaggagctgcaggagggagcccaatccctgcaaatagggggcgcattcctagcgggtcagcacagggggcacccaagactggcaaaaagtgacggtacccaacaacccatgctcccagtgtgttgctggggactgggggtgcctgacttaggagtaagacaagtcagtgtagcgtcaaacaatataggtctgggggggtcacccaggatggggagcctggcaacacattcttggcaagcactccaacttggctaaccacgctcttcccctccccctcagcaggccttcagccagggcgggtggtgtgggtgagcgtgagtgcacccagtctgggaagggtgtggggagagtccgcccagagcacctgcaggcgcccactcccacctcaggctgtgccctcgtcgcgctcctccacactcctctgcaccccctcccctgctgtcccagaacacaaagcagcttctgtccagagcatcggtgccgataatccgggtaggggcacattcccgggaccagccccgaccggcccagaggattagtatctctccccttgaccaagggattagcacctcggacccccacttgggcattaaccaccccccaagtgaactcgtaaattccgcagctcttccatgtggggctggcgggggaaacgaagggggataaagtagaccctgggtttcaggcagtgccgcctctcacacccagcacagaacttcccgcctggacaaaccgaccccgggagtcaggtccaactctccgggctcatctttcccattcccacccagctgctccctcttctgtctgaccccttgtccgaccttacccgccacccgcctttcctggcttcgcctctcaacccggagattggggatgggggccccgggcaacccccagtctgggcgccccggacgggactgaaggactatgcgggggggccggaggggaggggtggtctggagccagccggggagtgggagggccggcggcgcctcggggagactaccccctcctggtggcagggggcgcggcaccctggctttagggaactctgagaaggggaccccggaatgcccgcttccgaccagcactccatccgcctccccatccttctccccaagaccgcggttccccgcgccccagtctccgccctttcctccacttccactccctccccgctcgagtcccgagttcccccctctccttccccctcccttcctccctctgcggccctggccgtcccccgccaccacctctccgcctacccgctcgctctggacttcgtgccccgggggtctcggggtctctccccgtcctccggcgcactcgcgcgctcccgacgactgccccgtgcccaccccggggcgcgcccccgccgctcccaacttctcccaactcaactttcccccgcgccgcgggcaggccagccccctgcgtgcgcgccccccggcgcaccgtgcgcggtcccgccttcgcgggtggggaggcgggagcgggggccggggcgggggcgcgcttccaggcacagcccggcaccaggggccgcccccgccgtccctctgccccaagcttctccactcggggctcgggagccccgaggatgccgtcccttggctccattacggcacctctgagtgtaaaggagcccttctcacgctagggatcccaggcagcaaaacgcaggcacaaggaaattcggggaagtcgaaacataaacgtatcggggttgagattctcttgcccccctcaataacccccgtgcctccaagaaagcccctgagggacgggtggcgagtgggtgagaagggtgacaggggctggaggctggccgcccggtaccctgagctgatctgggagagggtaacttgttagaggctctccacttccagagagggacagagattcgctgtgctggcctccttcctcttgaatggaacctccacactgaaccgaaccctaggcagagccatcacttatcattcaagacctttgtgtgtagttcttttttgcccaacgaaatcacaaagtcttccagataaggaatacactttttgcttcttttcccttgtgtatgcaaaagcattcagatagaaacgagttaattaacacgtgtttagcagcaactctggttccggtgctgaggagtgctgtttgggatccttttccctcggtccatagccctcaagaatgcaatcatgagacaattagagaggcagcgtaagggaatctataatcagctcctttaaggggtgaggcagaggctgctgcaagttgagcatcggtctgtggtcttgtctgtggagggggttaaccaacctgcctgccacaccctggctgactccagtgggccctgttccggagactggggtctgagggggacccccagggctccacccagttttcctcagcatgtcagagttcagcggctagagtcgggtgggctccgagacaacaaacggggctcagcagagagggggtctttggcgtgtgtccctccactaaaatccagcctcgaaggggcacagctgttctcccagccctgcggtcagctgttccctgtgaggtcatcatcgctcacaggcattccccagtcaattctggggtcactaggtggcttggggagaggtggaaacccgtgctgaggtcgtcaagaggccgttgggaacacaatgccaccaaccaggtcagcgctgggccgccagtgcccgggatctaggccgccaaaccccaaacccctaaccgagagcgctccgcccccatttccgctgcattctggaacgcgtagtcccggagcggcccttttcaagagggctgggagcacataaaaggaataacaacagcggggcacactgggaaccacggcgccgcggcggggcgcccggaaaacggacacgcgttgcttcctgggacttgaagtccaaggtttgcctccgcggtagaaacggagccctggagtcgagtgctgcagagagcgtgagcgcagacggctgggggttgtagtcttcttgtcctcggtctcgggcattgcggggagacctagtcgttttaggactacaagccccagaaggccctgcgcgggcagacggggcggggctggaggctcaggtgccgcctcctctgcaacgccggggccagagtcttaaaaccgagggcccgcaggggtccccgcggccgccgcgatgcagaaatacgagaaactggaaaagattggggaaggtaatggaatctcgagatgttcctgcaagagctcctctgcagatccttcggcattccttgaagccctggctcccttaccgtcagcaatgcctacaggctccgatctcagcagcggctgcagccctggccccctagctcagcactccgtgcagacaccagtcttccccgtgttagcatttcccgcagggctctcactccaaccttagcgttcccagtagacccgacctcccaaccgcgacacttcctgaaatttctcaccccagcctcagcagcacttggacaacctcaccccgacccccagcctcgtttcttgctgcagacctccaacctcaatatttctgcagcccctcagtcctctcccagacccctcctcactatttccagacccttccggagcaccgccttcattttagacatccttgccctggcaaccgcactcgcccctcctgccgagcccctggagcctcggtgggcaccttctcctccctccccacctgccacatcctcactcacaaagctcaccaacctaccttcaccctgaatcccttcccttgcatactgagacgctgccttcacctctctcaggaggcatttcctggcttagggaagagtgccgcatcctcaccctgacccctgacctccttcccctaggcacctacggaactgtgttcaaggccaaaaaccgggagactcatgagatcgtggctctgaaacgggtgaggctggatgacgatgatgaggtaggactggggagtgggatacggcctggggaggggtttgagggcctgggctgggtgggatctgactgctgcccaccggccccctcacatatgcagggtgtgccgagttccgccctccgggagatctgcctactcaaggagctgaagcacaagaacatcgtcaggtgtgcgggaggcgggtgctccttgccggtgtggccgcttggggg

SEQ ID NO: 2524 - DNA, 6000 bp, Homo sapiens
cactggaccccaaacattgggaaactgacaaatagggagtgggagggggtgttcctgatggaaccatatctttggggctctcctgtgccagcctgcaggccttggtatgggggggatgatgagggaaaggacaagaggatccacctgagatatggagaaccacaaggagaggcccagccctttcctctccaccctggtggggagcccatccttgctcccctcactctgagggaccacatcaggccctcctgggcagaggaagggagggtgggaggaaggggtgtgcagcgacagtgctgccctgccccaggggtgaggggtgagggtcatggcctcttaaagtagaagagcaaggtgctgtctttgagccagaagcaggattgcggccggcagtaacagaccagagacacctccagcccatgggccctgtagagccacttgaccaccacatcaaccagactgtgggaaaggagccaatttatgaaattaaataaagtccacaaagggagtgagaaattcgggctcaggcaccccaccccggctgggcccagcactgctggagcacagcgcaccaggcacccccactgtctcacccctctcaagagggggcttaaataggccaggccccagcctggaggccgggggtcccggggcctagggcggacagaagtcggagaagtaggggtgctgcagggcctcttctgctgagatacgctggacagggttacacttcagaaggttctggagatgggggaaaggaggtggcaggttcaggacaggtcactgcccagagccctgccttcctgtagtcccactgggcaagtgtcctgacccaccctctacccctggtcacctacctgcagcagatccctccctgtggcattgagtttgggcacgacgttcaccagggatgttgtggccgggtacatcggatagggctgtggagaggcagggagggtcagactagaggtagggggagggggatggaggcgctaggaatgtgaaacgagtgaccctgatgaaccatgacccccacattccccatcacaccttatagtctggcagcttggtcatagagggccactgctcctcggtgggcgtccccagcagtgtgtccacggagtcaaggatcacttgggaaagggccacagctgcatcttcaggggcagggtgagggcctcttcccctcctggggagggattcctcatacccaccgcccacttctcaccctccctttaccctccggcttgagcttgacagaagcagccccaggcaggtcactcgcatatccagccacgtttcccatgacaatcacctaacccacatgctgctgtcctagtcctaatgaaacagtccttgccctgctcccacaaaatgtgtcctgttctctttggctccttcatcctggcatccatctctcacctggagggacaccctctcggcttcacccctcagggcacgctgcctgtctccaagccacaccttctccagtgtgcatttgcactgtgacaatcagggtgtccagcacccctgctctctccccttgccctcaggagaagccctacagaccccatcaccctaccccacaccatcactgccctcacccattgtgctcaaaactccatggactctcccctcccagagggctcaaggcagaggaaagcaaggatatcggaagatcctcttcaactggtcatcgacatcattgccgggaaaaagaggccgcccagcattggccagctctgggggatagacagggggctaagatgtgacatgtgaaggacccctcactctgaggtaccccctgaccttccagctccagtcccagggcctccctcccttcccccagaggggaccctccagaccctatttgtcaactcaaatgggaaagaaggtgcctctgcaacaccccagcacatcacctgcaaagatgcagccggctgaccacatgtcgatggacgtggagtacagcttggccccaaagaggacatccggtgggcggtaccacagtgtgaccacctggaggagaccccccccgaaagggacctcccacttagaggactggggaggaggtttgaggaggaggctcagagaggagaggaaaataatgttttgggtcctggggttggagctgagggactccctcccccaatcccatatcccatcttctagctcacctcagctgagtaacagcggacgggaatcccaaaggctcgagccaggccaaaatcagccaatttcagctccccattctgaagggaatgggaaggggacatggagaagggcctttaaaaagccttgggacagcaccaactccatcctcccagtcctcttccctctgtgctccccgtgccctggccccagcctctccattccccaccttcttcccaagaagtaccctgtttattagcaggttctggggcttcaggtccctgtgtagcacattgcggctatgacagaatcccagcccttttagtagctggaagaggaatgactgggaggagagagggagaagggagtcagacgccctgaacatgcaactgtgcccagcaacgggtcggctcctctcctcaccctgtgcttcgctccaccccacccacctttcagcacctggttcagagtgacaccattcattcgccatccaggacctgctttatactgtgctaggcattagagggaccaaagtaaagaagctggctctggtccccaccttcctggaccatacagcctaatgggccttggcaggtggatcctagatccggcctagatcccagcccatgctgatcttcccttcctggccgcatctgagtatgcacgccgtgaacatcaacataaatatcgtgctgtagtatcattcaggactggctcccctggaacctggaccaaggcatttggtcttgggcctagaaaagcacctggcacacagtgaagcattcagtaagtatgtgttgaatgaatgagtgtatctccttgaacctcattttctcatctctcgagtgtaaataatatcactgacatcagaatgacactgtgcgggtcaaagatgaccacgtgaaaatgctcactaagactggagacccctggaggacagaaacagggttttctcattctctaacaccctagagtgtccctgttcagggcccaaacttagagcccaaggggtgcttacaccgaatgcagactccgaccccagcctgaggggtcccccaacaccactctcctcacctttacaatctcaggatcgaggtcaccattgcaactgtcaaaatacttcttcaggtcctgaaaagggatatgagtgggggaatgggacagagtttaacctcaatctgggcccctataccttcccaaggctactgtcctccaaaccccgcctttcacctggtcacagaattcaaaaaccaaagtcagcttcttgtcgctgtgcaggacgtcatgaagcctagggcaaaagaagggctcagccaggcaggtccgcctgacagacgtccagtgtcagcccccgcctcccccaagcggccacaccggcaaggagcacccgcctcccgcacacctgacgatgttcttgtgcttcagctccttgagtaggcagatctcccggagggcggaactcggcacaccctgcatatgtgagggggccggtgggcagcagtcagatcccacccagcccaggccctcaaacccctccccaggccgtatcccactccccagtcctacctcatcatcgtcatccagcctcacccgtttcagagccacgatctcatgagtctcccggtttttggccttgaacacagttccgtaggtgcctaggggaaggaggtcaggggtcagggtgaggatgcggcactcttccctaagccaggaaatgcctcctgagagaggtgaaggcagcgtctcagtatgcaagggaagggattcagggtgaaggtaggttggtgagctttgtgagtgaggatgtggcaggtggggagggaggagaaggtgcccaccgaggctccaggggctcggcaggaggggcgagtgcggttgccagggcaaggatgtctaaaatgaaggcggtgctccggaagggtctggaaatagtgaggaggggtctgggagaggactgaggggctgcagaaatattgaggttggaggtctgcagcaagaaacgaggctgggggtcggggtgaggttgtccaagtgctgctgaggctggggtgagaaatttcaggaagtgtcgcggttgggaggtcgggtctactgggaacgctaaggttggagtgagagccctgcgggaaatgctaacacggggaagactggtgtctgcacggagtgctgagctagggggccagggctgcagccgctgctgagatcggagcctgtaggcattgctgacggtaagggagccagggcttcaaggaatgccgaaggatctgcagaggagctcttgcaggaacatctcgagattccattaccttccccaatcttttccagtttctcgtatttctgcatcgcggcggccgcggggacccctgcgggccctcggttttaagactctggccccggcgttgcagaggaggcggcacctgagcctccagccccgccccgtctgcccgcgcagggccttctggggcttgtagtcctaaaacgactaggtctccccgcaatgcccgagaccgaggacaagaagactacaacccccagccgtctgcgctcacgctctctgcagcactcgactccagggctccgtttctaccgcggaggcaaaccttggacttcaagtcccaggaagcaacgcgtgtccgttttccgggcgccccgccgcggcgccgtggttcccagtgtgccccgctgttgttattccttttatgtgctcccagccctcttgaaaagggccgctccgggactacgcgttccagaatgcagcggaaatgggggcggagcgctctcggttaggggtttggggtttggcggcctagatcccgggcactggcggcccagcgctgacctggttggtggcattgtgttcccaacggcctcttgacgacctcagcacgggtttccacctctccccaagccacctagtgaccccagaattgactggggaatgcctgtgagcgatgatgacctcacagggaacagctgaccgcagggctgggagaacagctgtgccccttcgaggctggattttagtggagggacacacgccaaagaccccctctctgctgagccccgtttgttgtctcggagcccacccgactctagccgctgaactctgacatgctgaggaaaactgggtggagccctgggggtccccctcagaccccagtctccggaacagggcccactggagtcagccagggtgtggcaggcaggttggttaaccccctccacagacaagaccacagaccgatgctcaacttgcagcagcctctgcctcaccccttaaaggagctgattatagattcccttacgctgcctctctaattgtctcatgattgcattcttgagggctatggaccgagggaaaaggatcccaaacagcactcctcagcaccggaaccagagttgctgctaaacacgtgttaattaactcgtttctatctgaatgcttttgcatacacaagggaaaagaagcaaaaagtgtattccttatctggaagactttgtgatttcgttgggcaaaaaagaactacacacaaaggtcttgaatgataagtgatggctctgcctagggttcggttcagtgtggaggttccattcaagaggaaggaggccagcacagcgaatctctgtccctctctggaagtggagagcctctaacaagttaccctctcccagatcagctcagggtaccgggcggccagcctccagcccctgtcacccttctcacccactcgccacccgtccctcaggggctttcttggaggcacgggggttattgaggggggcaagagaatctcaaccccgatacgtttatgtttcgacttccccgaatttccttgtgcctgcgttttg

SEQ ID NO: 2525 - DNA, 6000 bp, Homo sapiens
tttttttaaacagcagtcgttcagagcacatgatattttatttttctgcatcatgtcatttcaggtttatctgtcatcactaaagaaaaaaaaaaaacattgattctgtaactgcctgatgggtttctctcgcaggctaaccagatagacctggtttatcaagacaggggaattgcaatagaaggtttaatacacatagagctagctaaatgggagactggagttttattattactcaaataagctgtcccgaaaattcagaaactgaaatttttatacagtagtttggcaggcaggaggctagggaatggggattgctgattggttgggttggagacgaaatcataggtagtcgaagctctcctcttgcatgagccacttcttgggtaggggccacaagaccagacgagccactttactggcctgggtggctccagcggatccatcagaatgcagaatgttatggtctattataaaacaccaatcttaggttttataatagtaatgttatctataggagcaaataggtaggttagcagtcttgtggcctctggctgtattatacctgagccatggtggggctgtttcagggaggggctgttatcatccttgttttaaaattaaactattaactaaattcctcccaaagttagttcagcctacacccaggaatgaacaagggcagcttggaggttaaaggcaagatggagttggttaggtcaggtctctttcattgtcataattttctcactgttataattttagcaaaggtggtttcaattcaaaggcaaaatttggtttcttggcttaaaacctttacagttctaatttgccagttacagacagaatgattctactttttaaatacttgacttttgtaagtactcacagctagtatacaaattgtaggttatttgaaatagtcagagtattagcaatttctgcttccggccatgatggagtaaagaaactggatttacccttccaccttcactacaaagctgggaaaaatagacaaaacaatggttttgagacattgagcaacaggcagtgaaagactgcaatcctaacaatttggtaataaaggaggtgagccctttgatagccctcatttctggcctgaagagtttccaggttgcagcatagggagacggaactcagacagaacctggaggtctcactgagctaaggtgacaacaatcaaggaagctaggattcttggggccgagtgtcagagagaagagaattataccaagggaaactccagatatttgcagaagcgtcccctcaagtcttcaaatgaagattgagcaacacttgcactggaggaaactactgggaaagaaccaccagagacaagaaggcagaaaaatccccagagctcacacagggccaaaagcaacttgcgtttccccagtggaaataatttctaaacacatggagcatcaagcagagtccttgacaggctgctgctttaacaatgggaccagattataactaaacttaaagactattgtgggcccatctagcaaaacttacacaaaaggcttgcaaaggccacattttccccaaaggacttaactatcccagaacaaaatatttgaaggaatacaaaagccttcagcccccaataaagtaacactcacaatgtcggatgtaaaataaaaaggttaccaggtgtgaaagatgcaggaaaatatgactcacatcaagaagaaaaatgtaccaaaaaaaaaaaaaaaaagcattaggaagatcaaacaacaacccataaccttaccaactagatatggttttcagtgaagaattagagtattaccttttagactttaatttaatatgtattttttaattactgatattaaatgaactatgaatgatcaacttggtgtcctagagattttttcccctttacgtatcttgagcactttctcatgtgtatttcacttttctgcttgtaagaatcaacattcacttggcttaccttatgtaatgggaggtatattagaagtatgaaaaggaaataagactctcagctaaatgaaccaaggtaggaaaaaagacaaataatcggacctcacagggagtgaaggaccaagagtgcagccaggctctgcaagcaagttcgctggggccccagggcctctccagagcctcaggagaagctgttagtgaatgagtgttccctctgatgctctgccttagggagatctagcccttattatctcagtcttccttctcttcatacatcttttggcttcttttgttgtacagaatggcttctggcctggatcattcaaatccgtcctacatgcctgattagtgttgcctagtctagaatttcatataaatggaatcatatagcatgtacttcttccactgagcatcatgtttttgaaattaattcaggggccagcgaaatttttcttaaaggatcagacagtaaatatattaggttttgggggccacacagtctctcccaactgcttagttctgctggtgtggccagaaagcagccaaacaatagatacattaatgagtgtttatctattgtttagctgctttctggccacactagcagaactacgtacttgggagagccaactacctgtgtagaaaaaaaaaaaaagagaaactactttacccttgagtccattcatacctttgctcatgtcatggactgttatgcaaagaaaggtctgtggatcattggtatccacatttttagaccctgttataaatgcagaatctggctcatgcctgtaatcctgaaactttgggagctgaggtgggaggatcactttagcccaggaatttgagaccagcctgggaaacatagggatatcctgtctctacaaaaaataaaaataaaaaaatttagctggatgttgtggcacatgcccgtagtcatagctacctaggacactcaggtgggaggactgcttaagtcagagaggcagaggctgcagtaagccatggtcacactattatgctccagcacggacaacatagtgaggccctgtctcaaaaaaaaaaaaaaaaggcagaatctcagactcaccctaggcctgctgaaccagatgtgcattttaacatgatctctgggtgactggcgtgcacagtcatgtctgtgaagtattgcccaagggagtctgctgagacactgaaggacaagatggaatgggttacattggatcaccttcttttaacaagtgcaatttccactccagctggccagttaaaatacaaacaagattctgtaattttttttaaatcccaaacttaataatattctttttcagtagatgatctccattaatatttcatagccatatagaatgctggggttgaaacaaaataggaaaccatcctgcattcaccaaaaggcagagtcccttctacaatattcctctgtggcctctaactgagcgtttccaggagacacctcattgtaacagaagatccaacgataactaaccatttaccacctgaaccatggcaacaggccataaatgtctgcttcgatcttcttgaccatcttagagacaaaattacctttctgaaatcatataccaacacaggaggtgcttgaaaaactctgatttccgactaattcagtattctccattctatataactaccttccactctctctggcataatccaatagatctgctaattatcctaagatttttgtgatcctgccttcctgagtccagtgccctacttttaaccttgttccctatgtcacaatgtcacagctttcctgccttggctgggaaaattccattcacttgcctcccctcaccccctcagtattcactgatagctataagcatccttttgtgtttcttctaacttttatgaaactagggtttacctttttcatccagattcctagttaaagggagaatttcattgtaaacaagaatctagtccttcaattgcttttcttggcacctgagtggtgctctttttaccttccttttatgtaggaaaggcttctgtgtgcactgtcacctgaagtttactggagagtcactcacccaaaaacatgtctttaccatacttaaaagtgttatagctaagagcttattagaactcccctggagacagggatacttgaattaaattttgcaaacatctatggagccttaccatactcacattattttgcgaggtgctggtacgaatacagaaatggatataataaaggcaaccttccagtgtgtgcactgtggtggagaaaataaataaaacctttgccttgttgaaggcatcccattatttaaagaggtaacattttccccacaactattttgtgtggggtcccacaaaaaaaccgatagatagcagacctatcttctgatatctatctactatctatctatcatctatctatctatctatttatctatcatccatttgtttatctatctcagaaagcagaggtagggtacgaggaagagatgggacattacaatgcaaagtcctcccctccagccaagtttttcaaactccttgtccatacaacatccatgaccctaagttcagctctttacacatttcttttccccgtgaggctgagctgcttgagggcaggtcacgtctttccactacccttcttgccggcacctagggcttcctgatggagaccctacaggtaatccacgtgagcttatgctccgcggcagacacgcccaggcgggctttactcacatcaatagcttagtacgcacactccctctagccaatgagcgaatacgtactcctttctccacctcccgcagggcggccaccgccccctcagtccctctttctcccgtcacctccccaggttgccccgccctgctccgccccctcgccgccgcgtgctcgaggagcgagtcgcgcgctactgacgtcaccagcacgcgccccgtccgctgcagtccgccggcgagggagttacgcacgtcctgattctcctggagtctccagcccgcccagtggccgcagtcacccaggtccagaggcggcggtatcacaggctctccgacatgtctatgctggctgaacgtgagtgtcggaagcggaggcccgacccaggcgcgttggtgaagatgccgggtgacgcgcacggcagcccggagtggctgggagctcgggttgccggcgcgcctggcgcatgggatcgggggaccggggagccgagcccggctctgattgtcctgctcgccgcagagctccccgaaagttggccgcaggtctgctagtgagagagaccgcaagtgtctcccggagacgccgttctcagaatcaccctgggtcgcgtgcgaagtgggtcagaacaccgggtcccgggactggccccgccgccgccctttgtggggtcccggactggttgcttcacccaccccggacctcagcttcctgaggttaaaaagagaaggttgagcagaaggatcacttgaaactgtaatcacattgtccaagatgtcttggacccagaaaaagaaaaagcaaaggagttagaagtctcaaatatgggacgtcagccacttagcgagggagtgcagggctaatgtgtaattctaagtgagactggcgtttttgaccttgttagttggccacagcgccccgtcctgcctgtttacctttgacatttatcttcacttggtggagtcggtgaaacccctgtctctgtagaggctgctgaacttctgaattgtacctgtagcgaaggtcgcttgccgccagatggcagtcatgctttgatcctgaaaagcgggtcctgcttggcgagttgtacagtgagcaaagaacagaaacagcttatttaacagatcaagcagaccagcacagggattttgtgaaataagtgctgttagcactctcttttctaagagggtggaggacttaggagcacaaaacgaaatgggtcaggcaccatcccgattttacaggggcagaaattgacgttcaaaggaaaataatttgcccctagtcattgaggtagaa

SEQ ID NO: 2526 - DNA, 6000 bp, Homo sapiens
atgaacccccttctactccccaagagaaaggcacagcaaaggtcaaaatgagctccccaaagagtgccttctcctagggctgtctgctatggttaaaatacaaaacccacagcaaacaaatacatacacggacaaaatatcagttactgctgaagctgagttctggtacatggcggtttacgttctcttatttttttgagacaaggtctgactctgtcgccaaggttggggtatagtggcatgatctaggcttactgcaacctctgcctcctggactcaagccattcccccgcctcagcctcccaagtagcggggactacaggcacacgccaccatgcctggctaatttttgtattagccatggtgtcaccacgttgcccaggctagtctcgaactcctgggctcaagtgatcctcctgtctcagcctcccaaagcgctgggattagaggcatgagccaccgcatctggccatatgttctctcatttgtgtttgaaatatttccttataagaagtgaacacacacccccacaacacatacacaattggggttggaggtacaaagccccatggctcttgcaggcgtcaagaataaccacccattattgtcccatttcagccagggtgacacggctttgcttcccactacaggtcaccacttcccgtcccagtccccgacttgattcccgcaggcctctgtctgagcgtactcggtctttctcctgcttgatgagcaccacctgtccgtcctcgccctgcacctctgtcttgataggcttgatgtcctgggtgggtggctggccagggagggtgtctggcagctgcagaaacagcagttcctcttccttggtgaggctcagctccctcagcagctctgccacagatacatccttcgggaggcctggagtcttcctggctgctttgggaggagccttcatcttggcctcttcctcctcatctcgtggctcctctttcactgcccgggtgatagacatggaatgctatcaagtgaccaccctccataccagctcactgttaccagccctttgcccctgtctgctccactgtcactcagccagggagtgggaaggaggcaccagttatacagaggggcaagagacaacacgttcaagtctcacatgacttatctaaaaagggacatctgaggctaggcccactgctccctgtcaacacaggaaccctctgcgagggagaatggagcatctttgttcagctcatgtatcttacagccggaatgggaggacctgctcacgagcagcagtcaggggcacatgcaagggatgcctgatgcacgggattcctggggagcagccatggaattggagatgagaagttaaccgacagagtacctttcacagcaggtatgtccacctccatgtcctcttccttggggccagccagccaaggtttaacatctggttcgtcattttcttccttaaaaagccatcctgagtgagccagcggcagctgcacaggcatatttcgagtgtcgttcctcaggccggggtcatcgaggaactgccaaagagagtctgggtcatccagcctgctagcacatgcacctggatcaaagtctgctttagtccctttctaaccaaagattccgctgctccccaggattccaggacatcagtaagctcttctacccctcacctggctccccagaagccctgttctacagccacaaggaaaccccttcccccagcctcctggtacccacatcgtccttctccagcatacgcaagatctgtttagtttcttcgtctgtctctctcttctcttttttgatgttgatgatatgagaaggtcccatgtctgacacatccactgtcttatcccagttccctgtgggaaatcacccaggtcactagggatcgataaggaagatgcccaacagcaaggaaaacggaaatgggagtggggaaattccactgttctcgcccttctctggggcagtctgaactgaaattcactgattccttccttataccttttttcttcatcatttcagctgggccctgctcaaagatggagtgagactggatcacttctggacggcctcgccctcgtccatgcccctctcgttgtcggtctctgtccctttcacgcttctccttcttgacagttacttcttccttgggcctggaaaaaagaatggattaagggaaaccactcactcactgtgtctccaaaatctggccttactctcccataccacttcactccaaaacagtggagagtttgagccaatatttacaccatgagaagcagaatccaatcctaattctagcacttttctcacttccttgatgaggcaggattttttcagtttgctttactttaccttcttgtccaaaaatatagatttttgtttgcattgggactgaaagcaggaaggcagaaatgcaaaggaacttcagggaaagtgtgatacatctttgtttaaactattggctctcaactcgggcaacaaagagaatcactccattctactgccagcaagttaaatcacaatttctaaagatggaaccctagacaccagtaattatttatttatttatttattttttaaagcttgcagaatcacctaggagccagggttgaaaatcactagtgaaaagaactaaagatataaatttaaattttggagctacaaacctagttatttcccccaaagccccaaattcagagcaagtaaataaggggcaagtattcagaaggcctagctacttactcttccttgatcttccgactgatgatatttggggtgaaggttttctgaaagcaaaatacaggagtcactgatgtgttaggttctgaccccaaagtacagaggaaaataaaaattcccaaagggcatcttctacagaccaaggccaccacggctctcgttggcacattccacagtgctgtcagttttatagatacacatgtgcctgaaaaggaggaatgtcatagtgtggtagcagtggagttacacatagaagggggcaccaaaacccacttttaaccagcagccttaggttctgcctctgaaagaagatcctctgggacttctaaaagcaaaggaatttctctggtctcacctcttctcttcaaactgctatagagaccagtcagtatcatgggggaacagctctagcagcaaggcctaagtagggaaggccatagatctgccaacactttcaatcaggtgactatggactgtcaccacaattttccaaggcaaagttaggtttttaaaaactgctttatggctgggcgttgtggctcatgcctgtaatcccagcactttgggaggccaaggtgggtggatcacgaggtcaggagttcaagatcagcctggccaagatggtgaaacccgtctctactaaaaactacaaaaagtagctgggcgcggtggcgggcccctgtaatcccagctactcgggaggctgaggcaggagaatcgcttgaacccgggaggcggaggttgcagtgagctgagatggtgcctctgcactccagcctgggcgacagaaagagattcccttaaaaacaaaacaaaaaaccaaaaaaccgctttattcggccaggagcggtggctcacacctgtaatcccagcaccttgggaggtcgaggcaggcgggcggatcacgaggtcaggggttcaagaacagcctggccaacatggcaaaaccctgtgtctactaaaaatacaaaaatcagctgggcatggtggcgggcgcctgtaatcccagctactcaggaggatgaggcaggagaatcgctcaaacctgggaggcagaggttgcagtgagctgagatcgtgccattgcactccagcctgggggacaacggcgagacttcctctcaaaaaaaaccaaaaccaaaaccaaaacctgctttgttcttctgtcatcctgaccccacccctttctgggctactcttgacatccacagtcatatacacatgggagaggccacagagcctcgaatgccatacctaggattcatcatactctagataaaaagtttgcacacagagatggtgaattctgaaccctctaagactgcgaagtttatgcctgtctggctttcatgggtttcttaaagatgtccaaacacacaataaaagtaaataaacactgttcaaattgcttttgaacgactttaacttattaggattctctgcccttcaaccacctctgggagtcatttcaacatcttgtactcagtacctagatttgaaggtaggacagactccctagaatttaaagaggggtaggcttgagaggcccaacgacagtcctgacacacagtaggtcctacacaaacattagttgaatcctggggcttggaattcaaggtagttgagtttctttagaaacgcgccgttgggtaccttcttgactcccccgagggtgaggtccctggaacggatggagggaaggcggccgggggtgaggggaggcgccggccgccgcccgatgagcccccgggccccagtcaggagaggtcggggccctcccggcgtgctgggctcgccggcggcgtttccttccgacatgttgcctgggagagaaggggcgacgagatcaccagaggggactgacacgcggaccctggcggaaccccacccccttgctttccggtcccccagtcggtgcgtccctccagtggcctctcagctcctcccctcccacgtggcgagactcccgggaccacccaggtgagagcctttggctcgcgacacgccctctccaggaaccccgcccaggaaccagacagggacgcacccgggccgcggctccacaccgcgcgtcacaacctcacctgcaacgcgaccagccgccagccttcggtctccgcgccgggcggaagtctgcgtggcagggcctgggcgccgccatcttggcgcggggcggaagtgacgttaggggggcgggactgggccacagtatttatcaggcggcgcttcgctcccctccgccttctcttcccggttcttcccggagtcgggaaaagctgggttgagagggcgaaaaaggatgaggtgactggtctgggctacgctatgctgcggcgctcgggggtcttggcctccgggcggtggcgtggaggcgccaagatcagggtcccgggttttgtcggccaccacgccgcaatgtgaggattcgcctcggcggagcccctgggagcttcggggtagctgctcgggatggggcgaggggcgcggcgcggcgcagagagtgagacctggacttaagagtcggggagtcctgggccacaccgagccctgtctgcgggttctccatggtgaccttggagtggtcattacctccgggcagcgacctcgcccactttcggggaccccttccctgtgctcctggtggagtcctggggtgaggctgtgggggcagcttggaacagccgcagtggaccaaccggtgcccagtcatacccgcttctgatcacgaaggcggtggccctcgtgtgcgctcttggtcaaagcctggagggaattggaataccaagtttgctctactgctggaggaatttaaagaacttttgttgactccagcgtttgtgatttaacataaaaggtgtcatttaatgttatcccccatcccccagaccgtataaaaaccatgtaacaatattatggggagtttgaggaaaggaaatcatttctaccagaatgccacgtagagtactactattaaaaattttgtaatgtatctagtagtcttcacagagttgtcgtatcacaatttcgtgtcctttttcttttcttttctttcttttttttttttttgagacgaggtttctctctgttgcccagacgggagtgcagtggtgcgatcaacacaccgcaacctctgcctcccaggctcaagccatgcttccacctcagcctcctgagtagctgggactacaagtgcatgccaccacgcccggctaattttttctttttcttttttttttttttttttttttt

SEQ ID NO: 2527 - DNA, 6000 bp, Homo sapiens
gtgcctgtagtcccagctgctcgggaggctgaggcaggagaatggcgtgaacccgggaggcggagcttgcagtgagccgagatcgtgccactgcactccagcctgggcgacagagcgagactccgtctcaaaaaaaaaaaaaacaaaaacaaaaaacaaaaacaaaaacatttgatgggataacaatggatagctttttcttctcagtgctttttaaatttttccaaattttctaaaatgaatgagtgtatttttaaaaatacaaaataagccaggcgtggtggctcatgcccataatcccagcactttgggaggccaaggcgggcggatcacaaggtcaggagatctagaccatcctggctaacacggtgaaaccccgtctctactaaaaatacaaaaaattaggcaggcatggtggcgagcacctgtagtcccagctactcaggaggctgaggcgggagaatggcatgaacctgggaggtggagcttgcagtgagccgagattgcaccactgcactccagcctgggcgacaaagcgagactccgtctcaaaaaaaaaaaaaaaaactaaaaaagctactacctggtgaacttcaaagcccaacagaatgaaatcaaagctatttcatccagtgctctaattagaagctaagggctgctgcgtgtagctctgtagggaacaggaaaagggtattggtttggtttgattattgtaaaatcaacatgaagaaagaagttgaaaaggatctgtttagaaaacaacataacaaaatattaatatattagtaaattggcaaacaaagttctaaattttaaaagccaatactcaaaaggatgtggccaaaaaattatatattctcttttttgtttttttgagacaaggtctcctctgtctcccaagctggactgcagtagcacaatcaaggctcactgcagcctttgactcctgggctcaatcgatcctctctcctcagcctcccaagtagctgggactacaggtgggtgccaccaagccctaaaattatatattcttatatactacctctctctctgtgtgtgtgtgtgtgtgtgtgtgtgtgtgtttacacacacattaatttcggagtcaataaaagttgttttttgttgtttttttttgagacggaatcttgctctgtctcccaggctggagtctacactccagcgcaatctcagctatctgcaacctccgcctcccggattcaagctattctcctgcctcagcctcccaagtagctgggactacaggcacatgccaccacgctaggctaatttttgtatttttagtagagacgggttttcaccatgttggtcaggctagtcttgaactcctgacctcgtgttccgcccaccttggcctcccaaagtgctgggattacaggcgtgagccactgtgcccggctctttttttttttttttttttgacacagagtttcgctcttgttgcccaggctggagtgcaatggcgcaatcttggctcactgcaacctccttctcccaggttcaagtgattctcctgcctcaacctcccgagtagctgggattacagatgcccgccaccaggcctggctaatttttgtacttttagtagagacagggtttcaccatgttggccaggctggtcttgaactcctgacctcaggtgatccacccacctcagcctcccaaagtgctgggactacaggtgtgagctaccacacctggccaataaaagttctttaaattccaacggtagagcaaacttggtattcagattccttccaggtttgaccaaaagtgcacatgagggtcactgctgtgagcccaggaagggtgggactgggcaccggttgatccaatgtggctgttccaaggctgcccacacagcctcacccaggagtccttcaaaagcccacaatgtgtgtgtgtgtatatagtgtgtgtgtgtatatacgtttgattattgtatatacacacattcttagtgttgatgcatttcagcacaatcttgtttttttgtggggttttttttgtttttgttgttttgagacagtctccctctgtcacccaggttggactgcaatggcgtgatctcagctcactgcaacctccgcctctgtggttcaagcgattcttgtgccccagcctcctgagtagctgggattatgggcgtgtgccatcacgcccagctaatttttgtatttttagtagagacagtatttcaccatgttggcaaggctggtctggaactcctgacctcaagtgatctgcccacctcggccttccaaagtgctggcattactggcgtgagccaccacgcccggccacacaatcctttttgaaagcaatttagcaatatgaatgaagaaccataaaatgtgcatgtacaaaatggtacagcccctgtggaaagcagcttggcagtttcttataaaactaagatacaactaccatatgacccaatgattgcactcatgggcaattatcccagagaaataaaaatttacgttcacacaaaaccttgtacatgtattttcacagcagctttatccataataaccccaaacggaaaaccaccagatgtctttcaaagggtgaatggttaaacaaaccatgaatactctgcaataaaatggaacgaactattgatacacacaacttggatgatctgcggggaacaatgccgagtgaaaaaagcaatcccaagaagtcacatactgtatgattccatttatgtaacacttttgaaataacaaaatggcagaaatggagaacagattagtggtgggaggaggtggggggagggaggtgtggctataaaagggcaactagagggatccttgtggtgatggaaacttcttgtatcttaactgtaccaatgtcaatattctggtggcaagaggttactactgggggaaaacgagtaaacagtacttgggatctctctacattatttcttaccactctacatgaacctacaatgttctcaaaataaaaagtttaatttaaaaaatgtttttagagatagggtcttgctgtgtcacccaggctggaatgcaagggctggatcatagcttactgaaatctccaactgccgagcctttcaagcgatcctcccacctccgcctcccaaagcactgggattacaagcctaagccaccgtgcctatcgcaaatatttacttaaaaaaaaatcttcttttggccagttatcccaggacgggaaatctatcccgggaatataatccaaaagaaaacaaaaacaaaaacaaaatcgaaaaaaagcaagtcaaatgtaccagacattcactgcagcattatttaaaacagggaaaaaagaaacaatcagggaaatacttaaatcatgatacagccactggagaactacgcagtctttgatgtcgcaacagagaaatgttatttgaaaaaggaggatacaggccaggcgtggtggctgatgcctgtaatcccagcacattgggaggccgaagcgggtgggatcacttgacctcaggagttcaagaccagcctgggcaacatagtgaaaccccgtctctacgaaaaatacaaaaaaaaaaaaaaaaaaaaaaagaaaaagaaaaaattagccgggcgtggtggcatgcacttgtagtcccagctactcaggaggctgaggtggaagcatggcttgagcctgggaggcagaggttgcggtgtgttgatcgcaccactgcactcccgtctgggcaacagagagaaacctcgtctcaaaaaaaaaaaaaagaaagaaaagaaaagaaaaaggacacgaaattgtgatacgacaactctgtgaagactactagatacattacaaaatttttaatagtagtactctacgtggcattctggtagaaatgatttcctttcctcaaactccccataatattgttacatggtttttatacggtctgggggatgggggataacattaaatgacaccttttatgttaaatcacaaacgctggagtcaacaaaagttctttaaattcctccagcagtagagcaaacttggtattccaattccctccaggctttgaccaagagcgcacacgagggccaccgccttcgtgatcagaagcgggtatgactgggcaccggttggtccactgcggctgttccaagctgcccccacagcctcaccccaggactccaccaggagcacagggaaggggtccccgaaagtgggcgaggtcgctgcccggaggtaatgaccactccaaggtcaccatggagaacccgcagacagggctcggtgtggcccaggactccccgactcttaagtccaggtctcactctctgcgccgcgccgcgcccctcgccccatcccgagcagctaccccgaagctcccaggggctccgccgaggcgaatcctcacattgcggcgtggtggccgacaaaacccgggaccctgatcttggcgcctccacgccaccgcccggaggccaagacccccgagcgccgcagcatagcgtagcccagaccagtcacctcatcctttttcgccctctcaacccagcttttcccgactccgggaagaaccgggaagagaaggcggaggggagcgaagcgccgcctgataaatactgtggcccagtcccgcccccctaacgtcacttccgccccgcgccaagatggcggcgcccaggccctgccacgcagacttccgcccggcgcggagaccgaaggctggcggctggtcgcgttgcaggtgaggttgtgacgcgcggtgtggagccgcggcccgggtgcgtccctgtctggttcctgggcggggttcctggagagggcgtgtcgcgagccaaaggctctcacctgggtggtcccgggagtctcgccacgtgggaggggaggagctgagaggccactggagggacgcaccgactgggggaccggaaagcaagggggtggggttccgccagggtccgcgtgtcagtcccctctggtgatctcgtcgccccttctctcccaggcaacatgtcggaaggaaacgccgccggcgagcccagcacgccgggagggccccgacctctcctgactggggcccgggggctcatcgggcggcggccggcgcctcccctcacccccggccgccttccctccatccgttccagggacctcaccctcgggggagtcaagaaggtacccaacggcgcgtttctaaagaaactcaactaccttgaattccaagccccaggattcaactaatgtttgtgtaggacctactgtgtgtcaggactgtcgttgggcctctcaagcctacccctctttaaattctagggagtctgtcctaccttcaaatctaggtactgagtacaagatgttgaaatgactcccagaggtggttgaagggcagagaatcctaataagttaaagtcgttcaaaagcaatttgaacagtgtttatttacttttattgtgtgtttggacatctttaagaaacccatgaaagccagacaggcataaacttcgcagtcttagagggttcagaattcaccatctctgtgtgcaaactttttatctagagtatgatgaatcctaggtatggcattcgaggctctgtggcctctcccatgtgtatatgactgtggatgtcaagagtagcccagaaaggggtggggtcaggatgacagaagaacaaagcaggttttggttttggttttggttttttttgagaggaagtctcgccgttgtcccccaggctggagtgcaatggcacgatctcagctcactgcaacctctgcctcccaggtttgagcgattctcctgcctcatcctcctgagtagctgggattacaggcgcccgccaccatgcccagctgatttttgtatttttagtagacacagggttttgccatgttggccaggctgttcttgaacccctgacctcgtgatccgcccgcctgcctcgacctcccaaggtgctgggattacaggtgtgagccaccgctcctggccgaataaagcggttttttggtttttt

SEQ ID NO: 2528 - DNA, 6000 bp, Homo sapiens
cgtttcaggtggagagagactttgaaagggagtatggaaaacttcagcagtgagtgtcaaccccagaaagatgaggtgggaggcagggagggacaagggccccctgccaggtctcacctgtctgccccgtgccctgccccgtgagcaccctggaagctgagggcagctcaggtcaccaggctgctggaactgttccctggcaatggccatgtgagagtcattcactcatagcctttgggtgtagtggcacttcagtcagcgggaaaagtccccgtggagaagatccctttctcctcctccttggcaggccctccagagcacctgggcttcgctcaggtagggggaaggaaggggaccccaagcagcccgtcccctgccttgcaggctggaagagcagacccggaggctgcagaaagacatgaagaagagcaccgacgcagacctgggtaggtgactttccacccgcaccactcgcttgagcaggtggggcagaggtgggcaccctcctctctcagccccccaagggctctgaagttgctgcgctcagaggacgtgtacccagtgtcctgagaagcagcctcagggcagtcactcctcaccagtcacatcccactttgcacagagctcgcactgccccactctggatgtgggtgctggggcaaggctctcctgggactccagtcaggacagtacagcagctggtggaagcttctggtagcagatgcctccattgcctcagaatcctggccaccggctcaggctgtccagagggaaagggaagcacattccttcccgcagaaacgagactccgtggcctgctgggacaggcgctccagtggcaacaagaatggaagctgtcatgtgtttaaacaggaggttgggttaaagtgtaaggccagaaataccccagataattctatgatgacaaagggcaccgggaggtccttgggaagtgggggccagcaggtgctgggaaacagccagggcccttggggaggtttcttggctggagagctcttgtttgaaacaaggaggaaccaggcctgggagcctagagacacaagcaggtcgggaataagggagcatccagagcccttgctgcaggccatgtcccaggaaggaggcgacgagcagccgggagagatggagaccattccttgaggttctttctccaaggccttgactttcccaccccggagcagcaagcacttgaccaaaggttgatcaatagcttcagcactccctgcgcagctctggacagctgacttagctctacctcagttccgtcacccgagaagcacaggtaacgccaatccgagtggcacaggctgttgctgaagatgaagttggatgagcaacgtaaagcactgagaacagggcctggcacgggtcagctctcggggtgtccgctcctgtcatcaccgtcgtcatggtcggcagcaagcctccctgactgggtggactcctgcagctccttccctgggtccagtggggaagccgtgtctatataccacactgggacgaggacctgaaagagacttgggtatggccaggactgcccacttcctctcactcagcagatgctgaccgagaacccacgtgcaccaggcactctcagcactagagactcaacagcaagacaagatgggagcttacgttctaggaggaagacctgcaagaggtccacaagcggatcggtatataatgacacgtcgtggcgtgcaaggtcaataaaaataaggaggtggagagtgacagggtcaagggaggccttcgtggggacgtgatccctgggcagagtcctgaaggaatgaataacccacacaggtagagccaagggaagagggcctgaaacacagtggacagcaagcgcggaggccctaaggtggtgcacgctgaccagagatgcaggagaggcagcaggagggtggagaagccatcttcagtcccctcggccactccagctgctgaataatgccatgttatggctgtgaagaaatttcacctccctgagcttttctgaccttgagattggcagggcacatgacacacccattttataaatgggcatgtccatttgataaaggaggaagagttcagctcctcttctccaagtccagggccttgtctccacagcgaagcctccccatgccccactcattcctttgcccacccccgtgcccgccaccaaactagaaggtgaccgaaacagcccccactccggaaccgttgcccatccactctttgcttggctgtctgtgagcctagtgcaaatggggcggcctcactgtctcctgacaccattcaaagggccacagggcagtgggcacctacgggtgggacttgaggaccagtgtgctcctacttggtactgcagttacgaggaaaacccttgaaatgtcccaatagaggcagtgatttgaatttgttcccattttatgccagctcctaagcctcagccagttactgatgtgtaaacacacctttcctacaaagcactgatcacaaaaggaaagcgttccttccctgggagccgccgtcaccaccaccatgcccgggtgagcgctgactgcctgtgcagggactgtggccgtcttggtctgtgccatgaattttcatgccagtgctaattcctgggccgtgggctggtctgaacatgcaccttgctcctggcctctagcgttgccaaactatgtgtgtcacaagccaaggactggatttgggagtttgtctgcagttgtttgttttgtagttatttcaggtctgagttacttgggtcgcatttttcttgatcggtccccactgcctttccagttcgggagctgctgtgagccattgcttcctttccttcctgcttctgcagacagctgcattgtcagagcataaacgaagccagggtgtgctgtgttcacagtggcttgctacggaaccaaggagggcatcaggggtccgtgacgcaccgtccatggctgtggaaagcttagtttcccagcagagaaaccagagttgaatgggtaactgcagaagcctaacactactgtcctcagtcaggaatggatgtgggcagagacagtgcctctgaagagcggtggtggtggtcatggggccaaggcgagcctgacagccacatcagtctcatgtacggggcatcagtgttgtaggcgggcttgctgtgccgtgggccgctgggccccacctccagcctccaactaactcatgagctgggcgagacctgaaaatgtgtgtccctggagttcccaggtgatgctgaggcccacactgtgagctccactgatctggacagttgaggggaatggagggatgcttttcctgagcgtggaatctcctgcgctcccccagcaaggtggaaaatccccagttattctaaaaaagatgacctttctttcagaaactcatactactttcagagtgctctggtgaatctttgaatcttacattccagaggccgcatcaggactccagagacccgggtggggtccaagaccctcactttctctaaggttcaaagatcaccagcctcctggtgtgggccaggctgactgtgcccctctcccagtccctgcagggaacaatgaggggtatgggctggggcagggaccacaggtccagaggggcatggagacctgctgtttatttttgttgagggggaacagagtcacactgtgtcatccaggctggtctcgaactcctgggctcaagggatcctcctgcttcagcttcccaaagcacagggattacaggcatgagccactacgcccagccaagaccatggtgttcttggtgtcatctaccccagctctgctctgctcacatgaagcgggggcatcactgggcggggattccagacccagttctgcccagggccggccactgagcccactcagttccttgacttcctgacaatgcaagagctttaggaaagaaaggggaaaatgcagctgggctgggcgcagtggctcacacctgtaatcccagcactttggcaggcaaaggcaggtagatcacctgaggtcaggagttcgagaccagcctggccaacatggtgaaaccccgtctctactaaaaatacaaaaattaggtgggtgtgatggcaggcacctgtaatcccagctacttgagaggctgaggcaggagaatcacttgaagccaggaggcggaggatgcagtgagccgagatgatgccattgcactccatccagcctgggtgacaagagcgaaactccgtctgaaaaaaaaaaaaaaaaggaaagtggaaagaccgtgtcctcgctcctctggctttttgggttgttttcctcagatatttttttaagaaatagcagaagatgtttttcagaaacatttccagctttatccagaattttattatctttttattatgctgtatgtgatcatttcataatcaaatcaagttatacgtaacgtttgttcctaaatctacagagtcactccacagaatttaagaggtgtttttccctccgttgcttcaacatttctggaaagtttacatttccagccttctcccacagtttgcccttttgctggttgactgtagcactctcccagattccagaaaaaccccaggagggtgctccgggctggctagtccgctcagcgctgctttgctgactggtgaaggggcctggcggaggcagacccttccccggggagcgcagggtcagggttcaggttcatgccatggagtgctaggcaaggccacatctgtgattaactgggaggcagaccttatgtcatgggtcctaagacactttttccacagttaatgtctctgaaatcaaagtactgaaagtgtagcctggtttgattgacaacaattttttctcccttagtagttcatacaataagtgacttataatgaagagcatcttaaattcagtaacatgcatatggtaagaaatgcattcacaatgtgtcttctctcctgagacctgccccagatgcactctgacactggtacagacggcatcaggccagcatgacccttctccagggccgcttcctgcccctccagaattttgtttctagaatctagaaataatggaggcctgaaaacatgttcaggaccaagagctccaaagctgccagcaggtctccagcccgcctctgagccgcctgtgactcccaggcttcccatctgcccagcagggaatgtcaacacaggagggaggagcacagaggggtgggcggcacattcatggggatccggtaccagggtgccttgaaaaacgtcagtggatgcctgatggacagagcctgatggacctgtccactggcttcctctaggccagatcagaaggagagcagtgaacagggaagcagctgcccagggtcaagggtcagggcccggctggcgcactcagccgtttgaccttggaggcattacaaacccttttgcgcctaatctgcctcctcgctaaaatggaaccaaactacatttccgctagacatcccctgggttgtttgagccctaaatgagagtgcatgggaaccttggcagaaccctaagatggggacctgctggcagctttggagctctttgtcccgtacaagtccccaggtttccattatttacaaacaaaattctgggggagcaggaacagacccgggaggagggccctgctgtcccagtcccgcctgtaccagctgcagtgtgtgtctgggcgagtcttgggggaaaacacattttccagcgtatctcttcctactggatattgaggaaaccaggggttggcagggtgcagctgctggcctaatctgacctagttttgtcaataaagttttattgaaacagccacatccctttttttatgtgttgtcgctggcagttttcacagcacaaggcagagttgagaagttgcaacagaaattgtatggcccacgaagcctgaaatatttactgttgggccttttgtagtaaaagcatgtgtaaactggagtactgttattcttgtccatcca

SEQ ID NO: 2529 - DNA, 6000 bp, Homo sapiens
ccccatggagatggagaagaagggagaaggccaaagggtggggagtggggcatgagcaccaacctcacctgccaggaatgtctcaaccccaggtagagccatgagggccccagctcaaggcagcggccttagccataccacagcctggcatgagctccacatcacagacatcctgagccccagctcaggagctgtgtcttcagtgacttcctctgacttccccttctgggtgtgccctggagctacctggaggaacagaccatccagacccaactcagaatctcaggagccttggactcagtggtcctactgccagttctctccagtgggtacctcctattgtgggtctggggccatcttagagcctacctgtcagggggcagcccagcctggacagcccttggcctgatgcccagggaacatatcaacccggggggattgttttccctactggtgcactctccctcactcatgtctcctcctggtttctgtgagctaatcagagagaaggagggggaggagggggtgctgcttgccttccccgttatctgcagcaatccacggtgactaatgctcccagttggtaaaaaggcagtgtaatcaaaacactttttttttagtccttaaagttagtcattctcccagagtggaggaaaaaaaaaaaaaagcccacagcaggcaccacgagatgcaagctgagaggcctgcactgctgggtggaaccaaagcattggctgtggcagctcctgcaggtcagaggccaggactcctcctcctctgggtccttggctatccttcctccacacccgcatttgttcttgctttccccagcatctgggccttctgatccctgaaggacgtccatgccatgtgaggagctgccctttcctgtcaccctgcccggtgctgccacctgctggcctggcactctccgtactggaggaagcatataaaagctcccaggatgaggctgagcttggcaccctggtcatagggtggccctccctccacccacaacctggccatttagtagcggtgcttctcctggttccatctgtctgctggcttctgacctcactgtgccttgacagaaccaaaggttgttggaggtcaaatggcaaactgtagtggcaaaagcataaggatcaaagccagggtgctcaggtcagaaaccccacttcactgcttcatgaagctatactattgcttcatggctatacttcagcgccatcatctgtgaaatgataataatggtagtatccacctcacagggttgaggcaaggattaaatgtgaactgcagagaatagtgcctgtcatgtcatgagtgctcaattattgttaacttataataaaaataataacaataaagtggaatataaaccatctcatcgctctttcttgtccaaggcagacatgactaatcaatcatagaacttccccactgatggcagattccccagaatcctcaacactgcattccaagcagacaatcagagttggcacatgggatgatatccattcgccctcccagatctaacctggacctttcccattgcagtcaaggaaaatgaggcccagaggagggacaagactccctcaagccacttggaggcagagccacgggtcagacaggcgttcctggttctgctcgcttcttgctgtcctggcttctgatgtgtcacttcaccctgacctttgagcagtccgtgtgggcctcccaccactggaaatctcaccctgatttcctccttcttctcccacccttgctcctcctcctatgtccttgccccccaaaggccctgggaaagctatttttctgagacgtcctactgagcaggtacagagtagggagaagtggggcagtgaggccacagagaaacctgaggcctgtgtctgaatatctgcaggagcctccctgaggaatcaagacctttagggctccaagagagctgagcccaccaatttggccctatcacattcagtttttcagccttagcccagtgctataatgaagtccctgacagcccaggtccaggttctgggaatgctcactcttcactaataagaggttggcatggtgaaagactcgggggccagccctagacttctgtgtgggaaaggctgggagagacaggacatgacaatcccagagatgagagtcagtgggaagcacctgcttaccaacttctgagcaaaaacctccaaggaaaagttgggggctgatggtggagcaggttctgctgctgcttttcccctcgtaaacagctttgtcccagaagtagacctctgccacctgaacagtcttttaccttcaggctcagacttctggggaagaatcagtatttacaaggcttgaaaccaggagtatccacctctacccaaagcgcctccactctcagcttctacttagaaacccaattttctcttttccattccttccctgcaggggcaggatcaatctgtatcatgctgtccctttggttataaataagaaagacatagctcccgaccctgcaggctgagtttttcacaacagtgggaagtgtttgtgtgtctccatgttcagctccccagggatcaatgcctcatggcacagcaggctcatggaggaacacaggatagcaggatgcctgactgtccctcctcagcccagtgcccctctagctgagcgaatgagccacaggtaaggagaccaagcaggcacattccagacagactcctgggaggacaccattctttttagtaacctcaaagatcctgctggctgcattaaagatttcgaggtgacctgtcaacagcacagccccagaaaaattcatatttagctttatccaagatatcaccagttcctcagacctgcccacttctctgggcttgcccctctgttcacctgcctttcccattctcctatttccctagggcctctagagtcaacaagacagctgacttggaaccttgcaatgttggatactttgggatgtgatctacccactccatcttatagatgaggggactaaggccacaaaggggatgtgacttatctgaggtcagttatagtgtcaaaggttgaactggaaatagagccgcagactcctccagacttgtagtccagaacttatccattctagtcctctaggatgtgtctgctgccctccagccctgaaacagacttctactaggatatagcagttacctaggctaaaacgtttggaaatatttatccctgtggggcataactgagggaggcagaacatggggaagggaggaagcaggtgggaaaactattcacaggtgctaactgccaggaggctcctaaacccacaacagcccttccatccgtcacactctctgcaaagcagcaaggactctctctttccctttacccacactctctgcccaggctaccctttggtgacttctgctcttcctctttactcttcaaggctgctcttgtgctcattttggcctgtttcctgaggaacaacatggtaatgaagctgatctgcatgatgtgcttggggatccaacctccattggaaacgtcaattgagtcaaactatggactctcaagaatggaaacagaaaacacaaatgagagactgcatcctgtggcccaccctcctacctctcctgctcaagccctctactccaccctaggaggtcaaaacaaatcatacactacttctgctctaggtcattggtcatatttttcccgctaggtcattgattagcaaccccctaagcagtccctgaaacaatcccggtccatctgaggaaggagaattcctagagagaaggtcactgggggcccagcagcacctgcacgggcctcactgccttcttgtctctcttccaaggcagggaggtacttagcggtgaggaaaccaagtcggcccagaatcccaggcaacttgtgagccactaaggccctgaattctgactttgggagacccgaggcaagtcagctgcttgcttggtcctgtctgtgtcttagccatggtaagttccctctgcctggagcctcgtcacccctcatctcagattcacctggctagccccgattctgccttcagggcttggcttacacactggctcctcctggaagccttccccaaaaccccatgtgctacttcagggtccccttctaggctgccaccacacctcattctatcctatcctatagcatgattataattgcctgcttgtctctccctccaggaaagtagctctgggaaggaacaagagcagggcagatacttctctgagatagctgtatcctaaggttggctcggtacctgacactaatattagtgcaactagtattagttaaatgaaggaatagaacgaatggggcaatttacatcatttgagtcctgtagaggagaccaaagggaagggctgaaaggcagggaacaactcatactctgcgtcttattgtgttgaataactctaggaaacattccaacctgaaaagcacctatctattgatattcagagccctgtgccatcttggaagggaaacgtccgtttgtttgtaacaggtaatgcatgtgtggtgtacaaactgtaaaagataggaaagagcattcagagaatgtaagttttccactttctccatcccaaatggcttcttctcccacagacaattgctgccactgtctctggattagaaaccacttgacagaggggacagcccggctaagggccctgcatggtcaggtgaagagatctttaggagtcagtgttgaaggcagaaaacgcccccagaggttcccctcatcccccgttgcagcctgtgtgtctaagcgcttggccagagccagagagtcgccggcaagggaaactccgcggcgagcacgcagcagcagaagggttaacgcgccgggctccgcctcccaaccgcctcttccgggcagagaggcgggcttacgtcacttcctggagactggttgaatccggaagtgaccctagagaaacgagttgtggctgaggaccccggcggcagacgcaggttcgggaccatgagctggtgagtgaggcccaggcggcgggagctgctggacccgcggacccgcgaggcccctggccctgtgtcagtgccgcgtcccggctccctccggtcccgcgcgacccctccgccccagagcaaggcccgacagcccctgccctagggtcgttccctcggtgctttccggagtcgcagtctctcagcaggactcccggggagagtggcggatgatcctcttagcctgggactccgcgtctgacccgttttgccggactcgcgtcctcctagctccttgaagtgagggacttccttgttccctccttttttaaacacccattgaggtggagtcagtgtcgtctttctctcctgtgggcatctctgccccgcgccagtccctccagagctgtggccctcgctgtggcagcctggacccagttcactaatcaaaacccactcccttctgggtaactatcctctttgcacgacttagcaggcttcaaaagacaaggaaaacttgcttctctttttaaaggggccagaattacactccgcacacacccttccactgtgggattggactggttttaatcattccagagctattactcactgcctgccctctaaataggcatggttaagtttaaacttatgggaactatcatgccatgagaaaagaagccagggagtcttagagtaatagagtcacaattccagttgctgcagtatgatgtgatacttgggtcatagtagacacttcataatggtgtatttattttgtaagactcagtttgcccaaaaggcaatccccatttgttgctctcgattatttatgttcacaggagagaattgtgacttgcctgccttcctggggctttcttagaggttagagaatactcatatgcagcaccttaccttaccgtcaggcccaaggacctatatagccacaaccctggacctcaggggattcaactatagtgtgtgaataaattg

SEQ ID NO: 2530 - DNA, 6000 bp, Homo sapiens
ggtatatgatttttcaggctggttttgaattttgtttctagtaattttaataatatgggtaaaacaaaccacatgtacagagacagagaaatagctcatggcacacactgtggaaggctaaactactgagaaaaataaggagatgtcagtgtgatgaaggtggaagagtagggtctgtgagttacaacttccctgagcctcaatcttacttctaaagagaaagtattgccttattcaaacccacacaaacaatgtggaactagtttcacttaaatcttaccttttggctgagcgtggtgattcacgcctttaatcctagcactttggaaggccgaggcgggtggatcacttgaggtaaggagttcgagactagcctggccaatatggtgaaaccccgtttctactaacaaaatacaaaaattagccacgcatggtggcgtgtgcctgtaatcccagctacttgggagactgaggcagtagaattgcttgaacccaggaggtagaggttgcagtgaactgagatcacaccaccgtactctagcccgagtgacagagggagactccatctcaaaaaaacaaaaaacaaaacaaaacaaaaactcaccttttgtaattccagcactttgggaggttaaggtgggtagatcacttgagctcaggagttcaagaccagcctgagcaacatgatgaaaccccatctttactaaaaatacaaaaatcagccaggcatgttggctggtccctgtaatcctagctgtaccagaatcgcttgaacccaggagatggaggttgcagtaagctgagatcgtgccactgcactctagcctgggtgacaaagcaagactccgtctcaaaaataaataaaataaatctcacctttagaccgggcgcagtggctcatgctggtaatcccagcactttgggaggctgaggcaggcagatcacctgaggtcgggagttcaagaccagcctgaccaacatggagaaaccccgtctctactaaaaaaatacaaaattagccaggcttggtggcgcattcctgtaatcccagctacacaggaggctgaggcagcagaatcgcttgaacccgggaggcagaggttgcagtgagccgagatcgtgccattgcactccagcctgggcaacaagagcaaaactccgtctccaaaaaaaaaaaaaacaaaaacaaaaacaaaaaactcacctttaacaagcatatagagtagcaatagaatagaaagtgctataagtaagtaaaaaaatggcattcatttattcaacaagcatttattgagaactactaaccagtcactacgttagggaaacaagtacagtagtccccccttatctgtgggggatgtcttccaagatctccagcagatgcctgaaaccgaggacaacactgaattccatatataaagggacttgccacataatgatgctttggtcagcaacaaaccacacatactatggtggtcccataacattataacgaagctgaaaaattctgatcactattgcctgatgacctggtagccatcataacagcgtggtgcaactcactttttctacgttgagacccgtttaaatacacaaacaccattgcgttaccattgcctacagccattcagtacagcaacgtgctgtacaagtttgtaccctaggagcaacggtatactgtacagcctacatttgtggtaggctataccacaggtttaagtatactctaccgtgttgctacaacaatgaaaccgcctaatggagcatttctcagaatgtattcttgtcattaagggacgcatggctactggtattccctatatatgtatacctatgataaagttaatgtatcagttcggtggagtaagagattattgacaataactaataataaaatagaacgattataacaacgtactgtaataaaagttaggtgactctgctctctctctctctcaaaaccttattgtactgtactcactccttttcttcttgtgatgatgtgaccacggaaagcgaaatacaggacaagtagggactactgtaaagagatcctgtccacgccctcaagggacttacactctagctcaagcagacaccatttaataccacgtgataagtgcaatgccaaaggcatacttggaacgttaagtgggtcccaggaaaggaatagctaagcaatcttggggtaggagctagcatcaggaaaggcatcttggaaaagatgggccaaaactgtcttaagggaattagctgggggttgattttaggaaaggggaataacaggaacagaacgaaaccaagtcgggacactgcatttcctgggaacgaagggcaccctttccttatctgtcaaagataagtcagaagcattaccataggtcacttctgagatctgggacatcaactgcccggagagtggctgggtggacatcccagggtctttttattgttttctgttgcatcccagaccctacaaccccttcctgaaagggtaagtcgcgcttcccttaagaaaaagttgttagcaggtgtctcctttctcacaggggataattacaagggttcagccagaacaaaggccgcagatggaaggtgggaagaagacttgggataaggtgtgtggaggagcccacaggctctgcccaatcccagggagtgacgggacgtctttccgattaggggacgagaactccccgatacaaacatagcagtggcatcgcccctccgcgccccccacgccatgacgaggggacgccgggggaaatcctgcagccgtgggagggacggatgtgctgggggaccgagaggccgcgggaagaggcactcgcatccagaaggcattttagagcgagggtcaggcgcagcggcggactgcgggtcccggcttcggagcccgctgtccagcagggtccaggaggacgtggcgcccactcaccgctgctgctggtgaagtagaacaccatgatcccgggagcggtgcggtgactccaccgcggagcagcagcgctcaactcacgaagctcaggataccagactcgcggcggccgcctggcccccggaactcctccgtgcacttccggcggacgtcggggcgcgtcataacgccggccgtgggcgccatttttaatcctggcgaggcgaagtgtagtggcaaggagtttggttcagtgatttgtgggttaagggaaagaggctgggcatcttgggcacgttagttaacctgtctgtgcttcactttcctcagcagcgaaatgaagatgatactagagcagctaactcacaggatattttttagggttaaataagttaatgggcgccaagggtttagaacatagcacacaaacgagttgtttctgatactcaccaggacaatatgcctcttggggattggactttgttctggcttaaatcgaaggcctgccatcccaaacctctgaacctcagaggtcctcctgctataaagtaggaataatcatattcatgtaaagctcctacagcacttggctttgccctgattatttctcttgagaaagcacttttatctgaggaatgtgagtccctttaaattactaggtctggagaggcattaagataagaccccatcatgttctaccacccccttgagctatgtattcatctactgaaactacctgcttctgccacaggtagctacctactaacctaacactgccacacaagacactatgacatgacccacaccctatagtttaacaatgtctagccaatcactgatgcttgtagtttctatacatcaatgagaatgcttgacagttgtgtatcagcccacttcctgccccccttcttcgtctttaaaaacctgcttgtagcaaaggccagacagagctcatatccaagcctgctggtggagggcggtggggggaggggggttggaatcttctgggcagctgtccccgctttaactcaagcaaactctacattctttttttttttgcctcagccttttccttttaaactgacactcttacatcactgtcactgacttcattctatgaaattgagggcgtcacttaacgaaatttatttacatgcttgctttgacagcatgtatactaaaattggaatgatacagagaactttaacatggcccctgctcaaggatgacatacaaatttgtgaaaattaaatttgaaaaaataaacataaaactctaaacttatttgaaactaaaaatgtgccagaaacactgtaccaggagctggtgacacaaagatagtaacaatagctaacaataaccgttttaggaactttctggttttccaaagtaagaatttagctctgttctgtaaatagcaattgttttgggttctccgttgtattatttgtaaaatgggaatggcaatagatattaatgccttacagattgtggtaagaagtaaatgaaacaaaacatgtaaagcatctaagaatgcctggcacatagcaggtgttaagttttatattttaatttgaaaaataaatagaaacctaaagttactaataaaaaaagtgaaactgacaatgaagcttcaaatgtgaaaaataagtgcatcgagaatcttggagaggcctttatttatttatttatttatttatttttgagacggagtcttgctctgtcgccaggctggagaggccattttacaaaaatttcttaccccgtgaccccagaatgtatctcaacttcaactggaccgagaactacaattcccagaatgcacctaaacaaggccccgggaacggagtccggcgttgctgcaggggattgtgggtggcgtggtttccctcagagatttttcacctcaccagggcgcgagaatcttggaaacagccaccagggtgggcggggcaagggctggtgctccaccaatcaccgagccagcccctggaagcgctgagccgtggccaatcggaacgcagcggcttcctcctagcctggcgcgcgattatttgaagacgctcacggagcggctggctaggctgaggagagctcgccgggctctgaggcgcaggtaacctctggagtaggccgaggcggggggctgtggaaggctgaggcgagcgggagaccctgtggaacgtgggggcgaatgtcacggggaaagagcttttgctcggcgctcggcaggtccgcaggcccgagaccgaagaagccactgactcgttctccgcgctcacaggcgccgggtttccctcttcccgacgccggcgtttccttgttttgggtttagggtttgtttgtttgtttgtttccctgaccgggttcagggtcgggacgctttcctctcctacctttcctcgcttagccccagaggggtccccccttaagccgcagctcgacctgaattcccagagaccctggcctttcagtttgttcattcattaatagctttgaaataacgcttgtgtgctgctttggggggaatttccctgatcccagggaaggggaaggaaatgaattctgacgagccacgtagccgcctgctcgtgcattctagcatttgttttcagcagccttacgacttcaagagatttttataaaaagggaagcaaacggcttgctccgggctcatcagctaggaaaatggcagaggactgtgcttcacccgttttcttgctgggctctgatgaaaagttacagacggtctctgccttcattgaaggctgttgagatggggaaacaagaaaatgtcttaaatggactattagggaaatacagggtgccatggaagcagaacaagcgcgtgtaacccttggaggggtggaaggagagcaatgtcgaggaagacctcccagaaaatagggttttaacttggtgtgaaatagactaattaaagggggtataattttgataaagcgatttttaatattttgatgaatgtggttattgtcatttcttttaggaattcaataaagaaaatggcagctcttactccaaggaagaggaagcaggattctttgaagtgtgacaggtgaatc

SEQ ID NO: 2531 - DNA, 6000 bp, Homo sapiens
atataaataaaagacctctccttgggcaatcccatcccaattcctacaaatatgccttagttaattaaattaactttgaaatgacattccgtgtcttgctccaaattgcctttgttttctccaagatctgctcattgacaagctgtttcacaaggttcctgtttaaaatggttatgtttcgtccacagactgcagacgaattggagacaggttttatctatagccggcatggagtagccctcgcgttgtactcatttaactgtggaccaatggttcacaaacatacaattaaaaaatatatatctagggtgtttacacagtatcccgataaatacaatatggtaacttaaatctcctttgctgaaattcacacaactgaaggccaattcctgagttggcaatggggtgtggattttaaaaattagtcttttttaaaaatcaggccttcgctttcgcaattcaagtggctctcggcttaaacacattaagtcccaagctgtgactcccttccagtgaacagccgcgtaggcgcgggcacgcacacgtggacacacacactcacacgcgccctcccacacccctttccgtgtgaatcgcctgcgggatttagggcttctccaccagcgattactgtcaggtgcagaaagcaagcctctttgttctatgggcattttcctccccctggatttgactgttatttactggccacgtgagcgccaggcgcgggtccggcggggaaggcgaccccagaacagggtagacaaaagctggcccagagcgcgacccgtgcgccccagggacgtctccccagctcctgcgacacgcgtgaaattggcccggacctgcctcctgagaggcttttcccagaaatgtcttgttaaagcctttgtaaaggaatcagtgtttacttgcgccgggagagctccggccctgggtcctggcaggcggcggatttctgagctgctggagagcaacccgggaaagcaaaatcagccttggactgtcggggcccctggggctccttgctccttatcgaaagcgagttattagatagacccccacagtcccattcagcagaatgggaaactggactcagacaccttttgccctccccacagggaggccacgccgtgcggctttgaccactgatctcccacccggagtgcccgacgcccagggtcctgccaccgggcagcctcggtcagtccacagttgtggctccttccagggcctggactagggtgagcacaagccttgagcgcaacatttaagaagggcgccgaaaagtcagtaatcaaaagaaatatcttgatgcaatgcctctttaaaagaaaaaaaaatgcaaaaaatccatgatgaataaaatactaaattttaaaaagagaaaggatccgtgcagtgccatcgtaagccattttggagcccggagcaaaaggaaatatcaccttgcccaagcggtgcccctacagctcatccgagtagggcccgggggtcgaggcattcggggcccagtgggggacgaggccagtcgaaggtctcggaagtggaggctccgccgagctccggtcggggagtgcagggatggcccccgggaccggaggtgagagctcgggaaagccgctccgcccggaacaaaggcatggggagagggtgagcttgggcgggagagacccggcgggtaccggtgccctcgctgcctgggtcgggcttccacgcgcgccccggaatggaatacgctactctgcagcctccgaaactgcgagcgagtcctgtaactcccttgctctgtgattaattctcactaacaagacttggcaagatgtcgggcgaatgatttttggcttctgcacggtccccaccgcgtgcgtgcacaaacccccagccaaaagccgcctctgggaaattaaatgcaaaagagaaatggggatggggagggctgctacgtgaccaggaaaaagggatgcccagaaacatgaatcggacccagagctgctgaagtcctttcaaaaggtcattctttgcgggtacattttccagggtccagctccgcaacaaatgtggaccctgtcatttcctgaaaggataattcacaactatgcaagatagggtgaagacgtttcccaaacccgaaaaccttgtttttcccccgaccagggttaaataaacatcttttaggaagcgtggacaggagcgcagcctgctctcctccctcggaacaccattccggcaattaatgcctccctttgggtagtaaagcaacaaaccccacacctcactccgatcctgggcttcgggcgggaggactttctctttcatcttccaagcagggggttgcccacgttcttggggaagctataaaactgatttaatggctttagatgaaaatcgatcacgctaatgcatacgctaacgtctcaggaatcgcatattcagaaaggactggccgggccgaaagcgcacggggagtctggggctaggaggtgtcaggccccgctgggtgggcagcagcgctccggtcccctctccacttgggtaaccgggaaaaacctacggggctgtcacgcggggaagcgcgaaggtgccaagggatgaaagctcaaacccgagccctggcctcctcagccggctatttcctttggcgccgcccgcctagcggcggggtgcagcggcggcacaggtgccggtgtcgggctggaggcgcggcgcaggctgggcccgcgggtagacggcgaaaggcgccgcgcgctccattcacaaagtccgggcgctgcccgccgctggcggcgggtcggaggccgcctccctcttcctctcggcctcggttttatgaatgggcctgatggcgagcacccggcgccctgtttactccgctctttgtgacgtcgagttcccgtgaccgggagccagcggccgcgctccattcaagctccggggagggggtgggaggaggggcccggagggggcggggagtcagcgcggggggcgggggacagcgcggggggcgggggacggcgcggggcccggaatggaacggggcggggcctggcggggtagtacctagcgccccctcccccgggagcgcggaggagcattaataaacctctaagccgaggagaaaactctggctggggcagtgcgctgagcgccggaggagcgtaggcagggcagcgctggcgccagtggcgacaggagccgcgcgaccggcaaaaatacacgggaggccgtcgccgaaaagagtccgcggtcctctctcgtaaacacactctcctccaccggcgcctccccctccgctctgcgcgccgcccggctgggcgcccgaggccgctccgactgctatgtgaccgcgaggctgcgggaggaaggggacagggaagaagaggctctcccgcgggagcccttgaggaccaagtttgcggccacttctgcaggcgtcccttcttagctctcgcccgcccctttctgcagcctaggcggcccgggttctcttctcttcctcgcgcgcccagccgcctcggttcccggcgaccatggtgacgatggaggagctgcgggagatggactgcagtgtgctcaaaaggctgatgaaccgggacgagaatggcggcggcgcgggcggcagcggcagccacggcaccctggggctgccgagcggcggcaagtgcctgctgctggactgcagaccgttcctggcgcacagcgcgggctacatcctaggttcggtcaacgtgcgctgtaacaccatcgtgcggcggcgggctaagggctccgtgagcctggagcagatcctgcccgccgaggaggaggtacgcgcccgcttgcgctccggcctctactcggcggtcatcgtctacgacgagcgcagcccgcgcgccgagagcctccgcgaggacagcaccgtgtcgctggtggtgcaggcgctgcgccgcaacgccgagcgcaccgacatctgcctgctcaaaggtaaacgagggctccgggcgctagctggagtcggggagatggagggggtcttggcggcctgcgccttattggcacgggaaggagtccccggcgtgattcgtggttgcggggatccccgcgcgcccctttgtgtgtgttggtgtgtaggggtttgcaaggtttctgtgcaagtgcgaggttcaagtcctcagggaaagtgcggacgggtttctccggtcacctgcaattccgcaccgtcctagcgaggccccgtttattgacattaacggtcctagcctcgaggatgaagcgactcctctgcgcggtccatcttgagtcccgggaacagtttccaagtaccacggggcgcgtggggacaagataggcctgttggtttggcgtgctggggccctacactgagccggaccgggagaatcccagaggtggagaaaaggtgaagaggggtgggcgccgaggtacaattggccttgccagtttcactgaaaacaagaccctggcaaatgcagaaagggagattgggttgcacacactgtgtagagcgatctgtatctgcgttcccgctgcccaactccaagctcagcttggaaggtggccaatccccgtcccgggctagatccaggctctgggagcgggaggctgaaggactgggtatctgggggacgccgggcggaaccggtcctctagcgcctgcaaatccgggcagcggagaatgatcaccttttgttcagcccggattttcgactatctgatggcggcgcgtgccggattttagcgagccctggcgaaactctcggcggcgagactgtcttgtcacatttggtagtcggaaatcctggaaaaatcgcgtgctgtccgagtccctggagggacctggcgcccgccacacctgcagggcagggtgggtccgcggccctcgggctagggagcgggcagggcgcgtggggtccgggcgccccccgccgcgctgcgcctccgcctcccgccgccgcattccgcgcattcttccgcgcgggtagggtctgcgcttccgagcccggtaggcagttcagacccccccacacccatcaaagagccgctcctcccccccgcaggcgccttcgccgcctccctcccttcctttcctttccgctcctcttccgacctgtccacccgggaggaagggagctggaaagggggcggaaacctctcccctccaaaaagcacaacaaaactgttcagtgcggaggagccgggttcgcccctgccggacagcggggggctttgttccccgcagttgtttcctgcccatttgacctgtcagctgctggggaaacgctgctgttgacctttggttgaactgctaaggcgattttgctgatttttctttctttttccgcgagggctgtcttttgctcctccaaatgagcccagtccccctcccttctccccaaagcgctccaagagaaagtgccaggaaggggcttgtcccggaaggcctggcggctgagcggggccaggtcctggttaggccaccagggtgggcgtccgcgccattgtttgagcttgtcggcgctggtgggagagatgagggcaattcctctgggacgcaagtcccctcgaatggccggggctggccgggatgttccccgcacggcgctgccctcgagtccccccgatggagagcgcgggcgcgccttccttcgctggcgtccaaacccgggaccagctagaacacagcagggctgggactgggttccagccccacgtggagtctggatttgttttgttgtgttttgctttccttcctggaagaaatcccgaggggaccgccctagagcggcagctccaggacctcggcccttgggcttccgggggtgcagccacttaggccccgctcccggggagagagggattattttttaagatttatccccagggcgcgcggcatttccctgtccctcgtgaatcccgttgagagtcctccctccccaacctcctccatttccccagccagaccgattcgagagccctggagattctgggcgaggctagtgactgggt

SEQ ID NO: 2532 - DNA, 6000 bp, Homo sapiens
ctcagcctcacgagtagctgggactacaggcacccaccatcatgcctgactaatttttgtatttttaatgttggtcaggctggtctccaactcctgacctcaagtgatccgccagcctcccaaagtgctgggggattacaggcatgagccaccatccatgcccagcctccgagttcatttttatcccgtttggagaagtgtttctttccaaaatttgtttctgaaattttgaagacgttttatcaaaatgcttgggacgttagcacgtgactaaacaaataaataaaaactatgagctctgctgtccatgagtttatattctaaagcagggacaaggaggagctagagatcgtcctttatcttatggcattatagtgtgcttggctcttcagagggcgagatgggaaacctatgaaacttggactcggagctgagaagtcttcttctgctcagaatcatacagggtcggaaatagaccagacctgagaaaccatcctgcccaaactcttcattttgcaggtgaagaaagtgaggccaaaggagactgtcttgcccaaggccaccaagctagatggtggcatagcctagattgaatagttttaaaataaagcagtaaataaagcaatgcattaaaacctttctgcagagaccctgggttagaaacttaatcttttattattttttatttgtatttatttatttattttgagatggagttttgctcttgtcgcccaggctggagtgcagtgaggggatctcagctcactgcaacctctacctcccgggttcaagcgattctcctgcctcagcctccagtgtagctgggattatgggtgcgcgcccgtcatgctggctaattttgtatttttagaagagacagggtttcaccatgttgaccaggctggtcttaaactcctgacctcaggtgatctgcccacttcggtcttccaaagtgctgggattactagcgtgagccacctcgcctggccgatacatagccttttaaatcattaataagtgctagagtatcaagcatagaaaacaaaaaagatctgtaacaaagtcaggacttaaaaaaagaaatcctcaggctatgtctttgagagtttttggttaggttcagtgtgaactttgaagactttccttcgctttcagtcctgacttgatgggcagaggtacgtagggaaggacaggcatttctcaattccatttctaaacgttgcctaagaacacgctgtgtagaccacaggcttctctgctttcaggagcaggagagggtctcccagttcttttgagccttcccactaccagggggcaagttccctaattagttgatctaagaagcctaaccaacaagatctgtgcaaaatggattattcctgttccagttcgacgtaatagcaaggctgcctctttgctcaagaaaggaaaagccacaggacttttctttccatcaccaccttaattaattcattaatgatttttcaggcaagttttattcaggcactttgggacagagcagtgagtcagaggttggcatcaaaactagaatagaagctgtacttctctctggggattctactccgggctttagattccccgatcatacaacttcctaattggaaagaaatgttcctaaacaagagcaggtgttttgctggagcctgacagtgactaataaggtcggtctaaggactgactgatgaaagagaagctggatttacttgtcacagcgaatttttaaaagttctttcaccccgaggtttactgctgaatataaataaaagacctctccttgggcaatcccatcccaattcctacaaatatgccttagttaattaaattaactttgaaatgacattccgtgtcttgctccaaattgcctttgttttctccaagatctgctcattgacaagctgtttcacaaggttcctgtttaaaatggttatgtttcgtccacagactgcagacgaattggagacaggttttatctatagccggcatggagtagccctcgcgttgtactcatttaactgtggaccaatggttcacaaacatacaattaaaaaatatatatctagggtgtttacacagtatcccgataaatacaatatggtaacttaaatctcctttgctgaaattcacacaactgaaggccaattcctgagttggcaatggggtgtggattttaaaaattagtcttttttaaaaatcaggccttcgctttcgcaattcaagtggctctcggcttaaacacattaagtcccaagctgtgactcccttccagtgaacagccgcgtaggcgcgggcacgcacacgtggacacacacactcacacgcgccctcccacacccctttccgtgtgaatcgcctgcgggatttagggcttctccaccagcgattactgtcaggtgcagaaagcaagcctctttgttctatgggcattttcctccccctggatttgactgttatttactggccacgtgagcgccaggcgcgggtccggcggggaaggcgaccccagaacagggtagacaaaagctggcccagagcgcgacccgtgcgccccagggacgtctccccagctcctgcgacacgcgtgaaattggcccggacctgcctcctgagaggcttttcccagaaatgtcttgttaaagcctttgtaaaggaatcagtgtttacttgcgccgggagagctccggccctgggtcctggcaggcggcggatttctgagctgctggagagcaacccgggaaagcaaaatcagccttggactgtcggggcccctggggctccttgctccttatcgaaagcgagttattagatagacccccacagtcccattcagcagaatgggaaactggactcagacaccttttgccctccccacagggaggccacgccgtgcggctttgaccactgatctcccacccggagtgcccgacgcccagggtcctgccaccgggcagcctcggtcagtccacagttgtggctccttccagggcctggactagggtgagcacaagccttgagcgcaacatttaagaagggcgccgaaaagtcagtaatcaaaagaaatatcttgatgcaatgcctctttaaaagaaaaaaaaatgcaaaaaatccatgatgaataaaatactaaattttaaaaagagaaaggatccgtgcagtgccatcgtaagccattttggagcccggagcaaaaggaaatatcaccttgcccaagcggtgcccctacagctcatccgagtagggcccgggggtcgaggcattcggggcccagtgggggacgaggccagtcgaaggtctcggaagtggaggctccgccgagctccggtcggggagtgcagggatggcccccgggaccggaggtgagagctcgggaaagccgctccgcccggaacaaaggcatggggagagggtgagcttgggcgggagagacccggcgggtaccggtgccctcgctgcctgggtcgggcttccacgcgcgccccggaatggaatacgctactctgcagcctccgaaactgcgagcgagtcctgtaactcccttgctctgtgattaattctcactaacaagacttggcaagatgtcgggcgaatgatttttggcttctgcacggtccccaccgcgtgcgtgcacaaacccccagccaaaagccgcctctgggaaattaaatgcaaaagagaaatggggatggggagggctgctacgtgaccaggaaaaagggatgcccagaaacatgaatcggacccagagctgctgaagtcctttcaaaaggtcattctttgcgggtacattttccagggtccagctccgcaacaaatgtggaccctgtcatttcctgaaaggataattcacaactatgcaagatagggtgaagacgtttcccaaacccgaaaaccttgtttttcccccgaccagggttaaataaacatcttttaggaagcgtggacaggagcgcagcctgctctcctccctcggaacaccattccggcaattaatgcctccctttgggtagtaaagcaacaaaccccacacctcactccgatcctgggcttcgggcgggaggactttctctttcatcttccaagcagggggttgcccacgttcttggggaagctataaaactgatttaatggctttagatgaaaatcgatcacgctaatgcatacgctaacgtctcaggaatcgcatattcagaaaggactggccgggccgaaagcgcacggggagtctggggctaggaggtgtcaggccccgctgggtgggcagcagcgctccggtcccctctccacttgggtaaccgggaaaaacctacggggctgtcacgcggggaagcgcgaaggtgccaagggatgaaagctcaaacccgagccctggcctcctcagccggctatttcctttggcgccgcccgcctagcggcggggtgcagcggcggcacaggtgccggtgtcgggctggaggcgcggcgcaggctgggcccgcgggtagacggcgaaaggcgccgcgcgctccattcacaaagtccgggcgctgcccgccgctggcggcgggtcggaggccgcctccctcttcctctcggcctcggttttatgaatgggcctgatggcgagcacccggcgccctgtttactccgctctttgtgacgtcgagttcccgtgaccgggagccagcggccgcgctccattcaagctccggggagggggtgggaggaggggcccggagggggcggggagtcagcgcggggggcgggggacagcgcggggggcgggggacggcgcggggcccggaatggaacggggcggggcctggcggggtagtacctagcgccccctcccccgggagcgcggaggagcattaataaacctctaagccgaggagaaaactctggctggggcagtgcgctgagcgccggaggagcgtaggcagggcagcgctggcgccagtggcgacaggagccgcgcgaccggcaaaaatacacgggaggccgtcgccgaaaagagtccgcggtcctctctcgtaaacacactctcctccaccggcgcctccccctccgctctgcgcgccgcccggctgggcgcccgaggccgctccgactgctatgtgaccgcgaggctgcgggaggaaggggacagggaagaagaggctctcccgcgggagcccttgaggaccaagtttgcggccacttctgcaggcgtcccttcttagctctcgcccgcccctttctgcagcctaggcggcccgggttctcttctcttcctcgcgcgcccagccgcctcggttcccggcgaccatggtgacgatggaggagctgcgggagatggactgcagtgtgctcaaaaggctgatgaaccgggacgagaatggcggcggcgcgggcggcagcggcagccacggcaccctggggctgccgagcggcggcaagtgcctgctgctggactgcagaccgttcctggcgcacagcgcgggctacatcctaggttcggtcaacgtgcgctgtaacaccatcgtgcggcggcgggctaagggctccgtgagcctggagcagatcctgcccgccgaggaggaggtacgcgcccgcttgcgctccggcctctactcggcggtcatcgtctacgacgagcgcagcccgcgcgccgagagcctccgcgaggacagcaccgtgtcgctggtggtgcaggcgctgcgccgcaacgccgagcgcaccgacatctgcctgctcaaaggtaaacgagggctccgggcgctagctggagtcggggagatggagggggtcttggcggcctgcgccttattggcacgggaaggagtccccggcgtgattcgtggttgcggggatccccgcgcgcccctttgtgtgtgttggtgtgtaggggtttgcaaggtttctgtgcaagtgcgaggttcaagtcctcagggaaagtgcggacgggtttctccggtcacctgcaattccgcaccgtcctagcgaggccccgtttattgacattaa

SEQ ID NO: 2533 - DNA, 6000 bp, Homo sapiens
actttccatctctgtagatttacccattctggacatttcataaaaattgatcatataatatgtggtgttttgtgactggcttctttcacttagcataatggtgtccaggttcatctatgttgtagcatatatcagtacttcatctctttgtgtggccaaataatattctattgtgtggatataccacattttgttcattcatcagttgatggacatttgggttgttttcggaagcagctgttatgaataatgctgctataagcattcgtgtacaggtttatgtgtggacatttgttcacatctctcgagtatagacctagaaggggaaatgttgagttaaatgagatgggtatttttaagccaggcgaagtggctcactcctgtaatcccagccctttgggaggccaaggcaggcagatcacttgaggtcaggagttcgagaccagcctggccaacatggtgaaaccccatctctactaaaatacaaaacttagctgggcatagtcacctgcgtctgtagtcctagctgggaggctgaggcaggagaattgcttgaacttgggaggtggaggttgcagtgagccaagattacaccactgcactccagcccaggcgacagagcaagactcagtctcaaaaaaaaaaaagaaaagaaggaaggaaagaaagaggtatttttatctcatctcccttctagattacaaacatccctagggcagggtttgagtcattcctctcctggcccggtgctatgcacatcgacattcattaaatatttattgactaggacgaatcaatggatgacattttcaattttaacatataacatggtagggagttgcaggactagagaggcatcatgaatacaataaatctttttttacaaaagcaaaaaagaacaatcttaacactgacaagtaaaactgcaaaatatatatctcagaacctcagctcctcttctgtaaaatgagagcaacaatactttatagtgctgttgtatgaaaaattgtgttctatctgagaaggcctcaaagagacgtggcacacatagtaagcactcaatcaatactttgtagccagttcaattcaatacggtccctcatccacaaaccaatccagcatttggccttttgtgaaatattgtttagctttcaccttgaaaagcctgggttttcatctcaccttcagctctgtcttttgctgttcaacaagagatttttatacttgtgtctatattcatgatatcaaagcaagtagtttaataattgaaaaagaggtgactgatctagtgaatcttgctctccaggtaaaaattagaagtgacagccaggcgcggtggctcatgcctgtaatctcagcactttgggaggctgaggtgggtggctcacaaggtcaggagatcaagaccatcccggctaacatggtgaaaccccatctctactaaaaatacaaaaagattcacggctataatcccagcactttgggaggccgaggcaggcggatcacaaggtcaggagatccagaccatcctggctaacacggtgaaaccctgtctctactaaaaatacaaaaaagtagccgggcatggtggcaggtgtctgtagtcccagctactcgggaggctgaggcaggagaatggcgtgaacccaggaagcggagtttgcagtgagccgagattgcaccaccgcactccagcctgggggacacagcgagattccgtctcaaaaataaaaataaaaataaataaataaaaatacaagaagattagccaggcatggtggcaggcgcctgtagtcccagccacttgggaggctgaggtagtagaatggcgtgaacccaggaggtggagcttgaagtgaacacagatcatgccactgcactccagcctgggcaacagagcgagactccgtctcaaaaaaataataatactaataaataaaaaataaaataaaataaatttaaaaaaagaattagaagtgccatcccactaactctgctaggcaacaccccgatatctctggtcagatgtgttcatgaggctacatagtcttcaagtctgtggaattagacttctgcccttaagtgggggcataataaatctttttaaaacttagtttgcctattgtttagatatcaaatagactcaatctgtctacctcttttcagagtctggttcttgagatcatatgtttattttaatattatgtttaaatatgttagactataaaatagacatctaactacatacttttaatgttgggttaaactttgttgattaggattatctccacactacactgagtttgaaatgatagaatatctaaatttcagagtataaatgcatttcaattactttcaagtttaggtacaaaactcaagccagaacagaaaaatatcacctagggtcagtctcacttcactgactagataaaaatcatgtgtaatcagtacatcaactcaacaatctagaaattgctagctttagtctcttatgtgtacagtataatttttgtaaatgaaggatactcctaaaacatttgaaactttctaacctgatgaattggcaaattttttttcttttctttctttctttctttctttttttttgagatggggtcttgctctgctgcccaggctagagtgccatggtacaatcatggctcattgcagcctcgatctcccagcctcaagtgatcctcctgcctcagcctgccaagtagctgcaggtacaggcaccaccacactggctaatttattttattttatttttgtagagacagggcttccctaggttgctcaggcttgtcctgaactcctgaactcaagtgatcctcctgccttggcctctgaaagtgctgggattacagacatgaaccactgcacctggcctaacaaactattttttcttacaatcttactcgcactatgaatgtgcaagtaatgataataatagtaataataacaatagctggtaaaagattgcagtgcaggccaggtgctgtggctcatgcctgtaatcccagcactttgggaggccaaggtgggcagatcacctgaggtcaggagttcgaaaccaacctggccaacatggcttcttttaatgcatagaacagaggagatgttctcatttcctgtttgtgaacaaattcccaattaacactatgaaaactactgagttttgttgcaggggtcaacgagtaccctaaaggttcccaatttgtggtagcatttgacaattcacagacatgctactccctgggcagttaccaacaactgaatcttatgatcagcctctcagccctgtgtacttccacccaatcacctccacaaatcacaaccaggggtctttcaggcctatccctggggtgcggggtgggggcagggagcagaggagatggagtttgtaatttgaaatgggaccccatttgaaaaaagtagccaattcttgtgtgaccattatagaaagacctagaactaagagagagccttgaagacctgaatcattacctgttactcctctttaccacacaggatgcacactgtgctgtggggaacacgatcacacagacaaggctgagtgaggcagcaccctaccgcccacagtttaagaacaagaacacctgcattgcgatttttcttttcttttttttttgagagggagttttgctctgtcgcccaggctggagtgcagtggcgtgatcaaggttcactgcaacctccgcctctagggttcaagagattcttgtgcctcagcctcccgagtagctgggattacagatgtccaccaccacacctggctaatttttgtatttttaatagagatggggtttcgccatgttggccaggctggttttgaactcctgacttcaggtgatctgcccaccttggcctcccaaagtgctgggattacaggagtgagccacagcacccggcctgcactgcaatctttcaccagctattgttattattactattattatcattagagacaggatctcactctgttgcccaggctggattgccgtggctcaatcatagctcactgcaacctccaactcctgggctcaagtatttgggactacagacacaagctactgtgccaggctagtttttaaattttgtgtagagacagggtctcactatgttgcccaggctggtctcaacctcctgagctcaagcaattctcctgcctcagccttccaaagtgcggggattatgggcacaaaccactatgcccagtccaaccagctattattactattttttaattagaaggaaaaaaaaaaaaacaaaaaacagagggatgtgggtgtgtatgtttcttggaatccaagcgatcagggggaaaaaatccgtcaaaaatgttctcagtacaaaagttggcaaaacagctctcttttttaaactgaactttgtaataggagaaatactctcacaaggacaggatgtttctgagccaagttgaagcaaaagaaactttttccagcatgtcaggaacgaagctgacgttccattaagaaaaaaaaaaaaaaaaaaagaagtgctagaggaaggagtaagaggtgaaaaggcaccagaattcagacggagctttaaattccagacagggccagcgttgggagcacgtaggaggcgcccctcggaaaggagccggagacccagctgacttcgcacttgagctccagccccgtggacatttcctgttctgcctctggaaattcaagctgaaagttacaaaacatccttttccctggaaccaagtgcttggttgggagaccatgccctccccttccttcctcggaactcctccctgatcgccccgtggcttccccaggagagatgcgaaatcagcggtagcaggtggcgcagaagggagaggggagcgaccctggggaccgactctggggaccctcgccgaagaggtaggaaacgggggactgcacgttcctgaggccacttcacacttattgagcaaaacgaggtgctgtcctttaagcctggggctgaggtgtttccctcgcttgggtatgcgccgggtggtgggtggactggcctcgaatctggaataagttcaggcattccttttccctctctctttccaagttgaactttaattcttgggtctctggaaccacgtattttgtttggtgtgggaggtattaaatggcagaattctaggaagtaaatattgtgaatccctgattttgctcttttctttattttcttttctctttccttttcttttcttttccctttgcttctctcttctcttcttttttctttccgcccctgaaatgcccaggagcagtcataaataccttcatctgggaatagattcggggagaagtgagaaggggacagggctgggaaaagcattctcaccacggtgaacggggcgcggctgttttccgggacctgggccatgtattcttctggcccagatgctctctccgtcccttccttctgcccactgccatagggacaactaccttgagttgtttctccgggtgcagggatgtggcacagaccctggtcagggcccttgagcatcagtgccctgcgtttatggacagaactcaggtgctgtcttaaacgtttctgtctggggcagagctaactggtctacccaggagcctgcgtgtagtccttggcttcgtgagggacacccggcagtcggtctctggaaggccagccttggcaatacatgtgctgacactggacctgctcagagaactcagcatggcttctgcataaggagtactcagctgggttcacatttattgtatacatttgtttctcttagaaaatggcttttgaacttaaaaaacgtcttgtgtggccgggcgcggtggctcacacctgtaatcccagcactttggaaggccgaggcgggcagatcacttgaggtcaggagttcgagactagcctggccaatatggtggaaccctatctctactaaaaatataaaaattagctgggcgtggtggcaggtacctgtaa

SEQ ID NO: 2534 - DNA, 6000 bp, Homo sapiens
gtctctactaaaatacaaaaaaattagccagatgtggtggcgtgtgcctgtagtcgcagctactcgggaggctgagggaggagaattgcttgaacccaggaggcggaggttgcagtgagcacagattgcaccactgcactccagcctgggcgacagagcgagactctgtctcaaaacaaaaataaaaacaaaaacaaaaccccaaaaaccccaaaaccaaaaaacaacaaaaaaaaccttcttgaccgaattgttatgtgcgagtggaaaccttaaccacggacatgaaattctaccccacttggactccatcacaggccatgtgtcctctttggctccagctggtcattgtattcagcagcccactgacccagagactaacaaataagggctgcctccttccctctcttttcattctcctcctcctccttcttgtgtcacaggcaggcataaattacagggcaccaaaaaatagtagattttattctctctatgttctgtatcaaatgcaataccaagtagtgtccaactatgatcctcctgccctctgcttgaaggaaaactcagttctgtgaacgattctgagccccagaattggcattacgaaatttctcagtcactggggacagacaacagcagggttgcccataacttacagctggcctctgagtgtaccattttagaaccacaccaagggagaggacatgtttccatttctttaataactttcatcagagcataaattgtgattgcataataactattcatatcatcattagggatgctgaagtgttgtgttttgttttgctttgttttttggagacagactatcgctgtgtcgcccaggctgcagtgcagtggtgtgatcacagctcattgcagctttgatttcctgggctccagtgatcctcctacttcacgctcctgagtatctgtgactgcaggtgagccccaccatgctcagccaatttattttttattttttgtagagacaggggactctctatgttgcccaggctggtctcaaacttctgggctcaagagatcctcccctcttggcctaccgaagggctgaaattacaggtgtgagccaccatgtccagccttttgttcttaactgaaatacaaaaagcaagaaagagtttaaacccagtgacattaatcagaggaactgcagacatcccacagtctatgcctttcttggagatctgcagccaggctctgagatggagaaacagatcttggttctgcttccatgagagggacaaagcattatatgttgtggggtaagatgtgtctggggatctctggtctgtcttggacatttttccctaaaagccctcataagtttacttcacaaagacaacacttcccttcactgtgtccactcagcctggcccaaagccccagctgccatgccagtcagggcagcaaacccagtaaacaacataaagcaaaaccagccaacacacaagcatctttgcagagatgccctttgggtcccatatgttaaatcttttacattattttacagagttccttttccccttgtctcaatttctctgcaacacaagagggtgtaggcttcactctttcctctttttctttttctttctttctttctttctttcttctttctctctctctctttcattttttgggtttttttttttgaggcagagtcttgctctgtcgcccaggctggagtgcagtggcacgatctccgttcattgcaacctctgcctcccgggttcaagcgattttcatgtctcagcttcccaagtagctggaattacaggcacgcaccaccacacttggctaattttttaaatttttggtagagacaggtttcgccatgttggccaggctggtctcaaactcctgaactcaagtgccacctgcctcagcctcccaaagtgctgggattacaggtgtgagccaccgcgcccggcctttttcctttactttcaaccattttagtggccccaccctgtgcctttctgcactaatagtagtaagattcttcccggcagcccgtcctgtctaccagagaaggaaaactttcccattctcacccttttctcctgcctctcccgctcctgtcttccctcagaataaccgactgggaataaagacctttctcaccagcagaggctgagcgttcctctgaagggaaccgcagctctgacagggttatgtttgcattatcaatgacacttcaatcacattgccatagtgttccaaacagactgtgggaggaacttgaacttaaaagaaaaattatctcaggagttcaaggctgcagcaagctatgatcatgccactgcacagagcaagaccctgtctcttaaaagaaaattatctgccaagagtcaacttttctttagctatttgaaattcttcataaaagaatctcaattccagcctcagtatacttttactaattgtttattttcccacttcaaaatactgtttatgtctaccatgtgtcaacattctggaccctgggaactttctggctaagtagactaaagataatttataaagaggtagtcgaagtctgctacataaaagagagatctggccgggcacagtggctcacgcctgtaatcccagcacttcgggaggccgaggcaggcggatcacaaggacaggagttcaatacagcctggccaacatagtgaaaccctgtctctattaaaaatacaaaaaatagccaggcgtgatggtgcgcgcctgtagtcacagctactcgggaggctgaggcaggagaatcatttgaacccgggaggcagaggttgtggtgagacaagatagtgccactgcactccagcctgggcaacagagcgagactccatctcaaaaaaaaaaaaaaaaaaaaagatctgttgtcaatgtaaatctccattatgcgttttctgattctttctggaacaactaaaatgtagtcacatatatctttattcccctacagcttcaagaatgaagttaatgttgaaaacaattctgtgtgcttcaccactggctctttcattcattcagcaaatagttattgtatataaaacaagaaccaggcactgtgctgggcactaagctagaatacagagaaaaggagcattcccagctgggtgtggtggcttacacctgtagtcccagtgctttgggaggtcaaagcaggaggatcacttgaggctaggagtttgagaccagcctgggcaacatagtgagaccccatctctaccaaaaaaaaagaaaattagctgggtgtggtggcattcacctgtggtcccagctgctgaaaaggctgaggcaagagggctgcttgagcccaggagttcaaggctccagtgagctttgatcgcaccacggcactccagcctgggcaacagaaagagacacggtctttcaaaacaacaacaacaacaacaacaacaacaacaacaacaacaacaacagagtgttcctgcctttaaagaacttatattctagtgaaagatagacaagtgaagagatcattattattattattattagagatgaagttgtgctcttgttgcccaggctggagtgcagtggcgcgatctcggctcactgcaacctccacttcctgggttcaagcgattctcctgcctcagcctcctaagtagctgggattacaggcgtgtgccaccatgcccggctaatttttgtatttttagtagagacggggtttcaccatgttagtcaggctggtctctaactcctgacctcaggtaatccaccccctaggcctcccaaagtgctgggattacaggtgtgagccaccgcgcccggccgggaagagagaattataaaataagattggtaaatgcttcgttagcagagttaacaagtgctataggagccctgggaaggacagcgataacatgggtgtaggatgcctgcatccatcaccaattgtgagcgcccactgtgtgccaagcatgttggaggaacagtgaaatcgaaacagattccctgtcttcatggagcttatgttctagcaagggagacaggcagtaacaaagaagatgtaacatcaagatgcaggatggtgtcatagaagggaggtttggagaaggattccagtctgctggaaaaagcgctagaataaggacaggtggctggagaggaggtgggtgggaggcaggaatgggtgaggaagggcatgagagatgctctaaagggagttgctaggtgtagctggatcgcagatgagatgatagggataggtgtttgtttgtttgtttgttttttccttgcgacagagtttggaggaaaattcattgcctggttgtcagagcctaaagggacattaaaagctaaagatgaacatactcccttgttttatggataaagaaaacaagactcagagagggtgaaataacttgttccaagttactcagctagttggaggcataaccagagcccagttttctgtgcagcgcagtccaggcctcccctagtctcaggaggcagaagcggtttaggggaaagagcatgccctttgcagggccgcctgggtcccctgaccccgtcacacaccgccccctcctgctgcttctctgaacagcagctcccggggcctcttcccgcggcttcccttccagccccggacccagcgggcggagagggcgacgtccgcggatcgcggagtcccgggggcgcccgcaggcctagcgccctccacctgctgccccgtgccacctaggagtttccttgccgggcgaggaggcgccgctgcccgggctccccgcagccccgcacgccccaggggctccgcatctccaggcggcagcacccgcggggccctgcaatccgcggagaagttggcggcatctgaagccacctccttccccgctttcccagcggcggggaccctacggccgggcgccccaccccgccctccctcgccccacccttcctcccgccccaccgcctccccgcccagggtctgggcacagccgcccgccgcccagcacaggagggtgcagccccggccccaagttctgcgccatgggaggctcccactctcagaccccgaggggccgggaacccgccggggagaggcacccgagacccacggagaccgcgtgagtcccagagccctctccaagggccgcctttgggggtttgcgtgccagcccgggatggagcgcgctggggcccgtcccagaaaggctgggaaggtggggttcccgctggcggcagcggggcacgagcgctcggcagcggggcacgagagtttggccagcagggccccaggggcgtccggctgggagcgtcctgccaggaccccaccgcgaccggatcgcgtccgggcgtgaccgtggtcctgccccagtacacgctgtactggggagacaaggggaccccggcctcgtccaagcagaaaacgcacgtgtcctaaagagctctgaaacattcacaagacagagttatttgtagggaggtgaaactatgagagaggcactcaagtctcaaaacgcaattggcgttggccctcggggtccaggaattttgacgcagtgcttgctgcttgcaagaactccctctcttgtttgctccaagggtttcatgatgatctcagaaaaaaagggcagtattgtagcagcagcaattaggcttttgttctgggacagcaacaattggggacaccaagtactgtaatgaaagctgtgaagggaaagttttagagaaagtgattaggagcaagtcctacggtttgaaagatggccaatgcttattgacagagaggggataacaatttatttggaaaccaaatagtctttaaatatttatttatttatttattggaatgcatgcgtgttttggaattgcagcagtgtcagggaatccatactctttattttaattcagcccatgtcgaagctatttagtttgagaaagatacacttaaccatcacaaaagcagcctggaccgcgggagggcttttgaatcatcttttcaaggcaaaatag

SEQ ID NO: 2535 - DNA, 6000 bp, Homo sapiens
gttggttccaagtctttgctattgtgaatagtgccgcaataaacatatgtgtgcatgtgtctttatagcagcatgatttatagtcctttaggtatatacccagtaatgggacggctgggtcaaatgccctcttttttaatgcctagtctgctcgaaaggaatctgagttcaacagaaggaaacaaaatgtgctaaatcagtaagagtaatcctccaagatgatattcctgtttaacaggctctgtaaatacaatagtgttgtttagcaggaaagaccaaacatatctattggaatagaagatatttctaaatttaaagatagttcactgctttaagtggagctttgtgtttgtttttggtttgcttgttttcaactttggatttgtggtggttggtgggaagaattagggataatgttggggttatttttcttcacttagaataaacaggctgacctaattctgtttatatcttttgcactcaacaactgcttctttaatatgtttacatcacagagtagagaactaaagtgaactttcttataaagtcaataaacatatagtcatgaatatttgatgggaatgagagaatctcacagaactggctcttcaatgacactagtgtagtgtaaatatctatctatctatctatctatctatctatctatctatctatatatatatatatatatatatatatgtccccccagcttctctgaaagctgacacagtgtaactcttctgtgtggcagttctgctataggtttgacctgtgacctaggttgaatggtatacttcctggggaaagcaaacttttcttctgtgatacagaagaaaacagatcaatgggtggatatgacaagagttgttcaccagagcaaagtctgggcaagggtctttcagcagaccccaggtggggggctcagccaagtctttaataaatgcagtttggatctttgttaatcttcctggaactctgaaagagtattttcttttttttttttttgagatggagtctcactctgttgcccaggctgaagtacagtggcatgatctcggctcaccgcaatctctgcctccccggttcaagtgattctcctgcctcagcctcccgagtagctggaattacaggcgcctgccaccacacctggctatttttatattcttagtagagatggagtttcaccatgttggccaggctggtctcatactcctgaccttaagtgatctgcctgccttggcctcccaaagtgtgggattgcaggcatgagccaccgcacccagcctgaaagagtattagctatgaacataccctgacacctctcttttaaaaaattagaaaggagcttctctttataattttctgtataaatgcattgtacacagtcctgatttcggtgtttgggtagtggagggaagattgtaattctatagatgtttgtagtctacaggtaaaggataattaggtaaatatctgatcttgcaaggttaagactgtcatgttaacatatttgaatgcggtcagatgctgttattggcaatgttgtcttgattagacatcatcatgcccttgcctggttagactgaggtagggcagaaaagcagatagggtggccacagcctcctgttggcaatggcacgtcttcactgacagggctagagtgttcctagttgtgactttgcaacctgtaccaggtaagaacgaagccaggactaggagcagcagactgagaggagtggtccagctaatggactcatattcattactgcttacactaagttcaagaacttgcagaggagtgattttcagaaaccttaggcatttatttgctagtccagtctcaagaagttgctgcaggccgggtgcggtggctcacacctataatcccagaactttggaagtgggtggatcacctgaggtcaggagttcaagaccagcctggccaacatgatgaaaccccgtctctactaaaaaataaaaaaattagctgggcatggtggcaggaacctgtaatcccagctacttgggaggctgaggcagggagaatcgcttgaacccaggaggcggaggttgcagtcagctgagactgcaccaccgtgctccagcctgggtgacagagtgagactccatctcaaaaaaaaaaaaaagtaaattgctgcataggtgaggcttaatcttactggggccatcacttggtcctgggttctgttattttctggcccagaaactagatttccccagggggagtcaggctttaggaatttatgtcaccttagccaaactcacaaggactatttgtaaactagaatgtttgttttttcttacatatatattgaacacctactgagtgtgtggttctgtcctaatttctggaggaagtcccaaaggggggtaaagtccctttagaagcttgtgggacagatatgtaaataaatatgttatatatggtgtgctaagtgtagaatggccttacatcctggtcttctggagacagtcctggtttatgcctatagtccctgtgtaactattaagaatgctgtctttcactttcagatctaaggccacaggaagtgttctttatggatgttcggggtatagaaatgatagaaaggaaggacaatgagcctgcttccccctgtagacacttgagctaagtgctgaaggacgttcgagcagctgaagcctgggaacttggggtgggctggggtgggggaggaggtgtgttccaggaattcgcaaagctccctctgcaggcaaagggagactgttcccgaagcagtaagcagttggttcaagctaggcactgtttcccaaatttaccctgtgataacagttccccaggacacttagtgaacacacagatttccagactctgctggcaatttggatttttttaagaaggctggcggatgattcttgggcatattaaagattgacaacgagttctctactcactgtggctaggaatacaaaaggatgggcatagaggggaatgggaaccgaaagattagagcacgagtcactgatcagccaggcaggggtgacctcaggcaagaaaaccttcagaggtaaaaccaggtgggagttatttacagtagatcatgaaagatggggagtgcgggaactatgtcagtcaccacagggatgcaaaggaatgaaaagataagagaactattcaggaggaagaacaggtcctagtgtatgctagttactgatttgctggggtaatattatttcccagaaacagaaccctgtgtcaaatccaggagcctgggggactgtagaacctgaagttttactgggtaagcataaacctaaaactacaacagttggataagtggtgtgatatatttcacatggacctcctgcctagttcacttctttatagtcgctagaacactcatgacaatttatttctgggaagaagccaggatgaattcgaaagcatcctgacaccccacccctttcttttctctagacttcaggttaactcctgcccttcggttttggtaaaactaccctgccaagccttatcttgtattttgctcctgtttttgttatcaaatgtgtaaaacagtcacgatgaatatacatgccaactgctttcagaggcaacggttagtctcttgcaagtttcaacgtgcacattttggagctgctgtctctgtgggaacctgcaggcacctcatggatgcaccacaactcggaaattacagtaccacctggaacaccttatccaggcaaggagatcattaagcctggtgtttgaggcaatcgattcacttggaagaaggtgctttggtggttttgagaggaacaatccctacatgaaatccctccatgggaaatggagaacatcagctatttcccattgccttcaaacctaaagatgtcgccaggcctcttggcttgttactgaagcagcgaaataagtcagaaatcaaagacttagaagttacgaaaagaaaatctcaaaaaggagaatggggtcaggcgcggtgtcaggcctggaatcctagcattttgggaggcagaggcgggaggatcgcttgtggccaagagttcaagaccagcctgggcaacatatcgagacgcctgtctgtattttaaataaataaatatggagaatgggaaacccatcaggctgtaatctcacagggaatttagtaccctttacctaagacaagacctgggcacttgggaagcctccccgagtgcggtttggggagggggagggcatcttaaattccagtcctcggtcactcttgtggctttgccaagggattttcaaatcccgggaatgccagggatggagatgaacaggctgaaatcccccacgctgccagggttagggaggggaaaacaacagtccacagcggccgcgaaggtttgtatttttttttttttggtaacaaggggcttgtgtgcagtccaatatcaccatcgccgtgaagtcacagtggcaagatgaaaatgtttaaaaaaattttaaaaaggaataaggaaagaggaagaggacagcgtgccccggctcagaaaacggtcctcctctgccccggacgccggcggacctgtggggtatgaccgaatctccccgcgcagccggcaagccccggccctcagtcgggccgcgaccagcgtgacgccgcggtagggggatccggcgggcgcgcggccgtcttcaaagccccggcgccgccgccgcccccgcgcgcgcgcgcgagtagtacggtccgagggggcggcttctggggcgcggctccggcggcagctgatgcgcgccccgccggccgggaggcgggagtccgcgagccgggagcgggagcagcagaggtctagcagccgggcgccgcgggccgggggcctgaggaggccacaggacgggcgtcttcccggctagtggagcccggcgcggggcccgctgcggccgcaccgtgaggggaggaggccgaggaggacgcagcgccggctgccggcgggaggaagcgctccaccagggcccccgacggcactcgtttaaccacatccgcgcctctgctggaaacgcttgctggcgcctgtcaccggttccctccattttgaaagggaaaaaggctctccccacccattcccctgcccctaggagctggagccggaggagccgcgctcatggcgttcagcccgtggcagatcctgtcccccgtgcagtgggcgaaatggacgtggtctgcggtacgcggcggggccgccggcgaggacgaggctggcgggcccgagggcgaccccgaggaggaggattcgcaagccgagaccaaatccttgagtttcaggcaagtacacggcgtccccgctgagatgcagacgcgcttgcctccatccatctgcgactccctctgtgtgcgtgtgtgtggtcgccacccgcgaaaccgtcctcacggccgtgccgcgtccctgcccggagccgggtccccgtgtgcgtccgaaagttcaggatcttctgtcctcccgtggggtttctggcccccgtttcgctaggagagttccgcacccaacccagaatctgcagtctctccgcatccccgctggcctcggtcactttctctaagcttcgacccccagcccccgcccctccacactggagcaacgtcactgatctaacccagtgcaacttagggcccccccgtggggaagaagtcgctccccggcccttcccggggccctaccgtgtacccaaaacgcagccgcggtgaagaaggtcgcgtgatgacaggcccctggcagctgctgggaaatggtggtctctgccgggctgtcatccgcgtgattgcggaaggcaggtgacaccattcttagcctcgggcccagggagttccagcaggtagaggcctaccgagcaaagaggaatgcctagcatcggcctaactcgggggtgggaccagtattaattgttaaagcctctgggaaagggctcttgtgacaaaaggagtctgttggaaaagcgcatttttcaggtgtctgagg

SEQ ID NO: 2536 - DNA, 6000 bp, Homo sapiens
ctgtcacccaggctggagtggagcggtgcaatctaggctcactgcaacctcagtctcccgggttcaagtgattctcctgcctcagcctcccaagtagcttggattacaggcacacgccaccacacccggctaattttttgtatttttagtagagacagggtttcaccatgttggccaggctggtctggaactcctgacctcaggtgatccgcccgcctcagcttcccaaagtgctgggattacaggtgtgagccaccgcgcccagccccagagcatttattttaatcaatgtaattttgatttgcatctatcttatgaatgaaattgaatatatttcaccattcatttattaatatatttgctttactatgaattactctattctttgcccattttcctattgtcattttatagattttatatattagggacaccagccctttgtgataagaattttgaataatttttcaagtttatcatttgtcttttgcgtccacctatagtgttttttgatattcagaaatttacttttatgtgctgaaatgtattagtcatttcttttacagcttctggattctttgtcatagtaacaaagatcttccccatgctggatagaaaatattctcccatgttttacttacactttatggcttagtttttttaatccttaaatctaatacatttggagtttatcctggggagtgttatccaacttgattttttgttggttttttttgagacagagtctcactctgtcacccatgctgtagtgcagtggcacagtgtcagctcactgcaacctctgcctcctgggttcaagtgactctcctgcttcagccttccgagcagctgggattacaggcacccgccaccatgcccagctaatttttgtatttttagtagagacggggtttcgccatgttgggcaggctggtctcgaacttctgacctcaagtgatccgcccgcctcggtctcccaaagtgcaggattacaggcatgaaccactgagcctggcctcccaacttgactttttaactaaaaggtaatacatgcttgtacattttgctgcctaaatttctatctgtagaagcagaagttcccctgtccccttcccactcccatagtactgtattagatttcttatgcattcttctccataggttttacagatgcctctatatattatacgtaggtttattgtatatccctctagtcgtttctttgtgtctttataaatactatgattttgaactataaaaaatatttacaatattggaatcacattagacaaatttcctttttcccttaatagcatatcctgaccattttttcatgtcagaacatatagctgaatctaattctttttattaggtcgtggaactatagcatttctttattgatgggcacttagttacaaacttttttacattgaaggtaacactacagcgaacatcctgtgcactcactgttatgccaggtgggagtatttctgtgaatacataactgaaagtggcattgctgcgttggagggcatgtacactttaaattgccctggtgactaccacattgcccgccacaaggcagcgccagttttcagccgcccattggcacatgagcctgcctgtctccttgtatctcggcccacacaggactgtccttgttaatttttgccaattcaatcaattttcaaagcttatcattttaatttacatgcctctgattgctaatgaggctttagcatcctttcatcagtttaatggctgttcatcaactgacatttatggtttttaagaatgcctttcaggccgggcgcggtggctcacgcttgtaatcccagcactttgggaggccgaggcgggtggatcacgaggtcaggagatcgagaccacggtgaaaccccgtctctactaaaaataaaaaaaaaaattagccgggcgtggtggcgggcgcctgtagtcccagctactcggagaggctgaggcaggagaatggcgtgaacccgggaggcggagcttgcagtgagccgagactgcgccactgtactccagcctgggtgacagagcgagactccatctcaaaaaaaaaaaaaaaaaaaaaaaaaaagaatgcctttcacatctcattaataaactcattccctgtaggcccgtgtctcacagatgtcagtggttagtatcccaactctagctgtgatcgtctccaaaattatgcagtctgcttttgtactggtctaaaaaaaaaaaaaaaatctaagactgttatagaaaccatttgctagtgagatacaaattttgaagttgtctgtaaattgaatttttataaattaaaatggaattatttaggtcaccgatttttgttttttttctctcatgcagtcaattctttgaggcctgtgcctcacagatgtcagtggttagtatcctgactggctttgactagtggctaatcatgtgctttttgtctctttattacacccaaacaccataaacagagccaatgaagagattgctcaggttcgaacaaaagcaaaggctgagagtgcagctctccatgctggactccgcaaagagcagatgaaggtggagtccctggaaagggccctgcagcagaaggtacagaaagggacctgatctgggtggccacagagacgtttggttttcctcctcagcagtgactcacttaatgacagatctgggtgaaagaggccttggctttctactcagacatttcagtccagctcctttctgaactgatccaggtggaaacaaacaagtcaaaccattaaattttcaagcacatcatgtggaaatcatccacaggcagggtgcagagaggaagttgcattttaactgaagttcagaacagcttcctagttggggtcatgagactgcctttctttctttctttgttttttatgcaatatattaatatgaagccatcttcccccttcattgctttagatcagtggtttgcagttgggggcagttttgccctccaggggatgttaggtgttaggtaatgtctggagatatatttgtttggttgtcaccactgggagatgctgctggtatctagtgcaggaagccagggatgctgttaaacatcctacaatgcacaggacagcctctgacaacacatttacccatcctaaaacatcagcagggctgctttgagaaactgctatagataaatgaaaaccaggactagcaacaatccctgtttctcactaagcaatttttagctttccgtttttatatgtctccggtgtattttctttactgcatttccaattatgtactcatacctgtgccatccattcatcaagagcaggagtttttatcacagggtctgttagcccctagaacggtgctccctgggagattcagactccagcatccctagatatgctaatggattgagtgagacccagatacttatgtttttgacaagtaccccagataattcctctgataacaagaaaattggggaactaagagattcatggacaagtttcagagggctggtgactgtcctcaccctttactcaatttaagcatgattttatgagtacattttttgaggtgtgtagcctttttttctttaaagcatctctgatgtagaaaagttaaaaatcactgaattaggatgtctagggtagggtagatccagacttgggactagttaactctatttgcctttatttcagaatacaaagtggcctgcataattatgtcatttgtctttcagaaccaagaaattgaagaactgacaaaaatctgtgatgagctgattgcaaagctgggaaagactgactgagacactccccctgttagctcaacagatctgcatttggctgcttctcttgtgaccacaattatcttgccttatccaggaataattgcccctttgcagagaaaaaaaaaaacttaaaaaaagcacatgcctactgctgcctgtcccgctttgctgccaatgcaacagccctggaagaaaccctagagggttgcatagtctagaaaggagtgtgacctgacagtgctggagcctcctagtttccccctatgaaggttcccttaggctgctgagtttgggtttgtgatttatctttagtttgttttaaagtcatctttactttcccaaatgtgttaaatttgtaactcctctttggggtcttctccaccacctgtctgatttttttgtgatctgtttaatcttttaattttttagtatcagtggttttatttaaggagacagtttggcctattgttacttccaatttataatcaagaaggggctctggatccccttttaaattacacacactctcacacacatacatgtatgtttatagatgctgctgctcttttccctgaagcatagtcaagtaagaactgctctacagaaggacatatttccttggatgtgagaccctattttgaaatagagtcctgactcagaacaccaacttaagaatttgggggattaaagatgtgaagaccacagtcttgggttttcatatctggagaagactatttgccatgacgttttgttgccctggtatttggacactcctcagctttaatgggtgtggcccctttagggttagtcctcagactaatgatagtgtctgctttctgcatgaacggcaatatgggactccctccaagctagggtttggcaagtctgccctagagtcatttactctcctctgcctccatttgttaatacagaatcaacatttagtcttcattatctttttttttttttttgagacagagtttcgatctattttaagtatgtgaagaaaatctacttgtaaaaggctcagatcttaattaaaaggtaattgtagcacattaccaattataaggtgaagaaatgtttttttcccaagtgtgatgcattgttcttcagatgttgaaaagaaagcaaaaaataccttctaacttaagacagaatttttaacaaaatgagcagtaaaagtcacatgaaccactccaaaaatcagtgcattttgcatatttttaaacaaagacagcttgttgaatactgagaagaggagtgcaaggagaaggtctgtactaacaaagccaaattcctcaagctcttactggactcagttcagagtggtgggccattaaccccaacatggaatttttccatataaatctcaatgaattccctttcatttgaataggcaaacccaaatccatgcaagtgttttaaagcactgtcctgtcttaatcttacatgctgaaagtcttcatggtgatatgcactatattcagtatacgtatgttttcctacttctcttgtaaaactgttgcatgatccaacttcagcaatgaattgtgcctagtggagaacctctatagatcttaaaaaatgaattattctttagcagtgtattactcacatgggtgcaatctttagccccagggaggtcaataatgtcttttaaagccagaagtcacattttaccaatatgcatttatcataattggtgcttaggctgtatattcaagcctgttgtcttaacattttgtataaaaaagaacaacagaaattatctgtcatttgagaagtggcttgacaatcatttgagctttgaaagcagtcactgtggtgtaatatgaatgctgtcctagtggtcatagtaccaagggcacgtgtctccccttggtataactgatttcctttttagtcctctactgctaaataagttaattttgcattttgcagaaagaaacattgattgctaaatctttttgctgctgtgttttggtgttttcatgtttacttgttttatattgatctgttttaagtatgagaggcttatagtgccctccattgtaaatccatagtcatctttttaagcttattgtgtttaagaaagtagctatgtgttaaacagaggtgatggcagcccttccctagcacactggtggaagagaccccttaagaacctgaccccagtgaatgaagctgatgcacaggga

SEQ ID NO: 2537 - DNA, 6000 bp, Homo sapiens
tggtgtatgtttatgtttaacataagctttcctcttctagtgggctggtgctttagtcaaagatggaaagagattatatgaagcagaaaaatcaaaaagggaatcctttgggaaattatttagtaagtgttcattaataattttaattacttttgtaaaggataaaagtttttataagcttggattttctgtagcatacttcatgtatatgctgttaattgccattgatatctaggaaatattccttttaaagtgtatagaattgaatccattgttaaattttaaacttgaagtactgtcaacttttaatttaccttttcaaaaaccagagataattttttgccttaaataaagctctaaaataaccatattgttaatttctttatacagggaagtcttttttaagaaatcgtctgtttaggggactggactcctggcccccttccttttgtgtatgtatttattttctaaccatgactaaattccatatgttttaaaaccttttttccagaagtagagacatttatcagaaacttgcagaaattgttgtggtttaaaaaaaatcaaaataaaagtgtttttggctttaaaagccagttagcataaagctttaagattgatatttgtattcataattttttataaagaatcttcataacacaggaagataccttatactgcactgttaggattggtagaaatagattcacttggtttttttgttttcttgtctcttcctttttttctttccacccttccctcttctttcttccactgctcttctccctccctcctcctttacagcctccacctcctccttgcccttctatatttcttttcacaccacccccctttatattttgacaaatcagaataataaagcctcagttagacttcactggaattaaacgttagtttgatatgtttctaaaccattgttatctggggtcattaattgtattacatgagaagaaacgtttccatgatcaaagcaatatgggggcttttacccccatcagatgtactcttagctgtgttgttgttgttttggagacaagagtcttgctctgttgtccaggctggagtgcagtggcacaatctcatctcactgcaacctcagcctcctgggttcaagctgttcttgtgcctcagcctcccaagtagctgggactagaggtgcctgccaccacatccagctaagtttttgtattttagtagagacggggtttcaccgtgttggccagctggtctcaaactcctggccccaagtgttctgcccaccttggcctcccaaattgttcaggttacaggcgtgagccaccacgcccagccatgcttagctgttaaacatgtttctatactgcaggatttcttagtgttttaaatgtatgcattttttaatacataagaattggtgacatagcgattcccatacttatttatccgagaactcttttttatgaagagcatcttggcatctccacatctgcttgagtaatgatttaaaacaagtttttttttaatgcaactcttggcaattttataaataatgaattggtaggatttaccggttaatattttttacagaagctaaaattgaccaaaactttgtcttctggaaaatgtaatggaaaagtcaaggcaaaagcaaataagaaagtgttacatggaaaaaaaatacatgtgtgcattttaatatattagtggctttaacatggtaaatattatatatatacgcacacacttacatatgtgtttaccatatgtatatgtacatacatacacatacaggataggaatattgtaattcccataaaatgatgctaaaagcagagaaggggaggaacaagtgcatcccttgatcactagcagttcacgtcgcagtttactaaaggctcaggaaaataatatgccatatctttattgaatggtctttttttgtttcttaatcatttaaagcactttagtttgtttggtatagtaaatttaattatagtaagaaatcatataaatttgctgtctgtttttggttgaaaaaaaattttttaagtaattaatttttttggtacagactcaaaagcctcgaaagtttgactgtgaacttccagatatttcattaaaagatttacagtttctgcaatcattttgtccttcggaagttcagccattcctcaggtaaatgtcattagtattttcagttaatttataaccttaaaatgtttttattattctggagttgtgccaggtagtaccagtaatcttaagaggtgccaagataagaaatatttaagatagactggctttcctgtgactgctttgagaaatttctggggaataaaaaatgatggaaaatgaaggtaaagtaaaggaagacatgccttacatgtaattatttttttctagtagttactttttgcatgctgttgggaaatttctgactttttacttttttttttttttttttttttcttgagacggagtctcgctctctcgcccaggctggagtgcaatggtgtgatactggctcactgcaaccttcacctcccatgttccagcagttctcctgcctcagcctcctgagtagctgggattacaggagcccaccaccatgccctgctaatttttgtatttttagtagagatgtggtttcaccatgttggccaggctggtctcgaactcctgacctcatgatccacccgcctaggcctcccaaagtgcttggattataggtgtgatccaccacgcccggccctaagtttttactttactgattatgacacaaacttcttaaaatacttctggtattaatttaaaaaggaatgataaggctcttgttatttttgacatattaaaatatttggtagcagttatctactagttcattaaaaaatcagaagtctaattgcattgcattctgtttcagggttcccttactttgtgactttgaacctctacaccagcatgtacttgctctacataatttggtaaaagcagcacaaagtttggatgaaatgtcacagaccattacagatctactgagtgaacaaaaggcaaattcaattctttcaaacagttttcgtcattagtgtaaaatgtttgtgttcctgcagctctttaagcctttctttctgttttccaggcatctgtgagtcagacatccccacagtctgcttcttcaccaaggatggaaagtacagcaggaattacaactactacctcaccgagaactcctccaccactgactgttcaggatcccttatgtcctgcagtttgtcccttagaagaattatctccagatagtattgatgcacatacgtttgattttgaaactattccccatccaaacatagaacagactattcaccaagtttctttagacttggattcattagcagaaagtcctgaatcagattttatgtctgctgtgaatgagtttgtaatagaagaaaatttgtcgtctcctaatcctataagtgatccacaaagcccagaaatgatggtggaatcactttattcatcagttatcaatgcgatagacagtagacgaatgcaggatacaaatgtatgtggtaaggaggattttggagatcatacttctctgaatgtccagttggaaagatgtagagttgttgcccaagactctcacttcagtatacaaaccattaaggaagacctttgccactttagaacatttgtacaaaaagaacagtgtgacttctcaaattcattaaaatgtacagcagtagaaataagaaacattattgaaaaagtaaaatgttctctggaaataacactaaaagaaaaacatcaaaaagaactactgtctttaaaaaatgaatatgaaggtaaacttgacggactaataaaggaaactgaagagaatgaaaacaaaattaaaaaattgaagggagagttagtatgccttgaggaggttttacaaaataaagataatgaatttgctttggttaaacatgaaaaagaagctgtaatctgcctgcagaatgaaaaggatcagaagttgttagagatggaaaatataatgcactctcaaaattgtgaaattaaagaactgaagcagtcacgagaaatagtgttagaagacttaaaaaagctccatgttgaaaatgatgagaagttacagttattgagggcagaacttcagtccttggagcaaagtcatctaaaggaattagaggacacacttcaggttaggcacatacaagagtttgagaaggttatgacagaccacagagtttctttggaggaattaaaaaaggaaaaccaacaaataattaatcaaatacaagaatctcatgctgaaattatccaggaaaaagaaaaacagttacaggaattaaaactcaaggtttctgatttgtcagacacgagatgcaagttagaggttgaacttgcgttgaaggaagcagaaactgatgaaataaaaattttgctggaagaaagcagagcccagcagaaggagaccttgaaatctcttcttgaacaagagacagaaaatttgagaacagaaattagtaaactcaaccaaaagattcaggataataatgaaaattatcaggtgggcttagcagagctaagaactttaatgacaattgaaaaagatcagtgtatttccgagttaattagtagacatgaagaagaatctaatatacttaaagctgaattaaacaaagtaacatctttgcataaccaagcatttgaaatagaaaaaaacctaaaagaacaaataattgaactgcagagtaaattggattcagaattgagtgctcttgaaagacaaaaagatgaaaaaattacccaacaagaagagaaatacgaagctattatccagaaccttgagaaagacagacaaaaattggtcagcagccaggagcaagacagagaacagttaattcagaagcttaattgtgaaaaagatgaagctattcagactgccctaaaagaatttaaattggagagagaagttgttgagaaagagttattagaaaaagttaaacatcttgagaatcaaatagcaaaaaggtaagaattaagtttagtctgtaattataaaattaaaatatcagtgattcgtttgtgtgtaatcacagtaccttgatttactcatttaccttgggtaaatgtagcaactagggtattttcatgaagtaaaaacttactttttagtcagtgtttcttgcaaacagaaataacagactaaatccatgagtggcttttaaaaaatgaatcagcagtttggattttcagagaaattttttgttgaaagtttgaaatgttttaaagagctctttgtttttccttttttaattcataagtttctctcttgatttatttgcagtttttttctaaactcttcagtagaaaattacttatattctctttaaatttagtatatatattaaagactaaaattttgttctgtatattgtttactaaaggctaaatcataggaacatgtagagtgttccttattgttattttcttaatacagtttcagttatttcctctgtgcttgaaagatgtttttaaactgcaggtttgatactgtggttgtggattggtggtgtttttacatgtttattattgttactgtctgatattactgccttttgatcacagaagatggtttttagtatttttacttttaatctgggtttaattgggttttgtgacccagtaaacagtttctagaacataattaatatgtcaattcattctatcatgaattctccaagtgaatacatatatatttcaacctgtgtcttgccttatcacttttatacaatctcttgtgattgtctgctctataatactcatatattggtatactgttaaacctccccttttggcttaaaattagaagctctttaggtattctgggggagggggcattagagggtttaatagaggaattagggtttgcatgtatgtttaaaagctggatgagagaaggttaacagagtcactgccaaaggccaggag

SEQ ID NO: 2538 - DNA, 6000 bp, Homo sapiens
cctatagtattctttctcctttctctgaatttacagaactcttaagtagttaatataaggtagcaggaattctcttatctggggggaaaaacctatctctcattatgaggacatctggtcctcctaaatcctcctaggatacagtcagctataaatgaaggggagaagagagctgtattttaaaaaatattgatccgacagggtggtggacattatctccattgatgcggtagtagcccgtgacccctcaatgagggagaattgctaataactgcagtttacagaactagggatcaggcaaaattatttctaatcatcttttctctctgaagcttttagtccactttatatgccacccagcactttgggaggcagaggcggacagatcacctgaggtcgcgagtttgagaccagcctgaccaacatggataaaccccatttctactaaaaacacaaaattatctgagtgtggtagcacatgcctgtaatcccagctactcaggaggctgaggcaggagactcgcttgaacccgggagtcagaggttgcggtcagctgagatcatgccattgcactccagcctgggcaacaagagtgaaactccatctcaaaaaaataaataaaaataaaaatatattgatcccactgcatttgtttccagatgtacaggaataacaactgaacccatatatatccatatttgaggaaaagaaccagaaagtatctcacatactcattaaaatctatccaacttatcaagtggagatttacaattttctcgagagattatcatgatgataaagtcaattatcccagccttactgtcaactattctaatacagtcaaaacttagaattaggccagacacagtggctcctgcctgtaatcccagcactttgggaggccgaggtgggtggctcacttcaggccaggagttcaagaccagcctgggaaacatggtgaaaccccgtctctactaagaatacaagaattagttggcagtggtagtgcatgcctgtaatcccacctactgggaggctgaagtgggaggatcatctgagcccacgaggcagtggttgtagtgagcctagatcacaccattgcctgtcgcctgcctgggcgacaaagtaagactctgccttaaaaaacaaaaacaaacaaacaaaacagaattcgcttccttatatgataaggtgaaagggggacaccccaatgacaatctctgaccttcaaaactggacacattcattattcatccactattttgggggcatctaaacataagccagacactgctaggtgcctggaatacaaatatcttcaagatgctttccagctgaatagaacacatgagactcagataaccctaaagtggactaaaagcttcagagaaaagatgattggaaataattttgcctgatctctaattctgtaaactgcaattattagcaattctccctcattgaggggtcacgggctactgcatcaatggagataatgtccaccacaaacggagtgtctaggttgcccagggactgaaaactgggcatcagtctccccaaatcagatgtattctaatctgatcctaccccttctctgccaagaaaaagaatgaaagatgagtaggtcaggcattttcctcacatttccctgaaagaaaacctttttcataaaagttcagacttcctaaatatacgccttgtctacaaactagacaagcaacttcgccaaaagaatgaagcgagcatttagaaaggtagtgcccaaagacagcaaatgaggtaaaaatagcagaacaggaatacttttaaaacaaaaatgaaaaatactttggagtacacccttcaggtttttttccctaggtgtacaggaaatatgtgtatattcaggcaatatggttttataaaaatgaggtgacaccctacatactactatggactttgcttgaactgcataaaataacagaaatctttctgtatcagtacatataaatgcattacacattttggtgtccctatcgtttataaaaactacataaaatgcatgattttagtgaaaattttctagttgtgttttattttataacggaaactaacagtaaaaccaaaattatctatatagcaaatatagaattatataagacagggaaaatggggaaaaaaaagaaaatgtagaattagctgcattctattaaaccaagattatctataaacatataaccaaattattaaaccagcctgcccaaatctggtatttgcagtaaaacaattactaaaagccgttatattactgtaatataatatggtattgaattaatatttcaacaggtatgctggacagttactgaacaagtataatgtgtggaatgtgaaggaaaaatgagtggacagtctcaaatcagtgacaaaaaaaggaaatggaacacaattatttttatctcctagcacaattacaagccaataaaatatgagagttcaaaagagcaaactaacgggtagaaaaaaatcatggatgaaaaaaaatgggcgaggattgttattccacaatcctcaaagcactcactaaacagccatgaaagcagaaacaaattagccaaggaaagagggtacttggaggcattcaagtactgcacttacaaaaagtaatccaacagaaccggaactttacaaagggatagaaagaaatgccatcctctcaggaccctaaacaatgggggtacagtttacagtcaaattaagttgatttggtccataataaataatcagagacaagtaatcttcacatccttttatctatgtgagttaagcaaaaactcatcaacctagcactatacaatcggcttagctagccttttatctactctacatcctcaaagtaatctgcgtttgtcatttacctccatgaaaatttccagtggttacccatttcctataaataaatatatatacatagacagatatgtctttcttgttcactgttgcattgctgaagctaaaagagtatgctgcaggggttcaattagcatttcaggaataaatgaagtgaatttggcttcaactgctttccagccatgctgggtttacttgaattcatctgtagacctttgtgagttagagcacattagtttccttactatgacttccaaacctgaatatgtagagccccacaatctaccattactatcgcctctctcataccagtccagcttcagtaacttcatttttcttggtatatgccatgtatatcagagcctttccatttactgtttcttctgccaaaaattcctttcgagagtcacacacttacaccccttacttctcttgggcctttattcaaaaggcaatcagtggccgggctttgggagtccgaggcaggcagatcacctgaggtcaggagttcaagaccagcctggccaacatggtaaaaccccgtctctactcaagaacaattacttaaacatttttatgttcctcatgtaactagttcaaaaacctcacagtggtaaaaagataataaaagaatcgtgaaagtgtgttgaaagggactgctagattttcaaagtgtcttaggccagtattactacaaaagaaaagtgtaactggagtcagaaaatatcattacctgaatgagaaaattttatcagccattcttttaaaaagatattcataagacatacacatctgcaaagtaaagcatgtaggtgctcaaatatctgctgaatgtatgatataaaattttaagttaatattagagtctaaaaacttttctcaggctaacataatcaaaatttaggttcaaaatttcgaaaacaaaagtcttgtgtcttctgcctttatgaacttgatttgctaaagtaaatctgccatgcatcctgatcttgtgtttggcagcaagagccaaaaaaaaaaaaaaaaaaaactcagggacaaaagtaccgcttcattgtcttccctgtcgtccaataacaaacatataaaggattaggtacataaataatcatatcttgattaccataaaaagttcaaaatagactaaataaaattactttaaaaatatgaactatgtcaatatccactttccatcaacagaggtttctcaacgtaagcattatgtgcctaaagcatccctgacataaaactttatccaggttttgaacacaatcacaaacattaaaagacatgacaggaatgttattgagaaaatatcttcattagggccatattctgttacaacaaatataaaaagcgaacatattttcacattcctagcaatggtctgcttataaatccaataatccaaaaactaaaatcagccacctccctcagtagttccttggtttctcacagttttatctgatcagaagtggaaggaccctctttttatcgtctatcacaatgtaataacattcttgattaaacacacaattaagtctacttaagtctcttcctaaattgctaactgtccaaacttatgtataaatcatacaagcttcaccaaaacacaaaaacttaagaaactacacaataaaatagttagcaaataggtacactttaaatgtttgcagcagacttgagaacattcccatctggctgaatgtctcgtagtaacgtgactctttatcaacagtgagcacatgagtcttccttggcagccaagtctacactacttcaaggtatgaccacactttaaagagtcatgatggaaacgactagattacgaaaccataaacagtaaacacagcacatccaccaggcggtggaagaaactatagagatattccattcagaagctgctatttctactgttggttaatgtatttttgtttctaccaaggaagctgtgaaatccgcgtgcacacccatcccaaatctatccgtggggcgggcgcaggctgagtcattcctaggagtaactttataccgatcctcgcactctggggtcgggacaaagacatcatctctccgttcctcccattcggtgagcttcgttcggcctcggccaaactccactctcccgtttctcgagtccaacacagaattaagggctgatccctggcagcgatgagcacaagtcaagatgcgtcttgggaggttcggacgtccctcgccctcggccactccggcaactaggccgggtactaagcggcagcgcagagggagggatcccaaggctccggccgaggaagccgcaggcagccccgcagcacgagtccgacccacacctccggcagcctagtggagcatcgactcgaaccgcttttgtctccacaggggctgtcgcgccgggaaagcggccagtgggcaacacctgccggggcgggaggcgccggggccctcccgtgcacacacctgcgcgtgggccgggctcaggccgaccggaaccctggaccatgcgaccccggcccaccgtgccagggcccgccgcgcgaccgctgtgccagatgggggaaggggacgcgggcggcggcgacacttacccggcaacgcctcctccttcgccggcggcagcagcagagccagcgacccccggcaccatcttccgccgccgcctagtcctcggcagcggttaccaaccgcccattcggcaccgctaagccgacacaaccgccggcgtcccgggcgcccgcccgccgcggccccgaactctaggaggcagggaggggtccgggcggacaaggacgcgagcaggcccctcggctctgggtctggggccgggggacagaaggccgcggcctgtcagagccgaggggcccaggcgactgggggattctgaggcaacgccgagggctcggcagggccgcggacaccgccgcggcttggtttgttattgtcgactccgtctcttcctccgcggcgcatgccgggaaacggcctgccgggggaggggcgcgcctggaggcgcagagaggcgtctacgcaggtccggaagtcggcagcctgccgggaagggggcggccccgcctccggctctccggccggcaggttggctgtcctggcctgac

SEQ ID NO: 2539 - DNA, 6000 bp, Homo sapiens
ttgctggttgtttgaacattgcctaaaagaaaattagggtaatgacactaagttgtttgagaaatatttaatacatgtgctgaatgcctcaggcagagttgacaaaattaagatgtttaccatgatcttcccaataaactgaatgtactttggtaaagaattaatatcatataaatttgttactgcaattatatttattttttttttctttttttgagacggagtttcgctcttgttgcccaggctggaatgcaatggtgcgatctcggctcactgcgacctccgcctcctgggttcaagtgattctcctgtctcagcctactgagtatctgggattacaggcatgcgccactggctaatgttgtatttttagtagagacggggtttctccatgttggtcaggctggtctcgaactcctgacctcaggtgatccacccgcctcagcctcccaaagtgttgggattacaggcatgaggcgtgagccactgcacccagcctgcaattattattattcttcttttttgagatggagtctcattctgtctcccaggctggagtgcagtggcatgatcttggctcatggcaacctccgtccccaggttcaattgattctcccacattagtctcctgagtatctgggactacagttgggcgccaccatgcctggctaatttttgtatttttactagagacagggtttcaccatgttgtccaggctggtctcaaattcctgagctcaagcaatctgcccacctcagctggtattacaggcgtgagccactgcaccctgcctttgttactgcaattgttttgaatggtcccctttacaagcctatgagatatttgatggcaggaattttccacagtaactttctagtcaaccatcaatataaatataaaaatttgcagaatgtattacatacagcaaatcttgtattaattgctgactgccaagctctccataaagttccaggaatttaaaaattaataatgcatagttcttaatcttaagagtttcacagactaagaggggagagaaaaatttacagttgtgagatacagagcaaagcttaatagaagagtggaaactctagaagttagaagctgctaacatccaagctgtgttttaagggatgactttaaaggtgaacaagtggggaagaacattcctggatgaggaaactcatatagagcacatataaaggggagaaaagtgctgggagatacactggagagatgggttgataccttatcatggagagactttcatgctaggttaagaagtttacccatgcccagggccgggcacagtggctcatgcctgtaatcccagcactttgggaggccaagacgggcggatcacgaggtcaggagatcgagaccatcctgcctaacatggtgaaaccccgtctctacaaaaaatacaaaaaattagccgggcgtggtggtaggcgcctgtagtcccagctacttgggaggctgaggcaggtgaatggtgtgaacccaggcggtggagcttgcagtgagccaagatcgcgccactgaactccagcctgggtgacagagagagactccatctcaaaaaaaaaaaagtttaaattgtatctagtatacaaaacaaaaccaatgaaagttgttaggcagggaagagatttgattagactggtcttggatggagtaaataatggagatggataggaggtcaattcaggtataaattgagggcctgaacaagttgtggggtactgtcaaatgtttgttgagtgcataccattatataccaggtacagtacatcttttaaaaaggagcttatagtcagcatgttagatgacactgaaagatacaatgtgagaatctaaagaaattacaagcatgtggccaggtgctgtggctcactcctgtaatcccagcactgtgggggaggctgaagcgggtggatcacttgagatcaggagttcgagaccagcctggccaacacggtgaaaccccatctaataaaagtatgaaaagtagccgggagtggtggcaagtgcctgtaatcccagttactagggaggctgagacaagagaatcgtttgaacctgggaggtagaggctgcggtgagcagagatggtgtcactgcactccagcttgggcaacagagtgagactctgtctcaaaacaaacaaacaaacaaacaaacaaacaaacaagcatggtagggaatgactcccagagtaggtgatattgaagttgagaactgaaggaaaaataggattttaaagatctgaactgatttgaagtacttagggtatttattgtacatcctatataatccctccatactcctaaagaaaactgttttcttttgccctcactgtaaatctactgaagcatctaaaatagttattaaatttaaaaaaacaataatgtgatgaggccagaattaggtttctctcttctgttctctcccacggcacattacctttgcatcattcgcacactattataattatctgaaaatttggaagaggtccaaagaatggacagatatttaggagcgccaggaaggaaacagcacaaaagggaaggaggagtataaaagttaaataatttaaaatggcgaatgctttagaaagttcaagtaaaatcttagtactgtaatttactgtaatttggaggtccttgttaatgatctgtttgcaagttaagtaagaaatgcacagtaggccaaaaatgagattggactgaggacttcctatcagaaagcttggttgagaagtgatgctacagaattttgtttgttcttttttttgttttattaaggaagggagaatagagggtgtccaataggcaacaaaagtaacttttcaagacctactaccatggatacatgtattagtaacttataaacagtatttcctctagatatttgcatatatataatagaattaatgttagtacattttcacttatccctaggaaagaattactgatgtttgttaagagtctgttaagaatatacaaactcttaacatttacactggaggtgtataaggtatgaaccagtcgtttctggtaatttattgcaacctgtgattaagagagaaggttaggactgaattaattcattttccaaagaaaaaagtcagacaacatttataatttaccagattatcactggcatagttcagaaatttttttttatttttcagacagggcaacaatctgttgtccaggctaggagtgcagtggtgccatgatggttcactgcagcctcgacctcctgggctcaactgattctcccacctcagccttctgagtaactgggaccacaggtgtgcatcaccacgcccagctaatttttgtattttttgtagagaaggggtttcactacgttgcccaggctggtctccaactcctgggctcaagcaatcctcctgcctcggcctcccataagtgctgggattccaggtgtgagccactgcaccgagctccagcaagatttttacattctaaattgggttatatttgtaataatgaatgtcactaataagaggaagtgcaagtaccaatacgttctttacaggcctcatactgcagtttttcttttctttctttttcttttcattcttggtcatactgccatttttcttagccaattttctggccaaactcctcctcaccacttattttctgtgtgctgatgactatgctttactactaaatttggctcttttgtcttgccagttcacaccttcccttaaggcataataaccatttactacttaattttcgcttttctcctctatcttgctggggtggtgtaataaaattccagcttaaccaataagtaaaatggcttgccagtgatgataaagaccacatttgtttgggatatgtagcagcacaaatttaaaagtaaataaataaaacaagcccatctcaatcctaacttacagatactggtcagtgtgactgaaaactgaaattgttcatgctaaccaacgtttttcagtttccacctaacattttgttcagtttggtgccctcttgtgcctcctatttttacaaacacaactcagaattcctgatgactttagagaaggcacctccaagttttcactcataccagatattcctggatataacaggaatttgagaactattatgtaattattctacgtgtaacatctgctcatcagattttaatattcaagcctcgtggcttcaagtcattgcctgtgactgatcatcttcacaaatgcaagagtcccctgaaactgtctcccaaccattagggtgctcatgctaacccctaacccactagacccactacaagattcagtatttgtaaagctgaaaacgtggttgtggcgtttacattttcattccgattggcctaggcttccctctcttctctcttgcatgttttcttgccttacctggtctgagaaatggtgccgccccacccttgcagagttaacagggggacgcttgccagctgcgtgcagtcccggcggtccggatatgcggggaggtggcggcaggaacgcctgggccaggcgctggtacgttatcctgttacagaccttggcctagtccgcaggttgcccctggagaggcgacggggacaccagaccctcgattggctccgctcctccgcgacaggctgaggggaacaagctctctttcgcctggggacgatccagtgtttggtgggtcgaccttagtcagggcctagctgtcgcaaagaaggtcaaattcaccttgggaaagtacgcaccgggacggcagctagcaccataacaggcggccccagcggagtctcccagggtcaggccaggacagccaacctgccggccggagagccggaggcggggccgcccccttcccggcaggctgccgacttccggacctgcgtagacgcctctctgcgcctccaggcgcgcccctcccccggcaggccgtttcccggcatgcgccgcggaggaagagacggagtcgacaataacaaaccaagccgcggcggtgtccgcggccctgccgagccctcggcgttgcctcagaatcccccagtcgcctgggcccctcggctctgacaggccgcggccttctgtcccccggccccagacccagagccgaggggcctgctcgcgtccttgtccgcccggacccctccctgcctcctagagttcggggccgcggcgggcgggcgcccgggacgccggcggttgtgtcggcttagcggtgccgaatgggcggttggtaaccgctgccgaggactaggcggcggcggaagatggtgccgggggtcgctggctctgctgctgccgccggcgaaggaggaggcgttgccgggtaagtgtcgccgccgcccgcgtccccttcccccatctggcacagcggtcgcgcggcgggccctggcacggtgggccggggtcgcatggtccagggttccggtcggcctgagcccggcccacgcgcaggtgtgtgcacgggagggccccggcgcctcccgccccggcaggtgttgcccactggccgctttcccggcgcgacagcccctgtggagacaaaagcggttcgagtcgatgctccactaggctgccggaggtgtgggtcggactcgtgctgcggggctgcctgcggcttcctcggccggagccttgggatccctccctctgcgctgccgcttagtacccggcctagttgccggagtggccgagggcgagggacgtccgaacctcccaagacgcatcttgacttgtgctcatcgctgccagggatcagcccttaattctgtgttggactcgagaaacgggagagtggagtttggccgaggccgaacgaagctcaccgaatgggaggaacggagagatgatgtctttgtcccgaccccagagtgcgaggatcggtataaagttactcctaggaatgactcagcctgcgcccgccccacggatagatttgggatgggtgtgcacgcggatttcacagcttccttggtagaaacaa

SEQ ID NO: 2540 - DNA, 6000 bp, Homo sapiens
acatagtctggcttgagggaagatgccagtatgtgatcataaattggacaaaatcattcaagacagccgcattttaatcagatcaaatttcaaaatttcaaatatctataagcattttatgttcttaaaaacatgagaaacttgcaagatatcattaaattcaaaggtttccaaaaccagtttgaaacacatttgtatgtcttaaaaccttttgtgaagtttagctgtatttagacaagtaaaattttatttacgtatctccagagtcaaaatacaaaacccaagcgatcagggcaaagtggaagcaaccaaccccaacctccccgcatggaaacagatagtgtgcgctggtcacatccagggacgtgctccatgcaatccacaaactaagatctgccccgaccatattatatggaccatataaaaattaaagtagctgtatatgtactttactgacatagaaacaagtctatgttatattgctaagtataaaattcaaattttagaatgtcaatagtataatcccactgaagtaaaaaaaaattgatatgtttttcaagtttgagtctataatctttgtatgggaatttttagtaaagcgtatatattcatctacagcttaactttttagtcttaaaaaaggcaaaagtgaaatttcgacgatgaaatccacggttgtaaccagcaataccacacttgcacggttgcaatactcgcgctcttcgcactgtaacctctggaatccactgtaacctctcgaatccgctgtcacccgagatctcttaacctggcggtcccctgccaggactcgggcggccgtcaagagtgcgcaggcgcaagcgcggccgccgtcggtggggttttatgtgctgttgagactgctgttgagcttctgggcctttttaagactgccttccaaaagacgacgtgatgactctaaagagaaaggaaaatttgttgcgtacgcagaagggcaggctgggcgcactctgagcgtctttcggggaccgacggcctcgcccacgtgcttccgggcaccagcgcgcccaaagcccgtgcactaggaaacgcacaaaagcaccagcgggcgagcccgagggcgagcccacgggtagccaggaggcggcgagggcggcttgtcttccagagactggggaatcaagaaaggcagagccacctcctcggccccagcgcagcaagtgcaggaggcagggagggcgcagcgccccgccgtccacggtacccgtggaacccggtgcgcgccccgggagctggggcggctcaggcccagcgtgcccagaaagccaaccacgttggtcaggaggacgttctcccactatccgcgatcctcaggctctgattaaagtcaaattaaaaggagctatccgttccggtatctgttgttactcttgtgataaatatggtgtttgatacgaaagtatcttaatagtcatgctgccaatcaaagaacaaaacacgtaaagcctgtgcgctaagaacacgagagcatttcgctcctcaggaggtgcagtttatcttgtctcctttgtttcatatataattccaaggagaattccttgttatcaacacattttgctctttgcctttgggggatgacataggcatattgcatttgatcagattagtgttaaccttccacccacgtttttactacatgctgtaccattaatacagcaggattttatacctttaaccgcaaaattcaagagcagaaaaatactcaaattgtatgttagtttaacatgaaaacgagttatttcagccctgataggatacttttaaaccaatactacctaacaaatatgtttcttattcgtataagcccatacacatggttttttaaatgagttttataaataataattagcattgaggccctgatctaagtatttgaaactctgttactcttcacaacaatcctgagatgggcatattttcctcattttgcagataaggaaacaggcactgggatggtaagaaacccaggccatctggcccctaatagccttttaccaccatgctaaagctttacccatttttgagatccaaaatattacatagtgcacacatatttggtaaccaaatcaggattaaacattaaagttaagggccaagcacagtgccctgtaatcctagcattttgggaagctgaggcgggcagatcgcttgacctcaggagttcaagaccagcctggaaaacatggtgaaaccccatctcaacaaaaaaatacaaaaatagttgggtgtggtggtgtgtgcctgtggtcccagctacttgggaggctgaggtgggaggatcgcttgagccaaggaggcagaggttgcagtgaaccaagatcacaccactgcactccagcctgggtgacatagtgagacgctgtctcaaaaagaaaaaagcaaaattaaagtaagaacataataagaaatatgtttggcactgtgttacggggagaaaaaatcaatagggagataaatcctgctttcagggtaagtgcaatttgctgagtaaaagaaatattttaagataccttaaaaaagaaaacaaaggctgttgtaaattggatattcaattaaatattcttgggcagattggcagatgatagatctaatgaacttggggtttataaatacacagaatgccacattttcactaataccttatgttttgggtaaagagtaaaaccaactttgaaaatgaattgtgtatgcaattatcttaaaaataaagattatataataagtcacattatcttgcattatgtgtaatatctagggggttaaggcactctcattctgctaatattcacagcactcctattatataaccatttcagagccctgaattataatcctaactaggtgacagttactgagtaaattttgcaatgtagatttattatagaatataattgtattactttttctctattcattggcatccttttatatttggggtttgacacaattgcacacaacaatctttctactaaaatattccatagagttggccaggcatggtggctcacgcctgtaatcctagcactttgggaggctgaggcaggtggatcacctggggtcaggagtttgagaccagcctggccaacatggtgaaaccccatctctactaaaaatacaaaagttagctgggcatggtggcatgcgcctgtaatcccagctactcgggaggctgaggcgggagaatcgcttgaacccaggtggcggaggttgcagtgagcggagatcgtgccattgcactccagcctgggcaacaagagcgaaactctgtctcaaaaaaaaaaaaaagattgaggctcaagcaggttaaatattatacacacactagatcacatactaagccacacaggttgtatagaatagaaatcctattccagggcttcacagacctcaaattgtttctgtaaatggttcatgtttattaatttaccttctcaaagtcaatatacttcaaaaacagaactgctatcattaaaatgtggttacacataacctaacacataagtgctttagaagaagggaactttaccatttgattttttaaaatatagatcctaacacttttgtgtgtgtgtgttttctcatgaatatggtaatattattggtcctttttccaaagatatggtatgaaattaattttttgcttagagtcaggatcttgctccatcatccagcctggtgtgcagtggcacgatcatagctcactatagcctcaaactcctcagttcaagtctcctcccgccccagcctccaaagtagctaggactataggagtgcaccaccacactcagctaactttattattattttttgtagaggcaggtctcaaattcttggcctcaagtggcccttccaccttagcctcccaaagcactggtattataggcataactcactgcacttggtagaaaattaattttcattataaaaatcagaaagaaagatcttattgtctgatggccaataccctgaatttcattccaacttctggttttctacattatatgtaggtaccagtgattttgtgccatttttatttcttcagatttttcctcttctacaattctcccatatgtgttattatttgaagccctgatcacagctctgaatcatttctattcttttgtctcccccaactctggttcaaaacttcggtaactcatttgctacgaagtctagaatctctcttgcaagtgagctgaccggttgggccaaatcgccttggaagggaaggattgttaggaagtcagtatgttgctaagatgtcttgctaatttgctgtgtaagctgcatagagtgtcaggggattctcctttccactgatgaatttaggtgtgtgttatgacctgtatcagtgattctatttggattgattaaggttgcaattttttatccatatgaatgttgcacctagtttttccctgtaattggttaaacaaatgtctgctgtttgcattttaactcttagccaatacctgctggaagtgatttaatgcagctggagaatgacactaacaatcattacagcctgcaaagtgtgaaacaatttcattgtgctttgtggtctctttagtctgaggactgataatgtgcagcggatgagacttgaaaaaaacgtattttattataatttaagaaataatgtaaaagaggggtgagttctgaggcagctccatgctgtttgtctggcatgagcttgtttttataagaattcacttcaagtgtggaagggaaatgctttcatctgaaagggatagctgtgcttcattccggtttctccctccatctgataaaaactcttgctgagtgacagcacagatgtagctcatttggaacaagtgaaggaaaaggagaaaagggatgaggtggagcgaaggagtagtcagtcatgtttccaaagtcccgcggtttcccctagtctcttcattcactccagcggccctggtgtccccctgcaaagtgcgatgccctcgcccctggccctacgcccctacctccggagcgagttttccccatcggtggacgcgcggccctgcagcagtccctcagagctacctgcgaagctgcttctgggggccactcttcctcgggccccgcggctgccgcgccggctggcctggtgctccattgactgggagcaggtgtgcttgctgcagaggctgggagctggagggtttggctcggtgtacaaggcgacttaccgcggtgttcctgtggccataaagcaagtgaacaagtgcaccaagaaccgactagcatctcggcggagtttctgggctgagctcaacgtagcaaggctgcgccacgataacatcgtgcgcgtggtggctgccagcacgcgcacgcccgcagggtccaatagcctagggaccatcatcatggagttcggtggcaacgtcactttacaccaagtcatctatggcgccgccggccaccctgagggggacgcaggggagcctcactgccgcactggaggacagttaagtttgggaaagtgtctcaagtactcactagatgttgtgaacggcctgctcttcctccactcgcaaagcattgtgcacttggacctgaagcccgcgaacatcttgatcagtgagcaggatgtctgtaaaattagtgacttcggttgctctgagaagttggaagatctgctgtgcttccagacaccctcttaccctctaggaggcacatacacccaccgcgccccggagctcctgaaaggagagggcgtgacgcctaaagccgacatttattcctttgccatcactctctggcaaatgactaccaagcaggcgccgtattcgggggagcggcagcacatactgtacgcggtggtggcctacgacctgcgcccgtccctctccgctgccgtcttcgaggactcgctccccgggcagcgccttggggacgtcatccagcgctgctggagacccagcgcggcgcagaggccgagcgcgcggctgc

SEQ ID NO: 2541 - DNA, 6000 bp, Homo sapiens
tgtcaaggtcaaggcgcttcctgttatttctctattcaagggtagaaaacatcaccagggtacgttgttttattgggcattggtttatttctagggggtggaaacgggattcttcccctaggtccccagctgtttgtagtcatattcttttactcacacacaattttattgcttttgcttttgggagatgtgttttattaaaaatagtggctaatcagggacttgttaacggcatacactagaaggttttttgtctgttttttgtttttttgagacggagtttcactctggttgcccaggctggagtgcaatggtgcaatctcggctcacctcaacctccgcctcctgggttcaagcgattctcctgcctcagcctcccgggtagctgggattacagacatgcgccaccacgcctggctaattttgtatttttagtaaagacagagtttctccatgttggtcaggctggtctcgaactcccgacctcaggcgatccgcccgccttggcctctcaaaccgctgggattacaggcatgagctaccgcactctgccttgtttttttttttttttttttttaacaaaacgatcaaacaaactgaccatggaaagtcagtcctgggttccagttttcaactaactgcattttcttgcagagtgagcccgcaccatcacagtgcctgtattctgtattctgtcagacccaggctacacacggatcctgtaatgcataaaacaacttaaaaaagtctcaagaggctacaaagatcttttaaatacgttaaaagctctaaacgattagaactgcctaagataatgtttctcttcctgaaacctgctttgctttaaactcaaaacattccttcagtccttgagcattaccttattgattctgaaaagggaggaagtcttcatgagtaggagtgtgcttctttatcattattatatactatgtccactacctcgaaatggagtggttcattttatttgtatggtttggtagctagcgaccctggttctatactggaatcgcctagagatactttgaaaaacacatatgcttgagccttgcccttagaaattctgatttagtgaatacaaagtataactcagccaactgagaacatacgacgtgcggtcggggttgagaactatttatgaggatagcgaaactagtgttttaggccctgtaaaatttactttaaaaaaaaatcagttcatacccaggtacttcccctccgcatctctgttcaaacctttttaatgaaatcccactggcttagacactctccctatgaaaccgcctttgcaaaaatcataactgagaaattacagtgaaagaggtctgacctaaccgatactacctttcttctaacattcaagctgtccattcctaggtgtaggccaaactaactttgggaggaacttagtttatagtttagcttggaaacaaagaatataacggtgctttcccccaaacaaacccccttcctgcctggggactagactgcctttgcaggactaacaaattagctacaagattagaagttatggtttagcagtcatgaaactggaggctgcaagattgtaaacctccccaaatggctcctgggaataaaatcactattgtaaaacctaagatcagtgcttgagatattttgcagaccctgcactcaatgcatcagctggcaccacccagatcaataaacaggctcatctagtcttgtggcctccacccagaaagtgactcagtgcaagaggacagttttgactccttacgatttcatctctgacccgaccaattatcactcctgactcagtggtcccctacccaccaaattatccttaaaaacaccaatcctcgagttttcggggagattgatttgagtaataataaaactctggtctcccacacagccgggtctgcatgaattactctttctctattgcgattcccctgtcttgataaatcagcctgtctaggcagtgagcaaggtgaacccgttgggtggttgcacccccaccaaactcctattaaggttactgttagcatcactcattagtctgatgtttatgtacaatgtgtgtgtgtgttgcttgtcttaccaactggtctataattctttatggagaggagtagtatctttatatttaccatgcaccatcctagcgcagtacatttcacataataggtactcaataaaggatgtttcaaaagtacatatgtagtttggatattcacgagacatttataaatgcaaaaataaagcaatgtatataattcataatgagaccattagcttatattagcaatgggatagactaaaatatgggttaaaacacaattatttaatatggtagacataagaatttaggaaacttatagatttcaaagtgttgtttaggaaatagtccaaatcaaaaacagtcttgggaaatgcaacagcatggggaatgtcatctaggctttatgggaatctttccacagtatctctgactactggcatccagaatcatagatgtatacttacctggcaggggagataccatgatcacaggatcattaatgattccagtggtgagaaatcagtacctggcagtagaaatcggcactttattgtgggaaagcctgaatggttaggaaccatgtgggatatgaagtcaaatctgccaccccaaaccttcaaactttggtttcaggttgtgctcttaggatcatcacaaaacagattgaatctctcccctcataacagtcccattaaatgaggtaaagtcaactatacttgcgagtcttactccatgaactcatgcaagaaacataattttactcaagggatgatttttaaatcaccaaaatcacacaggattctctttcctaacccactccagcacaaaggcactacctcccaataccatcccattgggggttagggcttcggcatgtaaatctggggagaaaacaaatatgcagtccataatactaggttcataatgtgctgtaacccttattcccttagcctctatccccattccactgtattatttcaaaacagaccttacttcccatgggacaattagagcctgaagaagagatctcttctgatgcatcatcatttttcctggcagcacaaatattctgctcttcctgctaatactaattgagcacttactatttccctggcttttttttttttttttttcggtagagatgagatctcactatgttgcccaggctggcctcaaactcctgggctccagtaatcctcccaccttggcatcccaaagtgctgggattacaaagtgagccactgtgcctggtgaggtttcgttttaaactctttttttttttttttttgagacggagtttcgctcttgttgcccaggctggagtgcagtggcccgatctcggctcaccgcaatctccgcctcccgggttcaagcaattatcctgcctcagcctcccgagtagctgggatcacaggcatgcaccaccacacccgcctaattttgtatttttagtagagacgaggtttctccatgttgaggctggtctcgaactcctgacctcaggtgatccgcccgcctcagcctcccaaagtgctgggattacaggtgtgagccactgcgcccggctgttttaaactctttacatttaccaagccctttaatcgtgcaggtattattattattcacattatacggacaagaaaactgacacgtaatttacccaaggtcacacagctagtgagtaactggtagggaatattccaacctaagcattcttaatactagaatacagtgccttagttactcaacacttaaactgtaccaccttaaagacaataacaagaagtgtgtgaaaatgtggaaaggctttgatgatgctggatgcgttataaacagaaaggcttttaaaataaactttttattcaattatgacacacatactgaaaagtgcataaacgatgttcagtgaattttcataaagtgaacccacatcaaggaacagaaaacggagccaggcgttgtggctcaggcctgtaaacccagcactttggcaggaggataacttgaagccaggagttggagaccagcctgagcaacagagcgaaatcctgtctcaaaggaaaaaaaaaaaacaaacaaaaaacaaaaacaataaccagaccacccatccccatttagaatttctttttgtgctaagtttcaaaattcaaaataagcattcacttgttttctacaaactgcattctatagtcgatctcaaaccttgattgagatacatttccattatagtatactctttctagagcactgatctcaaaatgtggtgcccagccaagtagcgttggactttcaaattcaaggatcccaagctagaccagcagaacaggaattctgggagtggagcccggcaatttgtgttttagcaagcccccaggctgattctgatgcatcttaaggttggagaagcatggatattgtcagttgtaatagttgttgttcgtgatcacgtagtaactgttagatgaaaactagggtttaaaagtgttacgcttgtctaatagtgacaagttctcattacccatctctttctgaaataggctgcaggcaaatgcgttttcattttaaataaccgtgttgttgttccagtcaaggttgcattttacaaggaataaggaagataaagctgcctcctcctatcctaatctcgctcctcgctcagtatggagtcgtccggtttacctacaaagccctgccctagactggcggcaaattcaacgcccagaggcaggaacaggtgtcggccaatcagaagccggaacaggtgtcggccaatcagaagccaggcttgaaccgctcgcccatgtcccgccggcggaagagactctccgcggccacgccccgagccctcgaatgcgagccaatcgttgctcggcgcctgaaggggcagtacccaagcgagccatttaacatggcggaggatgtttcctcagcggccccgagcccgcggggctgtgcggatggtagggatgccgaccctactgaggagcagatggcagaaacagagagaaacgacgaggagcagttcgaatgccaggaactgctcgagtgccaggtgcaggtgggggcccccgaggaggaggaggaggaggaggaggacgcgggcctggtggccgaggccgaggccgtggctgccggctggatgctcgatttcctctgcctctctctttgccgagctttccgcgacggccgctccgaggacttccgcaggacccgcaacagcgcagagggtgagtgcagaccgcgtccgggccgggactacgcggggggcggatgcgggctccgtggtgcgcggcagagggctggttccctacgtcgccgagggaggggctgctgcggccgattagctgggagtccgaggctccgggctgaactttgttcgaatcccggttcgcccgttgtcagcacctgagtttttctcagattgatttcctcttcgataaaatgaaaataagaccctgtttaggtttgatgcaagcattaaatgagttaaaatgtatacagttccactcaacccagtacctttgtctcttttggcgctttctactcaggtattcctgtagtaatattcagcagtccctgtggcctccagtaacccccgaggcatcagtgttttatgttaatttgtgagctattaaatctcatttggcctgctggctctacagcagttacttttattctgtgtagtctcagaataaaagtaaatgttggccacatgcctgcaagtcccagctacttgggagcctgaggtgggaggatcgcttgaacccaagaggcagaggttgcagtgagtcgagatcgtgccactacagtcctgcctgggtaacagagtgataccctgtatgaataaataaatgaatgaatgaaactgttcatgaaatctgctgcaccccgcccccgtcccaagatggggtctcactgtcacccaggctggagag

SEQ ID NO: 2542 - DNA, 6000 bp, Homo sapiens
gggactacatttcttttacttgctttagatatgactgtatgtgtacacacacacacacaccacccccccacacccctatgcaccagacacttgtaggcaaacttcccccaaaaacgtctgtttcttcccattgtcttacattagaaacagattgaaatatttccaatataaaataaaaaaacatatttaccaagggtttttcctgctgcaattcttgtcaaaaactgacatatgtatatcgttctcaactggcaagctgttagactggatagtccatgaataatagctaaaaaagaaaaaaagtaaattttattaaaatcaaacttgatccagtagtgccactgtgtggtttgttgagtaataggctacaaacatattgtaaaaattatcataaatttagagttgtacatttaagatctgattaaaattcagaacaaaaaaaaagaatagcaatgaagacatttcttacaaaatataactttcacatgtagaataaaaattgttgaaaattctttcacaagtagcagtctacattaacaaaaaagatttagatacaaattgtaaaatgtgtaaaatcattggttggaaacttatacctagaaacatttcatataatagaaaatattttatattatttctatctaggtttcagttaagtgagtctgtttagcttacaaagtttaaaacctattaatattaacctccccaaacttgaatgcccacccagatgttgagtcaggcagtgattacatacaataccaagtaagccatactcctggaccacagtgagctttttaccatgtagcaatgagacaagcgattgaactactgaagtaaaaatgttgtgaaaactttaaaaagacaagtacagaatgctttggaagcatataacaagaaatctgtgtgtttaagtatcttctgcacagaggaggtgtcagggaaggcttctctgaggaaataatgtctaacctaagacctgaaggtgccactactaccattatacctaacccagggcttggttggtgtatatataaaaaacttaaataactagcaaactgaaaagcaattctgtagcaattaagcatataagacgaatatatttttacccaatttcctccctcaattctaacataatcttatgctacaccagagattatctggaccatacacagtcataatagaatttaacaggattttaagagagcacaaaatttatatagaatttaaacacaagccattcaatatttactgaacatctactgccagcctgtgttaggaggtgatgacttcagatagccagtctctgcccccatgaaggttttaatctgagaagacacaattaaacaaaaagttatgtaagtaactaattaaaattttaatgagtaccacgaaggataggtgcagacatacctcattttattgtgctttgcagattgcatgttttttacaaattgaaagtttaccgcagcccagcttgagccaagtctaacggcacctttttttttttttgagacagagtcacgctctgtcgcccaggctggagtgcaatggtgcatctccactcactgcaagctccgcctcccaggttcatgccattcttctgcctcagcctcccgcatagctgggactacaggcgcccaccaccaaggctggctaattttttttgtatttttttagtagagacggggtttcaccatgttagccaggatggtctcgatctcctgacctcgtgatctgcccgcctcagcctcccaaagtgctgggattacaggcatgagccaccgcgtctggctcatttttctaacagtacctgtacctgtcacattttgataattcttgcaatatttcaaactttttcattattattatatctgtatggtggtctgtgatcaataatctctgatgttactattgtaaaggttctggagtaccacaaatcatgcccataagacacaaacttattccataaatattgtgtgtgttctaactgctccactgaccagcccttccccttactccctctcttcaggcctccttatctcctgaaacacaacaagattgaaattaggccaatgagtaactctacatgccctccaagtgtttcagtgaaaggaagagttgcaagtcattcactttaaatcaaaagctagaaatgattaagcttagtgaggaaaggatgtcaaatgccatgataggctgaaacataggcctcttgtgtctaacagccaagttgttaatacaaaggaaaagttctcaaaggaaattaaaagttctaatccactgaacacataaatgataagaaagtaaaagagcctattgctcatatggagaaagtttgacttggatagaaaaaaaaaaatcaaaccagccacaacattcctttaagccacagcctaatccagagcaagtctaagaaggctgacagaggtaagaaaattgcaaaagaaaagttggaagctagcagaggttgttggttcatgaggtttaagaaaagaagccatctctgtgacatagaagtgcaaggtgaagcagcaagtgctgaagtaaaagctacaagttattgagaagatctagctacaatcacaaatgaaggtggttacactaaacaactgattttgtttttttgtgagacagagtctcgccgtgtcacccaggttgaagggcagtggtgtgacctcagctcactgcagcctccacctcccaggctcaagtgattgattctcgtgcctcagcctcctgagtagctgggattacagatgtgtgccacaatgcccagctaatttttgtatttttagtagagatggggtttcgccatgttggccaggctggtgtctcaaactcctgacctcaagtgatccaactgccttggccttccaaagggctgggattacaggtgtgagccactgtatccagccaacaacagattttcattgtagatgaaacagcctcatattagaagaagatgtcatagagaactttcatagccagagagaagtcaatgcctaactttaatatttcaaaggacaggctgactctccttagggactaatgctgctggtgactttaagttaaacccattgcccatttctcattctgaaaatcttaaggcccttcaaatgatatatcaactttgcctgtgctctagaaatggaacaagatgacagtgcctctgtttacaccatggtttactgaatattttaagcccattattgagatctactgcttggaaaaaagattcctttcaaaataccattgctcattgataatgcgcctaaccactcaagagctctgagggagacgtacatacaaggaaattactgttgctttcatgcctgataacacaacatccattctgcatcccatgtatctattgttctgtctccctgtcccagccttacaagtaactgtgaaataaccaatcttctttttgttctgtttcagcttccttaagtccttactgtctataaagccaacccccaactgctcaattcattgagcacttattttatggaataaagtattacctgaatccagaatcacaataaagccaagtgaggtctttaaactaaacttagttgtaaacaagatcggggtgctaggtgtactcattgttactagagttaggttgcttctgtgcccttttatctgacagagtaaggaaatacatatttgtatagtaacctatgtctacacatgcatatgcaaatatttctaagtcatctatacctacatgagctaaacagttcatactgatgtctccaactctaagagaactctaagagaattctgaggaactagcttcattccaggatttaattttctacttaatgttaattatccctggctccagtgttaaccgcaatacagaggaaagatccttgaactggaagataaaggatggggctgaaacactcccttttaacctatcagtaccttaaaactaagattatttgcctaactcacaggattatggtgaagatgaaatgtgtcaaaatgtctaagaattctattaaatagcataattatagtattataaatatatacttgcacagtaattttagcgccaactatgaatgaagtaccagaacatctttctgttgtttttcaaaaagctacactaggccaggcgcggtggctcatacctgtaatcttacagctgcgggtggtggtgcacgcctgcagacccagctactccagaagctgaagcgggaggatacctgagcctgaggaggtcgagcctgcagtgagctgtgatggcgccactacactctccagcctgggtgacagtgagaccccatcttgggacgggggcggggtgcagcagatttcatgaacagtttcattcattcatttatttattcatacagggtatcactctgttacccaggcaggactgtagtggcacgatctcgactcactgcaacctctgcctcttgggttcaagcgatcctcccacctcaggctcccaagtagctgggacttgcaggcatgtggccaacatttacttttattctgagactacacagaataaaagtaactgctgtagagccagcaggccaaatgagatttaatagctcacaaattaacataaaacactgatgcctcgggggttactggaggccacagggactgctgaatattactacaggaatacctgagtagaaagcgccaaaagagacaaaggtactgggttgagtggaactgtatacattttaactcatttaatgcttgcatcaaacctaaacagggtcttattttcattttatcgaagaggaaatcaatctgagaaaaactcaggtgctgacaacgggcgaaccgggattcgaacaaagttcagcccggagcctcggactcccagctaatcggccgcagcagcccctccctcggcgacgtagggaaccagccctctgccgcgcaccacggagcccgcatccgccccccgcgtagtcccggcccggacgcggtctgcactcaccctctgcgctgttgcgggtcctgcggaagtcctcggagcggccgtcgcggaaagctcggcaaagagagaggcagaggaaatcgagcatccagccggcagccacggcctcggcctcggccaccaggcccgcgtcctcctcctcctcctcctcctcctcgggggcccccacctgcacctggcactcgagcagttcctggcattcgaactgctcctcgtcgtttctctctgtttctgccatctgctcctcagtagggtcggcatccctaccatccgcacagccccgcgggctcggggccgctgaggaaacatcctccgccatgttaaatggctcgcttgggtactgccccttcaggcgccgagcaacgattggctcgcattcgagggctcggggcgtggccgcggagagtctcttccgccggcgggacatgggcgagcggttcaagcctggcttctgattggccgacacctgttccggcttctgattggccgacacctgttcctgcctctgggcgttgaatttgccgccagtctagggcagggctttgtaggtaaaccggacgactccatactgagcgaggagcgagattaggataggaggaggcagctttatcttccttattccttgtaaaatgcaaccttgactggaacaacaacacggttatttaaaatgaaaacgcatttgcctgcagcctatttcagaaagagatgggtaatgagaacttgtcactattagacaagcgtaacacttttaaaccctagttttcatctaacagttactacgtgatcacgaacaacaactattacaactgacaatatccatgcttctccaaccttaagatgcatcagaatcagcctgggggcttgctaaaacacaaattgccgggctccactcccagaattcctgttctgctggtctagcttgggatccttgaatttgaaagtccaacgctacttggctgggcaccacattttgagatcagtgctctagaaagagtatactataatggaaatgtatctcaatcaag

SEQ ID NO: 2543 - DNA, 6000 bp, Homo sapiens
cctgtttctacttataggatacaaacttctgaagacaaagtctatgcattttctctcatagttttgtaccaagcatatcatgagtgggcaaagaatgttgttgtttatcataataaaaagattcataatctttgaaacatatctttttttttaacatagaaagtgcagaagatagatgtttgtatgttgcaaggttttttgtttgtttgtttgtttttttgacggagtttcactcttgttgtccaggctggagtgcaatggtgcgatctcggctcactgcaacctctgcctcccaggttcaagtgattctcctgcctcagtctcctgagtagctaggattacaagcgcatggcaatatgctcgctaatttttcgtatgtttagtagagacagggtttcaccatgttggccaggctggtctcgaactcctgacctcaggtgatccacccaccttgacctctcaaagtgctggggttacaggtgtgagccaccgtgcctggcctgtatgttgcaaggttttgaaaggaaaaatggaaaactgtattttattttcattaacttagattacaagaagaaggtattagggttgatgtagcagtcttttgatggagatttgttagctcaaagggcatctgagagtctaaagttccaaccattcatgatcaccgaatgggctaatgcacttaaaaaatcagtctgcatggccaggtatggtggctcatgcctgtaatcccaacactttggcagaccagggtgggtggatcacctgaggtcaggagttcaaaaccagcctgaccaaaatggcgaaaccctgcctctactaaaaaaacaaaattagctgggcatggtggtgcatgcctgtaatcccagctactagggaggctaaggcaggagaatctcttgaacctgggaagcagaggttgcagtgagctgagatcatgccattgcactccagcctgggcaacaagagcaaaactccatctcaaaaaaaaaaaaaaaagtcagtctgtcatcatcaataaacaagtaaaattttgttggattttcttaaatatttaactaccagattatgacaaaactgtgcatattttaaattgatcctgaatctctataaaaatggcatttgtgaaattccacaaatgttagatactataagtttaatgagctgtggactaagaaatcattctgttttgaaatatttaagccttccttcttagtcctgaactagctaaggagctgcacttccaaaatgcatttaaaaaaagaaaatttaaccaggggcatataaacaatattataattgaaaatagtatctacccaactaatcagcgtaaattgaatttaatgaaggattactgttatgcatttattacccttataggtcaatgaaatatagtttagttcaattggatttttttttttttttttttttttaggatagattctcactctgtcactcaggctggattgcagtggcaggatgacaggtcactacatccttgacctcttgggctcaagtgatcctctcacctcagcctctctagtggctgggactacaagtgtgcactaccacgcccagctaatttttgtagtttttgtagaaatggggttttgccatgttgtccaggctggtcctgagttcctgggttcaggcaatcctcttctctcagccctccaaagtgctaggattacagacaggcgtgagtgcccagccaggcgtgagcactcagccagctttgacttttgttggaaataatttttaagcctttgtcagaaatggcacaaagaactgatgtaggaatttacagccttttgagagttatctcctttatagtcaaaaggatacagaaataaaagttaaattacaaaactgatcaatatcatgttcttaaacattatttgtatcataacttttaaaaaatcatgtttcttagtttttttaaaaaatagaatttttaaaaacatttagcaatatttaaaaaacttttgcattatcaatctctgttttttgtcgatttttaggaaaaatatatattgcattatttttcattgtgctatttggcgtttctcaaagaatgactatgttgtgcatgagaattatctgaactgtgaaaaatgtggactcacaggtcatattctcatatcaaatgctaatttgatccctggggtttggatccaagcatctagatttttaacaaacattgtagatgattttttcccctaaggtctgggaaccactggtataagcgatttttagctcttcagacagacataagattttgaatgctaattaaaatggctgctaatttgtgaataatttctaattgaaccccaggcaatctaaagagataaaaaattcattgtgaaaaacacaaataacagtgcaaaataaattgttaattgaccttttagaatcactaataatataattgctttgtagaaaaccttttaaagctgaaatttaaaaaatattgtttttaaaaattaccaagatagctactataaaatatgattacatgccatgggatgaactatatctccccaacatttgtatgttgaaaccctaaccctcgggcctttgggaggtgattaggtttagatgaaatcgtgaagattgagccctcagatggaattagtgcccttataagaaatctgagagcttatgctgtctctgttctgtctgtctttctctctctctctgccatttgacacaatgagaaagccacaatctgacagccaagaagggggccctcaccacaacctggccatggcagcctcctgatcgtcgacttgcagcctccagaactgtgagaaaattaatttccgttaagtcacccagtttatggtactttctcaaactaagacaccatagaagtgtaagttttaaaaatattaatacatttagtgttattaattcctgtccctgcacatataacacaatgttctgttataaagttaaaaacaaattagaatcttcctaattcagtatgttctaagaaatactacttgacaataatcaataaaataaatttgcaaaacttgtcaatgatgtgtcccatgtcaaatcaaataaagatagcctttcttggataggttgttggaaaatggttgtatcaactgaatttttcatgttttacttcagattttcaattttaagttttgtttatagatttgattaaaataaaggttattatgaataggttattaataaaggttataaagttctgtgcctatgatgtgttataaatggtgtgttcagctttactagttaatgctgttgtatttgatgtcgcttcagtgaccttttttgttagtttattgttacttaaaattaagcaaaatctttcttgcatgaaatcttcttgattaattattgccatatagaattttcattcacctaatcttttttttttttatttgagacagagtcttgctttgttgcccaggctgaagtgcagtggtggcatctcggctcactgcaacactgcaacgtctgcctcctgggtttaagagattctcctgcctcaggctctggagtagctgggactataggcgggcaccaccaccccccgctaatttttgtatttttagtagagacggggttttaccatgttggccaggttggtctcgaactcctgatctcaaatgatctgcctgcctcggcctcccaaagtgctgggattacaggcgtaagccaccgcgcctggtctcattcgcctaatctttattgtctactatattcaaagtgttgagtgtgacaacaagtcatttaaaatttagtctggattctcaagagtttgtaatataatgaggaaaaaatcccaacgactttcttttactcagatctccataatgtcatttgccatcaatagtttggaatatcactgaagtccaagggcctgtggctacccaatattccaaatacaatataatttggttcaaataagatattaagaactttggtcaagaactttggtcaaacacaggagatctggaatctaacggcatgtctttggcaattcacaacctctccctctacacgtttctccatgtagaaagtaaaggccttggaaaggattgatgaaaaccaaccctaaaactccacgatgcctttttctgtactccgaatctaaaagggtgagctatgaagtaaaactctgcacttggtccaagtcattgaaatatttgcaaacgatgctagagctcgaaaagagcaaagatagcagaaaccgtccagagaaagtaacctactgctgaagctctgcaaacttgagcagtcaaccaacttcaccgctcacaaacgtttggccgctaggcattgtgactttctgcccagataaaagtctttttttcttttgtctcctttttttcttcctccctgctttgccgcgtgagattaccactcctcgggtcagctcgcgaacgccagggaggcgagtgtgaaacacacgcgccaacacccctcctcctcctcgtgcgctcctccttcctacagaaaaatgtgtttctaggcaacggcgggcggcggcgtcacttcctgccatttaaactcaggtccccacccctcgcagccccttctcctcgtttccacccctcccccctcggtcgtgggcctcattcacgcttccccgggcttggggagggggcggaggcccggcgtgacaagcggcccagactcccgtgggcgccgcacacctgttgtttgcagcagccagcgacccgcactaccgctctcggcgggcggggaagcggccgcagcggagccgacccggcaggtggccgcgggcggggccggcgagcgaaagtgcgcgggggcccgaccaccgcggggccgggacgcgatggcggcggcagagcccgcgagctcgggccagcaggcgccggcagggcaggggcagggccagcggccgccgccgcagcctccgcaggcgcaagccccgcagccgcccccgccgccgcagctcgggggcgccgggggcggcagcagcaggcacgagaagagcctggggctgctcactaccaagttcgtgtcgctgctgcaggaggccaaggacggcgttctggatctcaaagcggtgagctccggaggcggggacgggggcggacttcggaacccgtggcccccggggaagcccagcccctcgccgcgtgggtctagcggcgtggtgtagacgcgccttgcggggacccgggaccgggcaatccgaggaccatgtggcctgcgcccgggtcgtggacgccgggatgggggagggacgagggaccaggatggcaccgagcggacgcgtaaccaatggggcccggcgccacgctgggctctcgacaaagagcccaggacctcgagcgcgcccgcgtggcttctgtctccgggcgcagggacctgagggtaaccgagtgtctgttgctctgcgtccacctgtggcagaggctcacggggtaacgggcgctttgcccggagacaccgtggatatcgattttgctgttaagaatggatggttttaataggcgattccagttggaaccatgttcctgtagtttaaataaaaaggaggaaaaacaaaacccagtctgccatctctaccagatgaaagaaaaaaaaaaaagagtacttctttccacgcccctccccgataaaatagtattaaatcttccttgtgcacttctttcatcaccctgatagttaggaggggtatttgatttgtgacttcatttggcatgtgtcatgggtttccaaaagtgagatctgctgtcacacgaaaaggggatattttacaactttcacccaaagaggtggaagtgctcagtaaactctctccctgcgtcgtcctttacagcgttcagatttttcaaacaggagcaggcatcaaaagctgttctgtcatacagaatgacttaaccgatctaggaaggatttggaagaattcaacagcgctcaggataatgagaatgtggtcactccgcgcgaagtttaagaactaaagttttagaaacaaacaaacaa

SEQ ID NO: 2544 - DNA, 6000 bp, Homo sapiens
tgtatctgtatgttgttttgaaaattcctattaaatgtaagttataactaaagttctacattttatttgccattttggtgtcagtatgagcttttttaagcatgatgaagattgcttatctcttttattataattctttaacttaataaattacctgaattatacctgaattaatgtgataaagtatggtgcgtcttatctgacaggtccctgatgcatacccgtttatgagcctgatttagatacatcctgggataaataaataattgaagacactagtttggccgggcccggtggttcacgcctgtaatcccagcactttgggaggccgaggcgggcagatcacgaggtcgggagattgagaccatcctggctaacacggtgaaaccccgtttctactaaaaatacaaaaaaattagccgggtgtgatgactggtgcctgtagtcctagctactcaggaggctgaggcaggagaatggtgtgaacccgggaggcggagcttgcagtgagccacgatcacgccactgcactccagcctgggtgacagagcaagactccgtctcgaaaaacagcaacaacgacaacaaaagaccctagtttgtaataccaggcaaacattttaaggtagaattagcctaaggagagatatgtgggtaggacagcgagaactttagtgcatgcttacaaattctcaggacccttccactcctgggtgtatacccaaagaattgaaagcagggcctcaagaaggtatgtatacccctgtgttcataacagtggcattcataatagccaaaatgtggatgcaatcctaatgtccgtcaatagatgagtagcttaacaaaatgtggtatatatacaatggaatattcttcaggcttagaaagaagaaaatgctgacatatgctgcaacatgataaactttgaggacataatgctaggtgaaataagccagtcacaaaaagataaatactgtatgattccacttacgtgaggtacctggagtagtcaaattcacaggggcagaaagtagaagggtggttaccaggggttgagggaaaacagaatggaatttgttgcttaatggatgttataggctgaaatgtgtcccccaaaattcatatgttgaaggccttacctccatacatcagaatgtgattgtatttggggatagggcctttgaaagataattaagctaaaattaagctgtgacctgatctaatctgactggggtccttatgagaaaggggaaatttggatatacaaagagatgcctcagatgctgccacccagaggaaagaccatgtgaggacacagcaggaaggtgatcatctgtaagccaaggagcgaggcctctgaagaaaccaaatgggccaatgaaaaaaaagaaaatgtcaggcccatataactgatgaacgtcgatgcaaaaatcctcaataaaatactgcagaccaaatccagcagcacatcaaaaagcttatccaccatgatcaagttggcttcatgcctgggatgcaaggctggttcaacatacgcaaatcaataaatccatcacataaacagaatcaatgacaaaaacccatgattatctcaatagatgcaaaaaggccttcaacaaaattcaacagcccttcgtgctaaaaactctcaataaactaggtatcagtggaacatatctcaaaataataaggctatttatgacaaatccacagccagtatcatactgaatggacaaaaactggaagcattcccttcgaaaaccagtataagacaagaatgccctctctcaccactcctattcagcacagagttggaagttctggccagggcagtcaggcaagagaaataaataaagggcattcaaacaggaaaagaggaagtcaaatggcctctgtttgcagatgacatgattgtatatttagaaaaccccatcgtcttagccccaaatctccttaagctgataagcaacttcagcaaagtctcaagatacaaaatcaatgtgcaaaaatcacaagcattcctatacaccagtaacagacaaagagccaaatcatgagtggactcccattcacaattgctactaagagaataaaatacctaggaatccaacttacaagggatgtgaaggacctcttcaaggagaactataaaccactgctcaaggaaataagagaggacacaaacaaatggaaaaacattctatgctcatggataggaagaatcaatatcatgaacatggccatactgcccaaagtaatttatagattcaatgctatccctatcaagctaccaatgactttcttcacagaattggaaaaaactacttcaaacttcatagggaaccaaaaaagagcctgcatagccaagacaatcttaagcaaaaataacaaagctggaggcatcatgctacctgacttcaaactaaactacaaggctacagtaaccaaaacagcatggtattggtaccaaaacagatatatagaccaatggaacagaacagaggcctcggaaataaacaccacacatctacaaccatctgatctttgacaaacctgacaccaagaagaaatggggaaaagattctctatttaataaatgatgttggaaaactggctagccatatgcagaaaactgaaactggagcccttccttacaccttatacaaaaatcaactcaagatggatgaaagacttaaacgtaagacctgaaaccataaaaatcctagaaaagaacctgggcaataccattcaggacaaaagcatgggcaaagacttcttgtctaaaacacgaaaagcaatggcaacaaaagtcaaaattgaccaatagaatctaattaaactaaagagcttctgcacagcaaaagaaactatcatcagaatgaacagccagcctatagaatgggagaagatctttgcaatctacccatctgacaaagagttcatatccaggatctgcaaagaacttagacgaatttacaataaaaaacaaccccatcaaaaagtgggcaaaggatatgaacagacacttctcaaaagaagacttttatgcagccaacaaacatatgaaaaaatgctcatcgtcactggtcattggaaaaatgcgaatcaaaaccacaatgagataccatctcacaccagttacaatggcgatcattaaaaagtcaggaaacaacagatgttggagaggatgtggagaattaggaatgcttttatactgttggtgggagtttaaattagttcaaccattgtggaagacagtgtggtgattcctcaaggatctagaactagaaataccatctgacccagcaatcctattactggctatacacccaaaggagtataaatcattctatgataaagacacatgcacacgtatgtttattgtggcactattcacaatagcaaagacttggaaccaacccaaatatccatcaatggtagactggataaagaaaatctggcacatatacaccatggaatactatgcagccgtaagaaaggatgagttcatgtcctttgcagggacatggatgaagctggaaaccatcattctcagcaaactatcacaataacagaaaaccaaacaccacatgttctcactcgtaagtgggagttgaacaagaacacatggacacagggaggggaacatcacacagtggggcctgttcagggttggggggctaggggagggatagcattaacagaaatacctaatgtgggtgacgagttgatggttgcagcaaaccaccatggcacatgtatacctatgtaacaaaactgcacgttctgcacatgtaccccagaacttaaggtgtgtgtatgtgtgtgtgtatatatatgtacggtatatatatatatggtatatacataaggtatatatatggtgtgtgtgtatatatatgatatatataaagtatatatggtatatataaggtatatatatggtatatatgtaaggtatatatggtgtatatatggtatatatgtaaggtatatatggtatatatatggtatatatggtatatataaggtgtatatatgatatatataaggtatatatatggtatatataaggtgtatatatacggtatatataaggtgtatatatatgatatgtatatataaggtgtatatatatggtatatatatgtaaggtgtatatatatggtgtgtatatataaggtgtatatatatggtatatatatatgtaaggtatatatatggtgtgtatatatataaattcctccttagttttctctaacaatccaagcataaaaaaaaatccctgttagaactgcttttgctgtattccatagattttgttatattgtttccattttcatttgttaagatatttttcagtttccctttgtattttttcattgactcattagatgtttaagagcatgttttttgtttttaaatttccatgtatttgtgaatattctgtagtttctcttgttaatgattttgtcagaaaagatacttgtaattatctcagtcttctagaatttgttatgatttgttttttggcctcatatataatctaacctggagaatgttctgtgtgcagttgagaagcgtgtgtattcttctactgttggatggatgttaggttcatttgatctagagtatagtttaaatttgatattttcttatttactgtctctacgttctgtccattactgaaagtgggctgttgaaatcccctactattgttgtattactgtttatctctcccttcagatttattaatgttttctttatatatttaggtgctgctatattgggttcacacatatttacaactgttatatctcatgttgctgaattgacccttttattattatatagtgacctttgtatctttttatagtttttgacttaaaatctatttaatctgatatatgtatagccacttctgctttcttttggtttctatttgcatggagtatcattttctgttctttcattttcagtctacgtccttacaggtgaagcaagcctcttataggcagcataagttgagtgtttttaaaaatccatttaactactttgcctttttattggagaacttaatccacttacgttcagggttatcattcataggtaagtagttaatactgtcattttgttgttttctagttgttttgtagatattttcttcctttctttctatcttcttttgtggctaaattatgttgttgtctagtggtatgttttgattccttgcctttttatgtatctgctataggtttttgctttgttgttaccatgaggcttacaaaaaaatatcttacaatgcggtattttaagctgataacaagtttgatcgcaaaaacaaacaaacaaaaagaaacctaacaagcctctatgcttttattccagtcccctcctcacattttgaatatttgatgtcacaagttttatctttttatatcgtctattgcttaaaaattattgcagctactatgatttttaatagttttgtcttttaacttttacacaaaatccagaatactttaattctgtgatgatgctgcataaattgcttatatctttagtcagtgtacttacttttaagtgagttttagactttcagattgttttgtgttactccttagcatcctttttttttttttttttttggagattgaagacttccctttaccattttttgtaaaacacttctggtagtcatgaactcccttatcttctgtttttctggaacaggctttatctcttcttcatttctgaaggacagctttgtggggtttggtattcttggctggcagggtttctttcagcactttgagcactgaggcaggccagaagcttttggcagatgtggccagcacaggagtggtgcaatctgaagccaaagttcactgagatatccctggtattgtgagctgtccagagccctggactgctgacatcagcctggcattggtgcagcccagagattgagtttgccttgaaagcctgaagcctcgggtt

SEQ ID NO: 2545 - DNA, 6000 bp, Homo sapiens
gccagccctgaaagagacagcccctgtccccaggggctccctacagcctggcagagacaagcaggggtagaggcaagcataagttggagaagaggtgctacaaaggaaagtcctacttcagaacagggcaagacagctttctagaaaaggcagtgtttgagtattaatgaataaatgggatctagctggggaaaggcaatggaggtggggagaatgaggtgcaggtgccaaggtcccaaggtgagaaggacaggggatgtggacagctccatgtagggggatctcctgggcgcaagaggtcttgtgtgtttaagttttggggtttgactgttaatccaagcggaggtacagaaaggttttaaggagtggcatctgtgctttggaagggcagtttggcaacaggttggaaggcagactgcaagaggcaatgcatgtcaggaaaaccagttagaagagtattgcactgaagagagaatggtgtcctgaactaaggcagagggaaataaagcatgaatgtggaaatgacttgggaacagaagagaaaggaatttggtgataaatggaggcagcacagcacaggtgagctggagtcagactctactgtggatcttaggcaaactacacttgtgcctcagcttcctcatttataaaccaggaatgacagtcattagcacctgtcttatagtgttggtggaagattgaaggagttaatagtatgtgaaggcttggggtacagcctagcacattatcttacccaggaaatattaactatgattatgaagctcagaaaagaagaaaaaaggaatgactaagttcactcccaggattctggtttgggcaactatgtatgcagttctcaaagtgtgttctgtggacatctagaggtctcaatgacgcttcaaagtagaatgtgaagtcaaaactatcttacagtaaaatgtatttgtttaacaataaaattgtttttaaaactgcatctcacctgattctaatttaaaaaattggccaggtgcagtggctcatgcctgtaatcccagcactttgggaggccgaggcgggcggttgatttaaggtcaggagttcaagaccagcctgaccaacatggtgaaaccttgtctctactaaaatacaaagattttttttcctttatgtatgttttagataagcatgaaggataagcaagtttcattaaatgggaagaaaatgttttattcctttcttgttacatgagaaatactattattaagcaccattcatttttgcttagcttcaaatgagtctcatgacaataaaaacgtatgaaaaataccttggtgaaagttttgaacaatctgaccaacaagataaagtattattgaattataattcaaattataaaacgaatatccatgagtgcatactgataggaataaatgactaagttaatgaatggggaaaaagagacaaatctctaatgcagaataaattaaaataatacagatacttcaccctaaaaaagatcactcctcactccttaggtgtgggctgcacacagtgacttccttccaaagagcacagtatggaaagggaggaaaaagagtaattttacaatggagaaacctgacaaacattacctcagccaagcggtcaagatcaacatcaacagtaataaatcatgatgtcggtatgaactcttagtatgatgtgatgaaaatggtactttatctctatgatcttcctccccaaacccataaccccagtcaactcgtctaccggaattcatctgatgtttttgtcgcatggttagcctacaaaatacttgaccagcactcctcaaaactgttaaggtcatcaaaacaaaagtctgagaaactgccatggccaagaggaacctaagacatgacatctaaatgtgatgggtatcctggacgagatcctagagcaataaaaagatattaggtaaaaactaaagacataggaataaagtatggactttagttaataataacacatcgacattgattcattaaatagcaaacacatcatagggtaataaatatgccatactataagatgtcaataacaggggaaactgtgcatgtgtggtgggtgggagaggggagtgagtatatggaagtcctgttccacctgctcaatttttctttaaaactgttctaaaaaataaagtctattaatgtttttaaaagcctggtatttattgggaataattccaccatccgtctatcatccatcatggtaacctagagacctaaaattctataatgggatatcctacatacaattcaaatcagcatttacccaagtcctactatatatgcctttgaactgctgaatactggctataaaaagatgaacaaaacaatttccgaggtcgagttggaaataaaagacatttaaataagtaatttttgtcctgtaagatgagcataactgtagcacagggaaaaggatctgtgaagcttcgacagaggagatatacaaaaaaaaaaaaaaaaggcacagaataaagaaatgggtgggctaagcctgaatttttttttttaagcctgtgcctccaagcatcttctggggttttttcctcctgaaaatgaatgtcggagcaatcaaaatagttaccccagagaagcatggtagaggccaacagtttatttaccatggtgttttaactttacatgtacaataggggaaatatactttaggtgaattttaaaacggataagtaggaaaagagcaagctaaaaacaaacatacccgccccctaccctttattttctctttttttaacagacccacttgtctattgaccaggtatctgtaatatgggagaattcactctattcctttccacacaaagacgtcttggaattttctaatttctcctttactatgattgcattctgttcacataatagtcaagggtatggaaagaacatttataagagcagtgtcttttaaaatcaatttactagttaactcagtactgagcatacattcatcattcaaagatgattcccacaaacgttactcgacatactggttttcagtatattttatcaaattcaaccacgagggccaccagttctgcttacgatcaggtgacccttgttgggagacccctgaccccttttcttgacatcatgctgttagacctttaagctagctataccgctaactgcgttttgagtgactgcaaaagggaggcaacttctgccccgccgagagccatcctaagcgttagaaatggcagaaagtttcttgggactgacaaggcatgggcttctcctgatgctgtcaccttgggcaaagctcctacaggtaaattagggagagaattattttgccggcgtcacgagacgaagaatcgaaaaagtgtgaaaaaggacttcgcccgccccaaagcgcccatccggcggcggctatttcccgggcctcaagcgcgctcgagcggcgcagcacaaaaggccgggcgggagcgggggtcgccgggcgccgcctcccggtgcatctcgggaagggctcccgcccgcgaggctccgtctccccggcgcggcccgctcgccgtccggctcgctcagggcctgggcagacgcggcccgcccgagctaccgcgggttccgagacgccttcgcactgctcctccacccgggggatctttgttcccggagctgttccccgcctcgctgctcccgccgcaaaacctgtttgcggaatacccgccgcaagtctgacttgacgatgtgcagttttggggtgcgccagttgtgggggcattcatagaggcagcgaagggacccctaagtttaaacacccggggaaggataaaggaagagcgtcgggcccccctcctcccaacagcgctcgggcgcgaacggcgccctcccgcgctgccggctcgcgcgggctccgcagggcgcgctggcggcggcggcggggcggggcgcggcaggcgggcccggggcctgcacgtggtggcgatctttcttcccacccggccaggtccccggggaccaccgcgctcagggggaggaggaatgccgttcccgggccccgctccggagaggggttttaccctctgggatcccggaattggaggtggagaagagaggaagcaagggagggcgcggcgtggcgcgagcgtttcctgcgcggggactgcggggtggcagctggaggccactgcaggggcagagcggcgggttgggggagcgaccgacccatggggagggaaacccggtagggggagcagggagccggaaagcagggttgatacatacctgggtgggcgggctggaaatgccttccctgggcgcgccgcgcaaggccggcggagcgggctccgggtggtcgcggaccgggactggggagagcagagccgcacttggccaggcgcgtggctgagtggtgtttacattctgcagccactccacgttgtgctgccgcccgtgcctcccattggccagctcttcagccaacgctttgctcctccccgaggggcgggccctcgggtccccgcgtcgctcaggaaagacctgggttccctgaggccttggcgggacagctagggcgcgcccctggacggtcacttcccagccaccctatggtcgcccgagtcgtgtccccctgttatgcgcccgggctgagccgcaggctgacacccccgaaatccaggagttgcagtgggaggaagcaaaagcaaactggcgggagatgcgcgagccaggcggcggggagaacagccgcggagaaggagcccctgagagtttccctaccgccgccggccgcgccgtggagcgcggtggacgcgggcagaaggcccggtagagtggaccccacggccgctccgggtggcgggcgcgcactgagagcagggcgcggcgcgcgggcacgcgggcggacgggcgggagaggggagcgcgctgtccggaggtgtcagtctgaggcgcatgcgtgcggggcgggaccggcccggcctatatattgggttggcgccggcgccagctgagccgagcggtagctggtctggcggtgaggagttgctgcgcgtaggggggatgtgggaggaaagaaagcccagttgggccgatcacttaccacaggcgggagcctcagggaggaaaatcgggagggctgagaactagacgactgggggtcatgggttcccgcgttccgtccctgtcaggaaccttggcaggggaccgggaagcggctgggcatggagagccgcccctcattctaggggcttctctatcccaccctcatttggggagctatcccgtgggagagaggatgggaggccgggtcccctccatggggagaaaagttcccagccagcccagtctcccctttctttagctccttttcctgccctcccccacgccctccgcttcccatctggagttggggtcccggcgcccctccgagcggcggtagggcggcagggccgggaaggagggaaaggagactggaggccgtgacaccagtcttggttcctccgccccctgcttccccgccaccgccgctctccaaattggcgcggaaccggcttctccacagcatttcgcctccacaaccccctctccccgctggtccaggagggaggcgggacgtgggggcgctgcccaagccccactcccggtgtacgggggagagggtggaggacccagaaaaacccgtttgaggaagatgtgcctccctgcgcgttcaaggtgtcaggagtgcttggtaaatttttggacactcgcgttccagctgtacattcagttgaggaaatgcaggcttgtatccaaaatgaattaccatgagctagctaacatagcacagaagatggcagggtcacagggcccaggcccccttcggagggactgagctttcacctgcgaatcagcgtcttactggcacttggagaatgtgaatgacaatgtacttgactgcggcttttcctctccccccttcagaggttttatacacctgaaagaagagaatgtcaagacgaaggtaaca

SEQ ID NO: 2546 - DNA, 6000 bp, Homo sapiens
aagtgatcgacctgcctcagcctctcaaagtgctgggattacaggcgtgacccaccatgcccggctaaaaaacataatttaaattgtgcaatccatgtaatatacaaactctgtttcacatagataaaattcaactttcagacattgaaatgcaacttttaattagaacttggaagaagctcttaaagtaaataagaaaaaaaacttctgccttaatttttggaaacaatttcctttgcatgaataaatagaagcctgaagtaacacagtgggaacctggactatgatcatccaaacctgcagatttcaagggagtgctttctagttccacttatttatactttacaaaggttgctgttaaaagataaccacgttgcttttcccataagtggtctgaagtaatctgtgaaaatagctggctattcactttacctggaaaaccccacaaaatcatgcaaatcaagaggttcaaatctttgtgttcactgtaagaacactcgtgaaactgcccaggctatcaagggtatgcatatatgaaaaaccacaaagtggccggcacagtggctcacacctgtaatccctgcactttgggaggccaaggtgggtggatcacttaaggtcaggagttcgagaccagcctggccaacatggtgaaaccccgtctccactaaaaatacaaaaaattagctgggcgtggtggcatgcttgtaatcccagctactcaggaggctgaggcaggagaatcacttgcacccaggaggtggaggttgcagtgagccgagatcgtgccactgcactccagcctgggcaacaacagcaaacctctgtctccaaaaaaaaaaaaaaaaaaaaacaccatgaagtatttttaaaatgtcactttacagaaacagcatgtgccattctgacattacaatggtggagttggtaggtgtacccaggccaagcagtgggactggacacaaggttggtggcccaaaaagagtgctgaatttttgctgcacatgcttaaaaatgcagagagtaatgctgaacttaagagtttagatgtagattctctggtcattgagcatctccaagtgaacaaagcacctacgatgtgccaacggacctacagagctcatggtcggattaactcacacgtgatctctccctgccacatcgaaatgatctttagtgaaaaggaacaaattgttcctaaaccagaagaggcggttgcccagaagaaaaagatatcccagaagaaactgaagaaacaaaaacttatggcacaggagtaaattcagcactaaaataaatgcaattaaaagtgaaaaaaaatgttttctcaagagcaatacaaaaaagttaaacacataaggcatgtgatcacagtcaagagaagtctcaatcacctctaaatagatcatctacagcaggatcacctatggggtgggtaaggtgggacagaatgcagggaaagggggattggtgagtttaagtgtctgattccattaaattgcttattaaggccaatcataaattaatacagtacatgttttgtataagctgtacctcttagttacactcatggactagaaaaaagaattaagtatagaccttattaagtttggtaagaaataaatagggttgatacatcaattggaaaagcttcctttgagttgaagctgcaagaaacacgaataaaaattttaaaggaaaaagctgtacatgtaaaaatgtttctatcttaacaaaaaactaattcagtcctgttaagtctttatagtactcagcaagcaaatgaaaataattttatagaatcagtgttttaaatacccatatcatttgcaaccagcactactctcagataaaatgacatatgattaaatattagtaaacaatttttacacgtttttctactttatgaaagcaaaagacaaaatagtgccatgtattaaatcagcacaactttatatctttgaaataaaattactgaaatttttcttaccttaaatcaggcaaaggtgaaggattaataaaaagatttttaaatctgtaatttgtaaatctggagaaatcacttgttcctatttctttgtgaggtgtttcaatgataatgcaaggactgatccccccagataatacaggtggccaacaattctgtcataaaaaaaaagaaaaatatcaatttgtgcaaggaaaaccttagtttttgtaatggatctttcataaatgaaagctaatatgtctaaagaatcataattttagctaacatagatggcaatatagctaatttgacattcacattttataaacaagccatatagctcatattgatttttataaagagtaataggatgttttagacaacaaaatgcaattctggtaatagaagacaccaggtgtcgaagaaggacagtaataacaaaatgcatctgcagtctaaaatactaatcactttcaagatcacagaatcgttctctgtatctagcaatagtagcagggacctttttttttttttttcaaataagctctttttaaaaaaagtgtgctctgatacttttgaatatttgaaagcaaaaccttaaaaatggaatcgattacttaaacgattcttttcccaataatgctggtttcaaacgcaatcactatctccaaagtgctgctttctgtaaaacacataggaagaagaggtaccaaagggctgcgtgccaggctgtcagtgatctcacatcctatttatgcccaagaagcagctattaggaccgtctactagagtctgcgagggaacaaagagcagtatattggacagattaggcgggccctggtgcaccaggcagttccaagagggagggatttacaaaaaggaaccagctgcttgaaggcacttattctgcagctgtagtaggattcgggcacatagaaaccacccaaagataggcgccttcctgctgacctctaggggcattaaaagtaaaagtgtcagaggaatctatcgcaaagcaataaacacataattctattcttattcatctatcctccatttttcccccaaacccacccagcccagttctgcattaccctaatttcatactgatgtttcttggtgacctcctctcttctttttttgacatcctggaaaatagaaaagaccattggtaaactaaagtcccagcatggaatttcgttcctccctctttctccttaaatcacctgggtagttttcctcttcttggcctggattatctgggcttcttggggggattccgtctggctgggctggggctgctgcttagcttgtaaacggctactgtagtgaatttttaaaaaggaagtgtaattagtaagttaaaggcagcaactaatttgaaacatgtctctaagacagataatgttaccttcgtcttgacattctcttctttcaggtgtataaaacctctgaaggggggagaggaaaagccgcagtcaagtacattgtcattcacattctccaagtgccagtaagacgctgattcgcaggtgaaagctcagtccctccgaagggggcctgggccctgtgaccctgccatcttctgtgctatgttagctagctcatggtaattcattttggatacaagcctgcatttcctcaactgaatgtacagctggaacgcgagtgtccaaaaatttaccaagcactcctgacaccttgaacgcgcagggaggcacatcttcctcaaacgggtttttctgggtcctccaccctctcccccgtacaccgggagtggggcttgggcagcgcccccacgtcccgcctccctcctggaccagcggggagagggggttgtggaggcgaaatgctgtggagaagccggttccgcgccaatttggagagcggcggtggcggggaagcagggggcggaggaaccaagactggtgtcacggcctccagtctcctttccctccttcccggccctgccgccctaccgccgctcggaggggcgccgggaccccaactccagatgggaagcggagggcgtgggggagggcaggaaaaggagctaaagaaaggggagactgggctggctgggaacttttctccccatggaggggacccggcctcccatcctctctcccacgggatagctccccaaatgagggtgggatagagaagcccctagaatgaggggcggctctccatgcccagccgcttcccggtcccctgccaaggttcctgacagggacggaacgcgggaacccatgacccccagtcgtctagttctcagccctcccgattttcctccctgaggctcccgcctgtggtaagtgatcggcccaactgggctttctttcctcccacatcccccctacgcgcagcaactcctcaccgccagaccagctaccgctcggctcagctggcgccggcgccaacccaatatataggccgggccggtcccgccccgcacgcatgcgcctcagactgacacctccggacagcgcgctcccctctcccgcccgtccgcccgcgtgcccgcgcgccgcgccctgctctcagtgcgcgcccgccacccggagcggccgtggggtccactctaccgggccttctgcccgcgtccaccgcgctccacggcgcggccggcggcggtagggaaactctcaggggctccttctccgcggctgttctccccgccgcctggctcgcgcatctcccgccagtttgcttttgcttcctcccactgcaactcctggatttcgggggtgtcagcctgcggctcagcccgggcgcataacagggggacacgactcgggcgaccatagggtggctgggaagtgaccgtccaggggcgcgccctagctgtcccgccaaggcctcagggaacccaggtctttcctgagcgacgcggggacccgagggcccgcccctcggggaggagcaaagcgttggctgaagagctggccaatgggaggcacgggcggcagcacaacgtggagtggctgcagaatgtaaacaccactcagccacgcgcctggccaagtgcggctctgctctccccagtcccggtccgcgaccacccggagcccgctccgccggccttgcgcggcgcgcccagggaaggcatttccagcccgcccacccaggtatgtatcaaccctgctttccggctccctgctccccctaccgggtttccctccccatgggtcggtcgctcccccaacccgccgctctgcccctgcagtggcctccagctgccaccccgcagtccccgcgcaggaaacgctcgcgccacgccgcgccctcccttgcttcctctcttctccacctccaattccgggatcccagagggtaaaacccctctccggagcggggcccgggaacggcattcctcctccccctgagcgcggtggtccccggggacctggccgggtgggaagaaagatcgccaccacgtgcaggccccgggcccgcctgccgcgccccgccccgccgccgccgccagcgcgccctgcggagcccgcgcgagccggcagcgcgggagggcgccgttcgcgcccgagcgctgttgggaggaggggggcccgacgctcttcctttatccttccccgggtgtttaaacttaggggtcccttcgctgcctctatgaatgcccccacaactggcgcaccccaaaactgcacatcgtcaagtcagacttgcggcgggtattccgcaaacaggttttgcggcgggagcagcgaggcggggaacagctccgggaacaaagatcccccgggtggaggagcagtgcgaaggcgtctcggaacccgcggtagctcgggcgggccgcgtctgcccaggccctgagcgagccggacggcgagcgggccgcgccggggagacggagcctcgcgggcgggagcccttcccgagatgcaccgggaggcggcgcccggcgacccccgctcccgcccggccttttgtgctgcgccgctcgagcgcgcttgaggcccgggaaatagccgccgccggatgggcgctttggggcgggcgaagtccttttt

SEQ ID NO: 2547 - DNA, 6000 bp, Homo sapiens
ttccacagtaaagaattctggcttcaggaggttttttgttgttttgtttttttgtttgtttgtttgtttttccatttataggctcttttctgctcacattccacagtattccaaaataagactcacaggtgtctggtgaatgaagcagtgctgttaggctactattctgtctgaagttgagatatgcacagaacctattgattttaccgtgtatttagaatatagtaatatattctaaatctaaagtatcccagagcaacaacattgtgctctttattgtaagccctatcatataattatttttaagaaggtccttaaactatttattctttgactcagtaatttcattattagaaatttttcctaaggaagtaattcaaagtgtggaaaagctatctctgtgaaaatgttgattacattgttctttacagtttaaaaagagagaagcctgaaattttaaaagtagaggaatggttcaaaatgaaatattatgtagccattaaaagtagtttaaatgagaccagaagcagtcgctcatgcctgtaatcccagcactttgggaggctgaggcgagtggatcacttgaggtcaggagtttgagaccagcttggctaacatggtaaaatcccgtctgtactaataatataaaaattagccgtgtgtggtggtacacacctgtaatcccagctactcaggaggctgaggcacaagaatcacttgaaccgggggcgcggaggttgcaatgagctgagattgtgccactgcactccagcctgggcgacagagtgagactccatctcaaaaaaaaaatagtttaaatgatagctaataaggttaccatatgtaagggaagaaaacacaatttaaagctattttgtatgagaccagttaggatgagttttaattgatgaatatgaaaataaactgcaggcagataaatagaaaagcccttaaggttgtgagataatggatacagtttttttagtttatctaaaatgtctgcagttataatttgaaaactcatttaaaatcattttcagatggaatgaaatgtgaatatgataaaagccatgctaaattatacacttatatttattagaacatacctttggaagatagaaatcagtggtgactttttaattagatttattttataattgaaatttttcttttttttttttttaatagctctttacacgctgtcttacaccgcttgtaccagaagaccttagaaaaaggaggaaaggaggagaggcagataatttggatgaattcctcaaagaatttgaaaatccagaggttcctagagaggaccagcaacagcagcatcagcagcgtgatgttatcggtttgttctgttggaatagttccttgatgaagttcacatgagtatttggcttaaaatttacctttatactgtcagagtgaaagaaatgaggaatcaaagatatactcaaatgtttgggcagggaaatgcattggatctgattgccttatttaagtatgaagcctcctgtctttccagagttttaaggttcagaactggcagggtagatagtctgctaaagaattgtcctacattgtactgagggtaggacttgtccttttaagatcccctttcccctttacgtatattgctaaaaattgagtaaatctttatggagctaaaattttatctggccttcttcattaaagaaagcattatgtatgtcttagtgtactagtttaaaaaataaatggttctataatactgttcaaaactgtatgacctatgttttctcttcatatgaccaattgcagatgagcccattattgaagagccaagccgcctccaggagtcagtgatggaggccagcagaacaaacatagatgagtcagctatgcctccaccaccacctcagggagttaagcgaaaagctggacaaattgacccagagcctgtgatgcctgtaagtaagcaaatctatccattaagtcatttgaaggtattcatacagtcagtagcaagtggtatttagggaggccttttaaagtatcttggttttgacagaaaatggtaaggaatgagtccagaggaagaagagcaacaggatatagacagtccactcggagtgagagaatatgttctgggagtcggtgcagtctttcctgactctttttgaatagtattgctttagagtgctccagagtgagcatccttgactctgaagttggttctgatttattatttggcaaacattcctgcacaccttcagtactaggcagttttaggtcatcttattaagtaatcagaataaacttcaaatacctgagaaaatgtaaagcagtatctgtctgcttcattcaaactttgactaccattgagttcagctaggataggaaagctaagcaagtatgaaggaggaaatagtagggtttggtttagggctttccaatcttaagtccatagaataaatgaatttgtgcaaagggaggcttttagataaccttaggcttcttgttcagcctccatcaagaatactctgccaattttaagaactagttttctgtgccctctggtggtaagagttgtcaataagagcatttttctgtatgagctcaggaataggaacacagtaatgagtaggtgactttcataaccaccctccttctggtaattctttagtttcttttaaagactttggttttaatgttcttaactctttctgtaaagcctgagagaagatataggaagtggacccagaaaagcaatgtcctcactcctattatttgctgccgtgagacattcaagactctcagagagaaagcttatgatttataagttacaatataataaccttacagaagctttagtagttaaaaagcatttgactcctaaaaagtaagtatgaaaatgaaacatggtttaggataagcagtcagtttcttttgtaagctacttcaatgtagttttataaaaaatcaaaaaagatatatactgtaataaatttttccttgtggggaagtatagagatataatctcagtatttctttttgactagaaaacttcagccactgtgtattttcatatttaaaataagctactttaaaagcatatatcttaaattgtcttatttgtattgctttaagcctcagcaggtagagcagatggaaataccacctgtagagcttcccccagaagaacctccaaatatctgtcagctaataccagagttagaacttctgccagaaaaagagaaggagaaagagaaggaaaaagaagatgatgaagaggaagaggtaaactaattaataattttcattccagatttagcaaaaacctccaaccagctttatttttcatattggggctaacttaattgatgctgagcatcagagttatttaaaaatgttagaatataagcaaaattttaccatattcttcgtggtattgatcatcattaggaacatcaaattttatgcttcgctgtaactcattggctctcttgtggggttttgaaggacatggaattgtccttacactgatttcttgcttggcttctaaattgcgtgtagctgcttttactatcttgtggtcagtggacgattcttactgctgttattgtctgcttctgatataaccttttctgtatctgtggtggcctggaaatcagataaccatatgttttccacttgtctgggttttgtttttgtttttcttttacttggaccagggtaaagcataactttgctaaaacacttagactgagtgaaggcttaaatgactttttctttttacaaagtaagaggtgttttaggaatcaatttctttttcctggggcatgtttacactgttgaaggtcttttttcttctttttcttcctaatttctggatcattgaggttgttgtttaagacttagaatttattcttctgtttgatactctatcggatatgttacttaaacctttaaatttaaaataaggtgtcctttaggtagcattgaagctgtttaaatttcttcaagaccaaaaaaggttatggattggataaattttcagtagcatctgttcttaattctaataatagtgcttatctttaatatgaatatcttattttaaagccaaaattagtttcagagccacttctacctatgtgtgaggatgtgccattatctcagacttagttgtgaatgagtattaaaatagttgtggtttctgttatggctggtatatagtttcaccatagcctgggaacatcacaactgctgccttgcacccaccttggactttaaaaagtcatttaggcagcatgtggctgagaactaggttgctcaagtgaaatatataataaggagtatagcccattcattttaaaacaccatataaatcaacttaggtagtctgcaggctctttggtactgctccacaatgagattaagagtctgccagaacattagtcatctagaaaatcatgttgcaatatttatgtatgtatatttagttgaaataaacagtatatttagtggtacagttgatttatatcctgaagttctttaagaggggccagtaaccaaaacctccatgatcagcagcagtccacagaccacatagtgtgtgtagatagcatccttatagcgcaatatagaagcatactttcagccaaatgtttgcttgcacatagaggactttgccttgtaatttaagaaaaacagactcttcagtttgtactctaaatgctaagtgattgctcagcagcattaagtacagttttctattagttcaaaatacacaatctcaaggtaatttaggagcttttaggagatgtagaaatacttcatttttcattggacttgttttgtcagctttttgggggtcatttttattcaggatgaagatgcatcagggggcgatcaagatcaggaagaaagaagatggaacaaaaggactcagcagatgcttcatggtcttcaggtattgccgctgttgtctcagaggaaaatgcttcatcaaaggcttttgccattgttccctgaaaaaaaaaaagttagatgctggaaacagaaagcatacctttgtcaaactttttccaaaactacatttttatttatttatttattttttctggagggagagttttcttttcttttttttttttattatagtttaagttttaattaaatacataaactgttaggccaagagtaagccggaaaagcatggaggagaatgcttgtggttttcctgaaaagcagaaccatggtgacataccacacaactcctttgtatgcctgcaccttcttgttttttgttgagtaaatttaatgtgctgaatcattaaatttattgggtcattgtgtagcatcagacgttacttttccttgtgctttaatgtcctagacatagacaggatatcttgaatgtctgcaaaatgccaagcaagttgctcaaggtttcttaaaataggacagttgacatgtgtttattaattttttactttaaaaactataagtgctagattttactactatattacattagctgtctaaagaaattggttattttaataatacatgtcagaacaattttgctggtttcttggactttcttatttggattttagatgtaccataacatactttggccttttaccctcttgattaacatgagaatcacatactatttaaaaaagtgcaatctttgtcctaagcagaatatatagtttgttttttccagtaaccaaaattagcatctgtgttagtctgttttgtgttgctctaaaggaatacctgagtctgggtaatttataaagaagtttatttggctcacagttctgcagactatacaagaagcaaagcaccagcatctgcttctggtgaggcctcagaaagcttatagtcatggtggaaggcaaagggggagcaggtgtgtcacatggcaagagagggcatgagagagatggctaggcgcttttaaacaagcagctcttgtgttaactaacgagcaagaattcactgattgcc

SEQ ID NO: 2548 - DNA, 6000 bp, Homo sapiens
gaaaatacaaatgaagaatgagaatttttttttatataccaagtgttttatacttttataaactacctggaggagaaacagataaaagttgagtatacgtttaaattttatcccttttaacataattttgtttttccattgattggctgttgtggtttggcatttctttttcaaattataactaacttacattccctatttcagatgacaaacttattagtaataatgatggcggtatctttgatgatccccctgccctctctgaggcaggggtgatgttgccagagcagcctgcacatgacgatatggatgaggatgataatgtatcaagtaagcatttcatgttcagtgattctggggatgattgtatggcatccagaaagatacttaccatagaagatgacaaactaaaagttgtagtttttagtgaattataaatatctttaagtacagtgcttatgattactggttctgattctatgtttaatcttgcacccctccccatttttttggccaattgggttcaagtctggcggggctttcccattaactagaaaaatattttttcttagtaataacaggatttctttccatttcatgaagagatttttctcctccccatttgtgggatatatgttatataccaaagctttttgtgactttttttttttttttttttttttacagtgggtgggcctgatagtcctgattcagtggatcccgttgaaccaatgccaaccatgactgatcaaacaacacttgttccaaatgaggaagaagcatttgcattggagcctattgatataactggtaagcatatgaacctttagatttatacagcatacaacataaggtcctatttctggtttttgcctgtctactgatctgctactgttgtattagataactaggcttcttgcttttttctgtttttttggcctgtctactgatctgctactgttgctttagttaactagcttcttgcttttatgtcacagtcatctgtcatagagtctttcttctatccaattataattttgagtattttgtagaatgtctgtgcaagttgctgtgaaatacaaaagtatagaacaagctttctgataatgcatatcttagtctcctggggttcccagaaagttagcagcttacttgtgtaacaactggaaaacattggaaagcttttttcaataaagtacaattctaaatgctgtgcagttggtctacgagctggaaaaaactaaaagtattctttttaaaaaaaaaacaaaactagaggctggtgtggtggctcacacttgtaatccagtactttgggaggcccaagcaggaaaaccacttgaggccaggagtttgagaccagcttgggcagtaaatatagtaagacctgtctcttcaagaagaaatttttttaaaaattttatgcactcttagaatttgcctttttccacacattctgaaaaaagaaatttttttaaatttaaaaactggaaatgtcaaaatttctagaataatctttttcttgtagtttttttaagtaacattgcaagacacattatttaatttgaggaaggctgcttctgaatgacagacaatttgagataatggggatataaaacctaacaatttctagatggtttatgaggacagtaggatagaatacttgaaattgattacagtgtaatttagacatagtttttacctttaagtagagcaagattacccttttgggtttcccattgatgagggaaatgggcaattaagtaaaatatatactgtattagatggtgagattagagagagactctcactgtgtaacatctttttgtattttttttttaagtgttgaaccaaaaacctttggggtatgtctgacagggtgaaatcttgaggattttatttaaccccatgcgcttttctgcattttaaaaaagtgaggcaatacaacctacttgtaagttgtaaggattagaaatgactcttaaaatgtctaggatggagttaacaggtctatctgactgggcttgggcttgtttcattctatcaagcagcttccacaactgccatatgtgaattacaacttttctaataaaaataacagtatttacaatcattaaagaaaactcaatctgtgagtttgagtgatgggccctgtttcaaatgagaaaatgagcccaactctgaagagtgtgatatgttcattgtttacagtataaaactacataggcaaaaatgtgttggcccttgcgtcattttgcttattttgtgctaaaagtctatacatactcattcagcaaatttttgttgaatgcccgttgtgttccagcctctcttctgaatggtggttggaaaacatgagttaaaacgttctatcctcatgaagtttaacttctctgctagagtctgtgtgtagaaaagcaggggaatatagtcagtccagatcttgtagctgtgtgttccatgctggcctctcaggaaaatgatcttattttttattatcattccagttaaagaaacaaaagccaagaggaagaggaagctaattgttgacagtgtcaaagagttggatagcaagacaattagagcccaacttagtgattattcagatattgttactactttggatctggcaccgcccaccaagaaattgatgatgtggaaagagacaggaggagtagaaaaactgttttctttacctgctcagcctttgtggaataacagactactgaaggtaatatagtttgcagaatttttacttcatatacattttgagcatctaaaaaaaaaagattctaaaacctttgaatcatttttgatcaagtattttgcaactgtatggcacattttcttttttctcccttaaatcacagtgtactgggcataacttcatctgaaatatatggataagtgagacctgcatttctaaaagatgtaaaatgaattttccttacattaaaaagccactgacgtgtttaataatacttctctctgtaataaattattagttatatcgtcttagtgtgttttacatctgaattcttgaaatgttttctgaatgaaacatgagtggttctcctttttccacagtaaagaattctggcttcaggaggttttttgttgttttgtttttttgtttgtttgtttgtttttccatttataggctcttttctgctcacattccacagtattccaaaataagactcacaggtgtctggtgaatgaagcagtgctgttaggctactattctgtctgaagttgagatatgcacagaacctattgattttaccgtgtatttagaatatagtaatatattctaaatctaaagtatcccagagcaacaacattgtgctctttattgtaagccctatcatataattatttttaagaaggtccttaaactatttattctttgactcagtaatttcattattagaaatttttcctaaggaagtaattcaaagtgtggaaaagctatctctgtgaaaatgttgattacattgttctttacagtttaaaaagagagaagcctgaaattttaaaagtagaggaatggttcaaaatgaaatattatgtagccattaaaagtagtttaaatgagaccagaagcagtcgctcatgcctgtaatcccagcactttgggaggctgaggcgagtggatcacttgaggtcaggagtttgagaccagcttggctaacatggtaaaatcccgtctgtactaataatataaaaattagccgtgtgtggtggtacacacctgtaatcccagctactcaggaggctgaggcacaagaatcacttgaaccgggggcgcggaggttgcaatgagctgagattgtgccactgcactccagcctgggcgacagagtgagactccatctcaaaaaaaaaatagtttaaatgatagctaataaggttaccatatgtaagggaagaaaacacaatttaaagctattttgtatgagaccagttaggatgagttttaattgatgaatatgaaaataaactgcaggcagataaatagaaaagcccttaaggttgtgagataatggatacagtttttttagtttatctaaaatgtctgcagttataatttgaaaactcatttaaaatcattttcagatggaatgaaatgtgaatatgataaaagccatgctaaattatacacttatatttattagaacatacctttggaagatagaaatcagtggtgactttttaattagatttattttataattgaaatttttcttttttttttttttaatagctctttacacgctgtcttacaccgcttgtaccagaagaccttagaaaaaggaggaaaggaggagaggcagataatttggatgaattcctcaaagaatttgaaaatccagaggttcctagagaggaccagcaacagcagcatcagcagcgtgatgttatcggtttgttctgttggaatagttccttgatgaagttcacatgagtatttggcttaaaatttacctttatactgtcagagtgaaagaaatgaggaatcaaagatatactcaaatgtttgggcagggaaatgcattggatctgattgccttatttaagtatgaagcctcctgtctttccagagttttaaggttcagaactggcagggtagatagtctgctaaagaattgtcctacattgtactgagggtaggacttgtccttttaagatcccctttcccctttacgtatattgctaaaaattgagtaaatctttatggagctaaaattttatctggccttcttcattaaagaaagcattatgtatgtcttagtgtactagtttaaaaaataaatggttctataatactgttcaaaactgtatgacctatgttttctcttcatatgaccaattgcagatgagcccattattgaagagccaagccgcctccaggagtcagtgatggaggccagcagaacaaacatagatgagtcagctatgcctccaccaccacctcagggagttaagcgaaaagctggacaaattgacccagagcctgtgatgcctgtaagtaagcaaatctatccattaagtcatttgaaggtattcatacagtcagtagcaagtggtatttagggaggccttttaaagtatcttggttttgacagaaaatggtaaggaatgagtccagaggaagaagagcaacaggatatagacagtccactcggagtgagagaatatgttctgggagtcggtgcagtctttcctgactctttttgaatagtattgctttagagtgctccagagtgagcatccttgactctgaagttggttctgatttattatttggcaaacattcctgcacaccttcagtactaggcagttttaggtcatcttattaagtaatcagaataaacttcaaatacctgagaaaatgtaaagcagtatctgtctgcttcattcaaactttgactaccattgagttcagctaggataggaaagctaagcaagtatgaaggaggaaatagtagggtttggtttagggctttccaatcttaagtccatagaataaatgaatttgtgcaaagggaggcttttagataaccttaggcttcttgttcagcctccatcaagaatactctgccaattttaagaactagttttctgtgccctctggtggtaagagttgtcaataagagcatttttctgtatgagctcaggaataggaacacagtaatgagtaggtgactttcataaccaccctccttctggtaattctttagtttcttttaaagactttggttttaatgttcttaactctttctgtaaagcctgagagaagatataggaagtggacccagaaaagcaatgtcctcactcctattatttgctgccgtgagacattcaagactctcagagagaaagcttatgatttataagttacaatataataaccttacagaagctttagtagttaaaaagcatttgactcctaaaaagtaagtatgaaaatgaaacatggtttaggataagcagtca

SEQ ID NO: 2549 - DNA, 6000 bp, Homo sapiens
taagcttgtgctgttggaaaatggcaccaacagacttgcttaaggcactgttaccacaaacctttggtttgttaaaaactcagcatctgcgaaactcagtaaaacaaagtgcagtaaaacaaggtatgcctatatgatagccagtcagcattcaaatgtccccagttgacatgtcggcttttttttttttttttttctcccagttcgagttgaggctaaacaaagtctacaaactgcatctggttgatatagcttatgggtctcctgagaatctattacagctttgccgcctcctattttttttttccttgccatctattttttgtacagacttggtcagttgttttgaggtattaatgttctggatatggctgatagtgtttagattggtgtttagcattacatactttttattttttatttagtatttttaaactatatgagagattattctttattagagaaagaaactgagtctcagggaagtcagggaactttagagtttacaccgcctgtaagttgcagggtcctaatgaaaacccatgcctatctagcccatgatttctaattttttcctctgtacttgatttagtgacttctgcatattacattgtatttgctgattattgatgcttttcaaatttaaatacaagttaatttccaaatcacttacattcttggattgtactggaatgtgtgaaagtattaaatattaaggcttctaaaacttggtgggttatacatatatatttttttaatttttcttatagagagaattgggatttgtttttcttatacatagacttgaaactaaaatgtatttgaccttcttttaaagtgacatcgatgtggcccagcagttcagcttgaatcagagtagagtggaagagataaccatgagagaagaagttgggaacatcagtattttacaagaaaatgattttggtaaaagagaaacaaattattagccattaattataatgttatattgtgttgctaatagcaatttcaaaagaaaaccagactatagacagaaagacttaaaatttcatgtaatgcattttcatcaagaaaagaatttggctttctaccagtagattaagcattattttcatacttggagctaattgtttacctacttctctccctatatgcaatcatagaacctatatattgatttctgcgaggagtcccaacattgaagtggtgatcacgtttaaaccaaccattttggaacagttagtttccctgttatacttgctattcaaaaacaggtattcaaaactagttagcaaggcatattgttttttaagaggcggggtctctgctgtgttatccatgctggagtgccgtggctcttcacaggctggattatagcacactacagcctcgaactcttggattcaagtgatcctcccacttcagcctcaagtagctgggactacaggcacatgccactgtgcccagaaccagattcttttcttgatgaaacacattataacgggaaagtttcagctgtgactgttaatgtaacttaacatacatacatatttagagtttatcaaacatattttaggatcatttaaatctagatctaagtttgaatttgctagtcatgccccagtgttgtaactgtgtgtaattgagtcattttaaaaaattcagatgctaaagaattaaagtttaaactagatattttaacatttgaagtaagacttcagtaagcaaatgtgacataattagaataaatcattagcagttttcttttatcacagtgctatttctaatctttctaaactaatgacaaattaaaatttgtttaggtgattttggaatggatgatcgtgagataatgagagaaggcagtgcttttgaggatgacgacatgttagtaagcactactacttctaacctcctattagagtctgaacagagcaccagcaatctgaatgagaaaattaaccatttagaatatgaagatcaatataaggatgataattttggagaaggaaatgatggtggaatattaggtatgtgggaatgatggttattccagcataaacagaatttctttattaagttgtaaagttttggaaacagttgctaattctgagtcttgaacagcttttagatatatatgagtgaattgtgatcagttggttcaataggacatttcggtaaaactagcctcttaaaatgttgtaacaaaacctaaatatgcttatctcagaatgctaaattttattagtacttaaaactgttctgtttgtgtttgatagctgtgttaagtaaaatattttttaaaatagataaataaactagaaaatacaaatgaagaatgagaatttttttttatataccaagtgttttatacttttataaactacctggaggagaaacagataaaagttgagtatacgtttaaattttatcccttttaacataattttgtttttccattgattggctgttgtggtttggcatttctttttcaaattataactaacttacattccctatttcagatgacaaacttattagtaataatgatggcggtatctttgatgatccccctgccctctctgaggcaggggtgatgttgccagagcagcctgcacatgacgatatggatgaggatgataatgtatcaagtaagcatttcatgttcagtgattctggggatgattgtatggcatccagaaagatacttaccatagaagatgacaaactaaaagttgtagtttttagtgaattataaatatctttaagtacagtgcttatgattactggttctgattctatgtttaatcttgcacccctccccatttttttggccaattgggttcaagtctggcggggctttcccattaactagaaaaatattttttcttagtaataacaggatttctttccatttcatgaagagatttttctcctccccatttgtgggatatatgttatataccaaagctttttgtgactttttttttttttttttttttttacagtgggtgggcctgatagtcctgattcagtggatcccgttgaaccaatgccaaccatgactgatcaaacaacacttgttccaaatgaggaagaagcatttgcattggagcctattgatataactggtaagcatatgaacctttagatttatacagcatacaacataaggtcctatttctggtttttgcctgtctactgatctgctactgttgtattagataactaggcttcttgcttttttctgtttttttggcctgtctactgatctgctactgttgctttagttaactagcttcttgcttttatgtcacagtcatctgtcatagagtctttcttctatccaattataattttgagtattttgtagaatgtctgtgcaagttgctgtgaaatacaaaagtatagaacaagctttctgataatgcatatcttagtctcctggggttcccagaaagttagcagcttacttgtgtaacaactggaaaacattggaaagcttttttcaataaagtacaattctaaatgctgtgcagttggtctacgagctggaaaaaactaaaagtattctttttaaaaaaaaaacaaaactagaggctggtgtggtggctcacacttgtaatccagtactttgggaggcccaagcaggaaaaccacttgaggccaggagtttgagaccagcttgggcagtaaatatagtaagacctgtctcttcaagaagaaatttttttaaaaattttatgcactcttagaatttgcctttttccacacattctgaaaaaagaaatttttttaaatttaaaaactggaaatgtcaaaatttctagaataatctttttcttgtagtttttttaagtaacattgcaagacacattatttaatttgaggaaggctgcttctgaatgacagacaatttgagataatggggatataaaacctaacaatttctagatggtttatgaggacagtaggatagaatacttgaaattgattacagtgtaatttagacatagtttttacctttaagtagagcaagattacccttttgggtttcccattgatgagggaaatgggcaattaagtaaaatatatactgtattagatggtgagattagagagagactctcactgtgtaacatctttttgtattttttttttaagtgttgaaccaaaaacctttggggtatgtctgacagggtgaaatcttgaggattttatttaaccccatgcgcttttctgcattttaaaaaagtgaggcaatacaacctacttgtaagttgtaaggattagaaatgactcttaaaatgtctaggatggagttaacaggtctatctgactgggcttgggcttgtttcattctatcaagcagcttccacaactgccatatgtgaattacaacttttctaataaaaataacagtatttacaatcattaaagaaaactcaatctgtgagtttgagtgatgggccctgtttcaaatgagaaaatgagcccaactctgaagagtgtgatatgttcattgtttacagtataaaactacataggcaaaaatgtgttggcccttgcgtcattttgcttattttgtgctaaaagtctatacatactcattcagcaaatttttgttgaatgcccgttgtgttccagcctctcttctgaatggtggttggaaaacatgagttaaaacgttctatcctcatgaagtttaacttctctgctagagtctgtgtgtagaaaagcaggggaatatagtcagtccagatcttgtagctgtgtgttccatgctggcctctcaggaaaatgatcttattttttattatcattccagttaaagaaacaaaagccaagaggaagaggaagctaattgttgacagtgtcaaagagttggatagcaagacaattagagcccaacttagtgattattcagatattgttactactttggatctggcaccgcccaccaagaaattgatgatgtggaaagagacaggaggagtagaaaaactgttttctttacctgctcagcctttgtggaataacagactactgaaggtaatatagtttgcagaatttttacttcatatacattttgagcatctaaaaaaaaaagattctaaaacctttgaatcatttttgatcaagtattttgcaactgtatggcacattttcttttttctcccttaaatcacagtgtactgggcataacttcatctgaaatatatggataagtgagacctgcatttctaaaagatgtaaaatgaattttccttacattaaaaagccactgacgtgtttaataatacttctctctgtaataaattattagttatatcgtcttagtgtgttttacatctgaattcttgaaatgttttctgaatgaaacatgagtggttctcctttttccacagtaaagaattctggcttcaggaggttttttgttgttttgtttttttgtttgtttgtttgtttttccatttataggctcttttctgctcacattccacagtattccaaaataagactcacaggtgtctggtgaatgaagcagtgctgttaggctactattctgtctgaagttgagatatgcacagaacctattgattttaccgtgtatttagaatatagtaatatattctaaatctaaagtatcccagagcaacaacattgtgctctttattgtaagccctatcatataattatttttaagaaggtccttaaactatttattctttgactcagtaatttcattattagaaatttttcctaaggaagtaattcaaagtgtggaaaagctatctctgtgaaaatgttgattacattgttctttacagtttaaaaagagagaagcctgaaattttaaaagtagaggaatggttcaaaatgaaatattatgtagccattaaaagtagtttaaatgagaccagaagcagtcgctcatgcctgtaatcccagcactttgggaggctgaggcgagtggatcacttgaggtcaggagtttga

SEQ ID NO: 2550 - DNA, 6000 bp, Homo sapiens
caaaataaccagctccttttaacatttaaggtactcttctgcagttattctttttccccctcataaatatcatgtttaattaggaaactattactagttatttgttgatatgtccgtttaaacatttatgagcttaatgcataattagtgctttgactttttcctaaagcaaggaatacaatttatgagcatggaaaaagagaagtacttgtgcttcaaggtattttgcatatgttatcaacctttctatgagaatataaacttaggaagttatacctacttatctccctctgatccctagataatttatgggtagctagatatttaagcttagcatttcttttctaggtgtggttgacctgcctgaggaaaatcgggaagcagcttataatgccattactttacctgaagaatttcatgactttgatcagccactgcctgacttagagtatgtgtcttcttttaaaaaaaattgttgacttggtctgcaataagcagtagtattagcttccaaatgtatagttttccttggaatgttttacattaacagctaaaatgcatatatatatttatataggatagtatataaatatggaacataaaacctagaaagttgttcttctgtaagaaaatcatgtggatgtcagctttaacacagctaagatgtgagagttttgacaagcttaggccaaagcttacgtaaactgaaacagatacgcttgttatataatgatagcagggaatgtaaactgttgcttcatgatatttttcagagttatatattaaagtcagctactggattggccaggctatactcagagccataattctgttctggtttgtttttatttttgttttaaatgaacatacgagataactttttatgaagagcaacaaagggtcattgtcatgacacacatttgagaggagagagttacacagagatggctgttatagcagagtactgtagttatgtttcccttttctcaagcccttacgatccagctatcatgccatgatgttggaacgtgactgtagctttccaagtgacttattagcataactgacaaccaagaaactctacaccattacagatttctctgctttttgaaatgatctgtggcttctaattagagtaagttatgacctattttgttactgcatgtgtgttgattagttctaggctctatctagctattttacttttttctctctttttgacattttatttgaaaattttttattatggaaatttttaaacatagctaataactagagaaattaggattatgaaccttatatgtcagttattcagctttttaagttacaagtatattgccagtcttattacatctgtttccccagcttacctcacaacccccaccagattattttaaatcaagtaacaataatcttatttcatctgtaatagttcgatatttgtctcttagaggtaaagaatttttaaagcctccatgacccatcacacctttaaaaaaattatcagttattccttaatatagacataccttggagatactgtgggtttggttccaccacagtaaagcaagttacacaaatttttgggtttcacagtgcctataaaagttatgttcacactgtactgtagtctattaagtgtgcagtaatagcattatgtttaaaaaagcagtgagcttatcttaaaaatactgcaaaaaaatgctagtgatcatctgagccttcagcaagttgcagtttttttgctggtggaggatttgcctccatgttgatggctgctgactgatacaggtggtggttgctgaagtttgaggtaactgcggcaatttcttaaaataagacaacagtgaagtttgctgcatcaattgactctttcatgggagatttctttgtagcgtacaatgctacccgatagcgttttacccgcagtagaacttctttcaaaattagagctaatcgtctgaaaccctaccactgctttatcaaccaagtttatggaatattctaaaccctttgtagttgtttcagcaatattcacagtatcttcactaggagtagattccatctcaagaaaccactttctttgctcatccataagaagtaactcctcatttgttaaagttttattccaagattgcatcaatttagttacaccttcaggctccacttctaattctagttctcttgctttttccaccatatctgcagttactgcctccactgaagtcttgaacccctcaaagtcatgcatcagggttaatgttaatttcttccaaactttctgtctataccactgaaactttctccatatgaacaataaggtagttttgttttcttattcatgttcactagagtagcatttttcatttccttcaagaacttttcctttgcattcaaaacttggctgtttggtgcaagaggcctagcttttagcctaaatcagcttaggcatgccttcttcaccaagcttattcatttctagcttttgatttaaagtgagatacatgtgactcttcattttacttgaacaaatagtagccattgtagggttattaattggccttatttcaatgtagttgtgtctcaaggaacagggaggcccaagaagagggagaaacattgcgggggtgggggagggcaggagcagtcagaacacacagaacatttcttgattaagtttgcccatattatttgggcatcctttgtggcactccaaaataattaaaatactagcatcaaagatcactgggccaggtatagtggttcacacctatgatcccagtgctttgggaggcttaggtgggagaatcacttgaggccaggggtttgagactagcctgggcaatatagtaagatcccgcccccccatgtctactaaaaaataaggaaaaaaattttaaagatcactaatcaagatcaccataacaaatataataatgaaaaatttttaaatagcatgagaattaccaaaatgtgacacagaggcatgaagtaagcttgtgctgttggaaaatggcaccaacagacttgcttaaggcactgttaccacaaacctttggtttgttaaaaactcagcatctgcgaaactcagtaaaacaaagtgcagtaaaacaaggtatgcctatatgatagccagtcagcattcaaatgtccccagttgacatgtcggcttttttttttttttttttctcccagttcgagttgaggctaaacaaagtctacaaactgcatctggttgatatagcttatgggtctcctgagaatctattacagctttgccgcctcctattttttttttccttgccatctattttttgtacagacttggtcagttgttttgaggtattaatgttctggatatggctgatagtgtttagattggtgtttagcattacatactttttattttttatttagtatttttaaactatatgagagattattctttattagagaaagaaactgagtctcagggaagtcagggaactttagagtttacaccgcctgtaagttgcagggtcctaatgaaaacccatgcctatctagcccatgatttctaattttttcctctgtacttgatttagtgacttctgcatattacattgtatttgctgattattgatgcttttcaaatttaaatacaagttaatttccaaatcacttacattcttggattgtactggaatgtgtgaaagtattaaatattaaggcttctaaaacttggtgggttatacatatatatttttttaatttttcttatagagagaattgggatttgtttttcttatacatagacttgaaactaaaatgtatttgaccttcttttaaagtgacatcgatgtggcccagcagttcagcttgaatcagagtagagtggaagagataaccatgagagaagaagttgggaacatcagtattttacaagaaaatgattttggtaaaagagaaacaaattattagccattaattataatgttatattgtgttgctaatagcaatttcaaaagaaaaccagactatagacagaaagacttaaaatttcatgtaatgcattttcatcaagaaaagaatttggctttctaccagtagattaagcattattttcatacttggagctaattgtttacctacttctctccctatatgcaatcatagaacctatatattgatttctgcgaggagtcccaacattgaagtggtgatcacgtttaaaccaaccattttggaacagttagtttccctgttatacttgctattcaaaaacaggtattcaaaactagttagcaaggcatattgttttttaagaggcggggtctctgctgtgttatccatgctggagtgccgtggctcttcacaggctggattatagcacactacagcctcgaactcttggattcaagtgatcctcccacttcagcctcaagtagctgggactacaggcacatgccactgtgcccagaaccagattcttttcttgatgaaacacattataacgggaaagtttcagctgtgactgttaatgtaacttaacatacatacatatttagagtttatcaaacatattttaggatcatttaaatctagatctaagtttgaatttgctagtcatgccccagtgttgtaactgtgtgtaattgagtcattttaaaaaattcagatgctaaagaattaaagtttaaactagatattttaacatttgaagtaagacttcagtaagcaaatgtgacataattagaataaatcattagcagttttcttttatcacagtgctatttctaatctttctaaactaatgacaaattaaaatttgtttaggtgattttggaatggatgatcgtgagataatgagagaaggcagtgcttttgaggatgacgacatgttagtaagcactactacttctaacctcctattagagtctgaacagagcaccagcaatctgaatgagaaaattaaccatttagaatatgaagatcaatataaggatgataattttggagaaggaaatgatggtggaatattaggtatgtgggaatgatggttattccagcataaacagaatttctttattaagttgtaaagttttggaaacagttgctaattctgagtcttgaacagcttttagatatatatgagtgaattgtgatcagttggttcaataggacatttcggtaaaactagcctcttaaaatgttgtaacaaaacctaaatatgcttatctcagaatgctaaattttattagtacttaaaactgttctgtttgtgtttgatagctgtgttaagtaaaatattttttaaaatagataaataaactagaaaatacaaatgaagaatgagaatttttttttatataccaagtgttttatacttttataaactacctggaggagaaacagataaaagttgagtatacgtttaaattttatcccttttaacataattttgtttttccattgattggctgttgtggtttggcatttctttttcaaattataactaacttacattccctatttcagatgacaaacttattagtaataatgatggcggtatctttgatgatccccctgccctctctgaggcaggggtgatgttgccagagcagcctgcacatgacgatatggatgaggatgataatgtatcaagtaagcatttcatgttcagtgattctggggatgattgtatggcatccagaaagatacttaccatagaagatgacaaactaaaagttgtagtttttagtgaattataaatatctttaagtacagtgcttatgattactggttctgattctatgtttaatcttgcacccctccccatttttttggccaattgggttcaagtctggcggggctttcccattaactagaaaaatattttttcttagtaataacaggatttctttccatttcatgaagagatttttctcctccccatttgtgggatatatgttatataccaaagctttttgtgactttttttttttttttttttttttacag

SEQ ID NO: 2551 - DNA, 6000 bp, Homo sapiens
tactcaagcattttatagttttcatattaaagagagaagaaaaattttaaatttcttatgtcttgataagtatttaaattgtcagatgatgtttacattaacttttttttcccctcttaggttttcttctgttttcatagccagccagaacaatgttctacgcacattttgttctcagtaaaagagggcctctggccaaaatttggctagcggcccattgggataagaagctaaccaaagcccatgtgttcgagtgtaatttagagagcagcgtggagagtatcatctcaccaaaggtatgtttgatgttgacatttttattcactttgttgattgtttattgatatgtgaaatagaacttctaaaacagtttttttaggtaggggcattggagtgcaaggaaaatccttagaaatgtttctttattatgtgaagtccttatcacctctagatagacttgatatgattacagattagattttaaaaaaaatctctaagtgcatatattttgatttgcctatttttaatggcaaataagcatcagtcagggcaatgcccaaatattgtttactgatctgttcctcagaggagcttttatttgagaccctgtctcaaaaaaaaaaaaaaccgacgtggaagtgctgtaaatgcgtattacttagtataataagccaatctaaaaaggctacatattatatgattgcagctataggacactctggaaaagccaaaactatacaaatgagacagtaaaaagatggtaggttggggagagaatggagggttgagtaggcagagcacagactattctttttagagcagtaaaactgttttgcatgatagtataatagttaaatgccatttacatttgtacaaactaataaaatgtataacaccacgtgtgaaccctgatgtaaactacggacttttggtaatgatgtgttaatataagtttatcgattttaataaatgaaacaccgatgggaggtgtcaattgtggggaagattatctgtgtgtgaggaagggggtgtttataagaaatctgtgccttttcgtaagttttgctctatttcctggatgcagccttctaacaatcattgtgttagtttttatgtatatacacaaagaaaacttgtgtacatgtacacaggaaagcctagaaggcataccaaaagattattacagatttctgtagatggtaggattacaggttgttttattttctttttaaagactagccatttagtaaacatttcttgttaaatgtttgttcacgcccttaagtgtttcttaagatttatttttaggattataattgataggccaagtgatggacatgtttttgagatttgtgatatgcactaacagtttgttctggtgagatcataccagtttgcactgctggtcaaattgtatgagaacattggtattttcaattttttttataggtatgcttactgggataagttaatggaaaacgtagaaatcgtactcctttctggaaagtatatgtgtggctaatctttaacatccgtaagcaaatattgagtggcttaaaaggataacagatttttttcatgatatgtaccgagtactttgtgccactttagggacactacaaacgagtatgagacaatctgataattgaacatatacacgaacagccacaaaggaaagcagacagttcaggaataatgtaaaagattgtaatgtgtttatgagagaaagtgatttctcttcaaattttttaaaccatttctaactgagcttttatctatttggtaacaggatgtaaagatatttccacagagtgaacgggcctgaaatttctaatgtttgctttggtgtgcagttcttgttgtgaaaatgtcagtttagttgtttagcataagtgtcacacgtggctcatttgcaactgcaagcttgcatactttttctcttctctcttccactcccccactggaagaaccactggccctatttgcagagctttcccagaatatgtagcctggaatctttattatatttatgtttacactttaacacacactagctcaaaaacatatgccatacctcattttacctactcctaggctaaactctgaaccagactaatccagaaagaaagcttttgcccaaacaccactttttgaaagttgctagttctagataagataatagcagaggttttttttccctcctttgttcttaggtgaaggttcaatcaatattaattttaaattttataacaccacataaaaatagattctgtttttccattaggagcaacattttactttgaatttttttaaaattagggattcattgtctgataaattctgaatttgatcacaaatttggtataattttggatgtctaaaaatgtatggccatatacatcatcatttatgctgtaagtcacataaaatgctcataaatacagaacctgagagtcataagtagggtcctagagtgctgtagaaaatacacataaaatttaaaatacaacattttcttttacaaataacaatatactaatcataatttaaacattaagcaaatgtttaaaagctttttttgttaccttagaacttgttgtgctttatggcgtggtttgggaaagtatctggggatgtttgagttcatattgccttgttctttcagtaaattttccttatggctagaggaattttgaatacttgtgtttagatggagtcttatctcattgttttatcaactactgcttttccacatactgtatcccatgttaatgttgatcaagatctgcctcgaaaaaaggttgggagtatattttctggtgaaaaaaagctatggatactattgttctttatcaattagtatgctttccaaacttttttttttaaatcggtatgctttccaattaatggaaacttagttaaaaagtagcttaaacaataagggaaataacaggcttaattaactaaaattttggaaacagggagatctgagattggtccagcagcttgattatgtcatccaagaactctccatccttagtgtgttagcttcctgtcctcatactttagcattgtggtttacagggtgactgcatgaagcaccaagcaagccctacctattcacaaagcaggaaagagggaaggaagagaggcgttgttcttttgggggggaaatctttctcagaaactctctggcatacttcacctattactcaattggctgaactgtgtttcatgcccactgaagaacaggtattagcagagaggaatgagacatctgtcaatgtgggggacatttgcttctcaaacaaaatcagaattgacttagcaagaaacaatggccctggattggcaaccaaaagtgttacgtgctccttaatgtgctaatgacacaattcatggaatggtttagtgcttgcttcctagcttccttcatgtttgtgttaattcgtgaatttccagtcactctgtcttttcaggatattcgatattcagggaatttataggtaaggacagagaaatgtatgtgattataaggcaactttaaaggaaaaagataaaaagaagactatgaatggcacgaaatgcaggttttggaatatgattaatgttttattcataggtgaaaatggcattacggacatcaggacatctcttactgggagtagttcgaatctatcacaggaaagccaaataccttcttgcagactgtaatgaagcattcattaagataaagatggcttttcggccaggtattgttaaacttgtttggtttttgttgttgttgtttactttggagtttctcatgttttttgtgttactgtagctaaacacattttctaaatctacatgctttgttttaattgaaatacgaggaacccttcaaagatagagcaaggcttggggaggcagtgcttcaagggaggaaacctacttgcgtctgttctccctgtgaagtaatggagctcacccccatttgttcttcctttggagctgcctttttaatacttttttcagcagcttacatagacttgagtcatcaagaggttaaaatgttggaaactaattgttatgtgatgattttttaaaatatagctcagaaaagacaattttaggattttaaactttttttcctaagtaaatattcttcgtagttttttgttattttgttttaggtaatgattggttataaaactggagtctgccaaccacaccaccatctaagaagataattaatatttaaattcacatatctttctataatttttaaaagcattgatgaaatttttattctaattaaaataatgtgtattttattaagaaatgccttaaacagtttctactgaggatacattctagtacttcagtttatgtcagtatgtgaacagtaaaatgtctgagatctaagattttatttaaaagtaaaatatttagaaaaagactacaatacttaaattaacatgtgaccaataagcacattttatctaaataacatgcttttttttgtctttcaaagtaaggcatatttattatagacaacttgaaaaatataggaaaaagataaagaaaattaaaattgtgtaattctttctccaaaataaccagctccttttaacatttaaggtactcttctgcagttattctttttccccctcataaatatcatgtttaattaggaaactattactagttatttgttgatatgtccgtttaaacatttatgagcttaatgcataattagtgctttgactttttcctaaagcaaggaatacaatttatgagcatggaaaaagagaagtacttgtgcttcaaggtattttgcatatgttatcaacctttctatgagaatataaacttaggaagttatacctacttatctccctctgatccctagataatttatgggtagctagatatttaagcttagcatttcttttctaggtgtggttgacctgcctgaggaaaatcgggaagcagcttataatgccattactttacctgaagaatttcatgactttgatcagccactgcctgacttagagtatgtgtcttcttttaaaaaaaattgttgacttggtctgcaataagcagtagtattagcttccaaatgtatagttttccttggaatgttttacattaacagctaaaatgcatatatatatttatataggatagtatataaatatggaacataaaacctagaaagttgttcttctgtaagaaaatcatgtggatgtcagctttaacacagctaagatgtgagagttttgacaagcttaggccaaagcttacgtaaactgaaacagatacgcttgttatataatgatagcagggaatgtaaactgttgcttcatgatatttttcagagttatatattaaagtcagctactggattggccaggctatactcagagccataattctgttctggtttgtttttatttttgttttaaatgaacatacgagataactttttatgaagagcaacaaagggtcattgtcatgacacacatttgagaggagagagttacacagagatggctgttatagcagagtactgtagttatgtttcccttttctcaagcccttacgatccagctatcatgccatgatgttggaacgtgactgtagctttccaagtgacttattagcataactgacaaccaagaaactctacaccattacagatttctctgctttttgaaatgatctgtggcttctaattagagtaagttatgacctattttgttactgcatgtgtgttgattagttctaggctctatctagctattttacttttttctctctttttgacattttatttgaaaattttttattatggaaatttttaaacatagctaataactagagaaattaggattatgaaccttatatgtcagttattcagctttttaagttacaagtatattgccagtcttattacatctgtttccccagcttacctcacaacccccaccagattattttaaatcaagtaac

SEQ ID NO: 2552 - DNA, 6000 bp, Homo sapiens
aaaaacacagaaactgctacgtgtggtggcatgtgcccgtaatcccagctactcaggtggctgaggcaggaggattgcttgaacccaggctgtggaggttgcagcgagctgagatcgcgacactgcattctagcctgggtgacacagcaagactctgtataaaaagaaaaaaaaaagtgagccaaagaagagaaatttcacagaagaggtttactgatgacaaataagaacatgagatgttcaattatcctaggcatttgagaaatacaaattaaggccaaaaacattatcaccacacacttaatataagagctaaattaaaaaatagtggcaacatcaaatgctgaaagacacagagaagctggatctcttacactgcaggtgggactaaaatctcttgaattagcttttctctaaaagatacagagtaattatttttcattttttcacagtctgtaaatcttaaagaattttgcttactgtactttcaattaaaaatgtgccaattctttcccatgatgtagagaaaatatattttagttacgcgtatcacaagcaacagatttcttacatgtcaaaaatattttggagggtggggggctgtggtgcaagactactgcagtcaggtttgctttatctccatttccatcacttaagagtaaagagtcttgaaattctcattctctgaatctaatgttcccaaaggattattaattcatactaaaaaaacttttcctcaaaagaaaaaaaaccaggctttgtcaactgtctaatgttgtaaactcttcctcccaaatttggagttaaggaaggaagaaattggctagcggtggtggctcacgcctgccatcccagccctttgggaggccaaggtaagaggaatgcttgagggcaggagttccagaccaccctggtcaatatagcaagaccccgtgtttattttttaaaaaaaagaaattaaagaatgaagaaatactatattctatactaagaactcagacaaaatattcttaaggtacgagcattaaataacacctcaaaggtgctttatttgccatttgttattttatagattaaaacatgcttcccataccggaagagagcctcctatgtttcaaatcagtgcctacttcaagccttaaaatgttatcacaaaacttaagctgctcctactatgttataaataaaatctagagaactttacagaaatccaacatagcagcatgttctgagaaatataatcgctgttgtacaggacaagccccaagttccactatggaagcaagcaactgtatcctaaacaaaaaactccttaatattaagcttctagaatactatctgtggcatgacaattactaaatatgtgcttaatgaataagtaagtaagatccaccaagtgatctcataattggcatatgtaaaaaattttagacgttttaaaaattaaaactactggcatttttcaacaggtgtcagtagctcctggccagcacttcagctgctggtcagagcaccgtgcctaaaatatcccagctatgcagaggcagagattcctaaacagaagcctgtttggcataggatggggctaaggaaggcagagtgatgctaaaattaatgtgggaaacaattagcaagaggaaatcactctaataactaaaggaagccaaaggagcagtggtggatcgactcctggtgtatatctgaataaggagaaagtgtaattataattgccttttaagcctatttttttttccttgataataccaaacttcatccaatctttaaaaaagtcgattaatctgtttagattttgaagattctatattctgctaaatcctttatgaaaaccctgtgcagaaaatctgcatttgataccagagcacaacttagcatttcatgatttgagaatcatttttttctaaagcggcaagcagtttttttcaattgaccctaaaaaattaaagtctgatgtgaaacagcagaaagattgctattttagaacatattcaagaatacaaaaaatggcaatttaagactgtttcaaagaatcaaactgaggctcatgcttctaggatagtatcagtcattaccaatatttcactcattagaaagcatggcaggactgcggttgtgtaaattggtactgtcctctctgaaggacaatatgacaacattttataaaaatttcacttacactttctagccagaacttgcactttcagtaatcaatacaaaagatatacttggagatgcatattactaaagacaaaaccaaaaaaccaaacacgaaaaaatcctaagaaaacttactaagcactacgtgttttatgtatccaacctcttcatgactgtcctacagaagtaaattactggcccattttagagatggagaaaacagatgaagataagtaaatgtcactagtatttaatggaagtggaacttgaacttcagaatccacacttctaactacaacactatgctgccttgccagagcagaacagaacattcgaaataacctacttggccatcaataagtgatatgaaaaattaataaacccaaacaacggaatatagtcggtcctccttatccatggcttcttgcatccatggactaaaccaacccaggatcaaaaattgttggagggggggacaaaaaaacacaataataaaaaatactactaataaaaaactataacaactatattaactattaacatagcatttacattgtaatatcataaatggagatgatttgaagtatatgggatgttagtaggttatatgcaaatactacactatttcatataagcgacttgagcattcgtggttttggttctggaaccaattcccctttaatatcaagggacaattgtacagtacaactttaaacaagaatacaacatttgtactaacatggaaaatctccaggttaagtgcaaaaaagttggagttttaaaaaagaatgctctttctctatatatttacgagttcttgaataagcttaaaatacctgtggcgtacacatgaaactggtgatactggttacctctggaaagtaggtatgcagggcaagtgaggcctacctttttgtactgtttgatatatatatatacatacacacacacacacacacacacacacatattttaactcgggacataaatgtacaccacctattcaaagtaaaaactactatctcagaagtaaagacataatcctgctattgtcattaactagcagttaagctgcctaacctttatgcagttcagtttccctactatgaaaacctgaaaggttgaaatctggtggtttacctaacctttgaaaacgtcaatacctaactcagatcagaacggagctacctcttcaggggagtagggggaaggatctctgaagatatttctaaccctgcacactagaaatctcctctgttttggttctaacatcctttgaccaagagttttacaatcagacagtcgtaggttcaaattaagctccctctttgctcagttgttttgtaacggtgaataagttacttctcaactataaactgggataatattcatcaaaaaagattatgaaaattaaatacaagggcacacctaacatagtgccactgctgatgcgaaaagtaactctgaagacaatcttgcagcaaaacattaaccagccagtataatcatgcctaacaactctggtttgacatttaaactaaaaacacaaccttatttctcaagaattagaaaatttccattctgtaccaaactgtaaaagcgtttcttagaatttgtatgtttcacaaaataattcaccagaaattcttttgtaattctgacttgtgtataaaaaaaagcactatgtctattagttatgcactgctgtcacctcaactatacaaactgttaacttatttgaagatcagatatggcgtatgtcctcatcaatgcctttccaaaaataattagttgcctccgacattaacaaaggtatttaatgacttcacgatttgagaaaccttctcctgcctgtctccaaaattctatagactcgcactgcccgctggcatttacacccaatttaagaaaatagaaatttttgcctgaaaaccaattactcttctaaccagtataatgacaacaaagattaactttcccttgcaaaaagaagccgataaacacaagcctttcccagaaactcttcgcacaaacgctgttttttttttcacgctgaagacactaacaaatcagagtgaccaagtaaatcccccagggtttccctcttacaaatttgaagaaggccgctaagtctggcagcacaacccgacagtgtcaccccacactatcaaagcggatcattcgcaaaaagcctttttcagcgacgaaaagggcatcaagcatttatcagaaacacacacctcccccagagcgtctctacaacacccgatatccttaatcactttaaagaatgatcagaaaagttcaggggaaaaccaattatgcaaatatccttggaaaaagaagcaacttccctccgtctctttttccacgcgtctgtgaaatattcagcattcccaacgtaaaaattatctttttaaaacgggagggcagcagcagtcactggccgaggggcacccgccgaccccccgccccaccccgcccagccccaccagctccgcactttcttgagccccgcacccgagttcggcggaaggttgctgctcccggggctggcaccgcgggcgccgggcccgccaccgcctcctcccagacagccatttttacccgcggagtaggcggcccggtccccagagcgggctcgttcaaacctcctcccctccctccgcagcccagggtttccccggcctcctgggggacgtgagatggacctgcagggtaacagcctttgtagatctcagaatggatcagaatcatttgttaccgaacaagcgatgatgcgggcccaagctgcatgggtccgggccgagggcgggcccggggcgaagggggctgggcgggtggcgccgccgcttgggcgccgggagggtggcagcacgcgtgggcgcggcgagggctgccttctccctcgccctcccgcccccaggagtccggctccccgacggcagagcggcggggaaagggtggggggagggagctggaggaaaagaaggggtcggccgagtctcttaccttgctctccgctgggagttgggcgggctgggtggcccggggaggggaaaagggtcgggggagggggtggggaaaggggggagcccttgcgaggtgtagcttccgagcagctcccgccgccgccacagccggcgcctcctttccgattcactcaaacaaacaagatggctgccgttacgccgcggctcttcctgccgcccaaatcctcggttcaaatcggcaggatgtttacggtcaaaatggtacctgtgcgcctgcgcagccagcccaagcccccccctccccccagaaggagcggcgcaggcgcaatgactatttccttttctttggaacccgccctctgtttgtggagtccacaactgagcaagcgcaaaggtgattctcttgcgagggtctttgagagttgcggtgttagccaatagcgtaagatagcgcacgcgcagtgctttccagtgcggtgaatatttgcgtttagctttattcttgtgcttgttttaaagaaaaaagctgtcgtggtgcaattttgtgtgcccccaccaaaaaattcattttatggctctatagggatgaaagtaacataaaaacctcaaactaattccataaaatatagaggttcatttattcagtcaacctatattatagagggtcttctgtttgctacacgttgggctctggatataatgattaatataacagagataataactgccttttggaaattttcagtattgcttgggaggaatcttaaaatttcttatcttaaaagacttacttgtaccacgaagaaatttacttttgtttttattgtagaga

SEQ ID NO: 2553 - DNA, 6000 bp, Homo sapiens
tggtctcgctctcttgaccttgtgatccacccacctcggcctcccaaagtgctgggattctataattattttaatgttatagagaatcctgttttaaaagtttgccagttcagaggagcaagtctacaacagtatatgtaaatcttaaacaaatctgctactgtaagttttatcatctttttctataacagtatattttctctctttttttgccataacagtttttatctcacaaaaaaaactctcagttgtgtgtgtggggggggtgtcatcataaaataacgtgatatagacagaacgcagctgtttttatagatatactcaagacagtggcaacacccagtttctcagtgatttccccaaatcatacaagtcatcaactgactaatcagaaaaggaaagcataccatttgcaactgaagaaagacaaaatctgtaactgaaatctgtcctctcatggttttagtcaaacaaattcacaattactaattttgacaaatgcacattcatcagataagtatttccagggagaagagatactgcagctaactcctgcaataagaaatttaacttgacattttaatacaaggaggtggatgggtatgttgataagaggagactccaagccagaataaaacatacaacttgttcaaagaatcaaatccagccatttaggggattaggactgtatgtgaagaaactatattaaaatctacaaatgggaaggcgggctcagagttgggagctctgagtaagaataaatagttcaagagaaaagaaatgtagtactttgggaggtaacttggggtaggagaacagcatgtaagagaaagatggagagagacagagaagagagagagaagacagagagagagaggagagagaagacagagagagagagagaataattttcaaatataaacataaaacaggatatagtcagaatggggcagagtatcccggtgtttactgatgttcttataaattgaatatctgataaatatttcccataccttgcttgatatcttattattcagaaagcagataaaactagagtaatacctgccatttattaattactcagttccaagcactatactaagcactttgtgtatgtgatcctattgaattatttcaaacatcatgacaagtattaccctcattttattaataaagaaatcaaagctcagacattaattgtacatgttaaaacagctgggaggtagaagagaagaatttgaacccaaagcccatgttcataaccatcccccaaaagtagaaaaataaatgtcttaagaaaaaggtaagcctgttgatttaaatattagaatcagacttgctgctagaaatgaggaaaagagaattgtttttattcaaatacagatgaaaaatatatggttccatgaacaaaaactctaaaagctaatgtaatataagagagacaagaagtggcaatgcatattcacctggccatagtttgaagctgggattgatttaaactgaaatttaatatgaacgacaacgtcttcaccatgcaacatggttgtgtgattcttaacctgacaggagacttttcccacatgattagttttgaggtcatttagcagctgatacaccgaaattattttgaagtgaagaattaaattgttcactggcagaaatctaatttctgttgcaaggagtttaattgttaatgagcttgtattttttttttttttgagatgatgcaacaactgccactgttgagtttgcttaaagccacaccagcaggaaggatttaagtgctttgagcatctaatctatattggtcgagggaaagcatgcttaaaatgttaaaagtgcttgtactccttcactccccagcttgggattttaacaactatccttaatgccaatttcttaaagtctccattaaaaacaaaccaaaagaacataaaatatttggctaactacaacagaaattcacttgataaagctttgagctgtggccagtatggccacttagctaatggactccagccagtgagacgaaccttgccccaacccaaaaacagtggacccacagtgagtggagcacaagactgtccactttcttatccatctcctatatcagcataagaagggtaaaagtgaggtgttctgtgtgtcattaaaatcctggaagtgtccagaagtagtggttgctgacaatgaggagtatatggacttaaatgtctgcttttcctgtgtgttttactttaaaatgaaaatacattcagaaactggacacaaaatttctttttaaaatacgtttttattattatggattcataatagttgtacacaattataaggtacgtctgacatttcaatacaagcatacaatgtgtaacaaaccatggtaattggggtatccatcacctcaagtatttatcatttctttgtgttagaaacattccaattccactcttttagttattttgaaatatatagtaagttattaactatagtttccctattgtgctaccaaacactagactttattccttctttctaattgtatttttgtaccaaatctgagggggcagattttgtactcatctgccccctccccactacctttcccaggctctggtaaccatcattctaccttctatctcaatgagttcttttttttttttttaagctcccacatattagtgtgaacattcacactaatgtctttctgtgcctggtttatttcacttaatgtcttccagttctatccatgttgcagcaaatgaaaggactttttttcttttttatggctgaaaaatattatcttgtgtatgtgtaccacattttctttacccatctatccactgatggacacttacgttgataccatatcttgacaattgtgaatcttgctgcaataaatgtgagagggcagataccactctgatgtactgatttcctttttttttgggggggggtatttactcaggagtgggattgctggctcatatggtggctctatatttaggtttttaaggaatctctatactgttcttcacagtgctgtactaacatacattcctaccaacagtgtacgagtgtttctctttctccacatctttatcagcattcattattgcctgtattttggataaaagccatttcaactgggatgagattatacctcatcctagttttgatatgcatttctctgatgattagtgatgttaagcattttttcatatccctgttggccatttgtatgtcttttttgagaaataaccattcaggtcttttgctcaattttaattggattattttcctattatattgtttgagctccttatatattatggctattaattctgtgatagatgagtagtttgcaagtattttcccccacttgatgggttgtctcttcactttgttgtttgctttgcagaaggttcttagcttggcatgatcccatttgtccatttttgctttgcttgcctatgcttttaaggtcttactaagaaatatttggttctggagcatttccctaacgttttcttctagtagtttcaatagtttcaaatcttagattccagtcttcaagccattttgttttgatttttttaatatggcaaaagatagtgatctgtttcattcttctacatatagttatctagtttttccagaacaatttttggaagagaccatccttttcccaacgtatgttcttggcagctttgtcagaaattagttgactgtatatgtattgatttatttataggtcctctattctgttccgttagtctatgtgtctgtttttatgccagcaccatgctgttttgtttactatcactttgtagtataatttgaagtcaggtaatgtgatgcctccagctttattcttttgctcaggattgctttggctattcttggtcttattgtggttccatataaattttaggatttttttcctctttctgtgaagaatgtcattgatattttgatagggattacattgaatctgtagattgctctgggtagtatggaaattttaacaatattgattcttccaatccatgaacatggaatatatttccatttttgtgtgtcctcttcaatttctttcatcactggaaagatctctacaataaaaacaaaagtaaatttcttcgtggtacaagtaagtcttttaagataagaaattttaagattcctcccaagcaatactgaaaatttccaaaaggcagttattatctctgttatattaatcattatatccagagcccaacgtgtagcaaacagaagaccctctataatataggttgactgaataaatgaacctctatattttatggaattagtttgaggtttttatgttactttcatccctatagagccataaaatgaattttttggtgggggcacacaaaattgcaccacgacagcttttttctttaaaacaagcacaagaataaagctaaacgcaaatattcaccgcactggaaagcactgcgcgtgcgctatcttacgctattggctaacaccgcaactctcaaagaccctcgcaagagaatcacctttgcgcttgctcagttgtggactccacaaacagagggcgggttccaaagaaaaggaaatagtcattgcgcctgcgccgctccttctggggggaggggggggcttgggctggctgcgcaggcgcacaggtaccattttgaccgtaaacatcctgccgatttgaaccgaggatttgggcggcaggaagagccgcggcgtaacggcagccatcttgtttgtttgagtgaatcggaaaggaggcgccggctgtggcggcggcgggagctgctcggaagctacacctcgcaagggctcccccctttccccaccccctcccccgacccttttcccctccccgggccacccagcccgcccaactcccagcggagagcaaggtaagagactcggccgaccccttcttttcctccagctccctccccccaccctttccccgccgctctgccgtcggggagccggactcctgggggcgggagggcgagggagaaggcagccctcgccgcgcccacgcgtgctgccaccctcccggcgcccaagcggcggcgccacccgcccagcccccttcgccccgggcccgccctcggcccggacccatgcagcttgggcccgcatcatcgcttgttcggtaacaaatgattctgatccattctgagatctacaaaggctgttaccctgcaggtccatctcacgtcccccaggaggccggggaaaccctgggctgcggagggaggggaggaggtttgaacgagcccgctctggggaccgggccgcctactccgcgggtaaaaatggctgtctgggaggaggcggtggcgggcccggcgcccgcggtgccagccccgggagcagcaaccttccgccgaactcgggtgcggggctcaagaaagtgcggagctggtggggctgggcggggtggggcggggggtcggcgggtgcccctcggccagtgactgctgctgccctcccgttttaaaaagataatttttacgttgggaatgctgaatatttcacagacgcgtggaaaaagagacggagggaagttgcttctttttccaaggatatttgcataattggttttcccctgaacttttctgatcattctttaaagtgattaaggatatcgggtgttgtagagacgctctgggggaggtgtgtgtttctgataaatgcttgatgcccttttcgtcgctgaaaaaggctttttgcgaatgatccgctttgatagtgtggggtgacactgtcgggttgtgctgccagacttagcggccttcttcaaatttgtaagagggaaaccctgggggatttacttggtcactctgatttgttagtgtcttcagcgtgaaaaaaaaaacagcgtttgtgcgaagagtttctgggaaaggcttgtgtttatcggcttctttttgcaagggaaagttaatctttgttgtcattatactggttagaagagtaatt

SEQ ID NO: 2554 - DNA, 6000 bp, Homo sapiens
ccttgagggctttgaccagaggagttacatggtttgaaacacatcattgttaaaggatttacaatggaccagcttgccctctgtgaagataatcctggttagtaatatttccacttcaaaccacagactgagtcttgctttgaggactaccaaggggcctttaagaaagatttttcatcagatttattgggatatgattgacaaataaaaactgtatatacattgacgatgttcaacatgatttgatgtatgtatacattgtgaaatgattactattatcaagccaattaacccaactgtcatggcacatagttatctttgtgtgtatgtgtacgtgtgtgtgtggtgagagtacttaagatgtactgtcttagcaaattccaggtatacaatacagcattattaaccacagtcaccatgccgtatgttagatccccagaacttagtcgtcttataactgaatgtttatattctttgactaacatctcccgattgccccaaactcccagaccatggcaaccaccattatactctctgcttctgtgagtttgacttttttaggttccacatatgggtcagatccacacagaagtgcagtatttgtgtttctatatcttgcttctttcactgagcataaggttcatccctgttgtcgcaactggtaggatttcctgcttcttatggctgaataatattccattgcatatatgtaccacattgtctttattcattcatcaatcaacagacatttgggttgttgccacgtattggttatcgtgaataacactgtagtgaacacgggaatgcagatatctttttgacatgttgatttcatttcctttggatatatacccagaagtaagattgctagatgatatatggtaattacacttttaaatttttgagaatttccctatcattttctacaatggccatatgaatttacagtcccaccaacagtgtgcaagggttctgttttcttcatgttgccccattgttatcttttgtctttctgattacagccattctaataggtatgaggtagtatctcactgtggttttaatgtgtatttccctgataattaacgatgttgaacacatttttatatacccattggccatttgaatgtcttttttgaaaaatgtttatttaggtcctttgctttttttttttttttttgctattgagttgtgtgagttctttgtatattttggatattaaccccatatcagcatttggtttgcaaatatttcctttccttctgttggctgccttttcatttgttgattgtttcctttactgactgtgcagaagattgttagtttgatgtatttcacttgtttatttttgcttttgttgcctgtacttatgagctctttcttttcgagtttgtacaagtgctgtgatgaagctgaattttactaagtcattcattcatttgaatcagtgattgagcttcacttaagtgccaggtactgcccttggcatttgggataaaggagtgagtaggacaaacagtgctcctcctctcaggggcttccttactgtgaaaagttaacaagcaaacgaacagaggagatttcagctaataagggttaggaaaaaataaaacagaggagacaaaatgatgataccattgtaggggctacttttaagattacagttggagtttgaaaagtggaacttaggctaatggtgttacacatgtagagcaatttacagtttacaaattgaggccaggcacggcggctcacgcctataatcctagcactttgggaagctgaggcagacggatcacatgaggtcaggagttcgagaccagccatggccaacatggcaaaaccccatctctactaaaaatacaaaaattagccgggtatggtggcggttgcctgtaatcccagcaattcgggagactgaggcaggataatcacttgaacccgggaggtggaggttgtagtaagctgagaccacactgctgcacattccagcctgggtaatagagcaagactctgttaaaaagaaaagaaagaaaaaaaaaactgctggcaagaaagatattattatcctgacttttcaaacgagaaactggaggtccactgaaattaagccacatgcccaaggtactagtaaatggcagatctggggtctgaattcaagttttctctaattgtcagcaccaaagtttttctgacagtacacaacactttgggatgtacaagtagagatgggtaacactggggtctgggataaggaaattagccataattaggcaagaaaagcaggaagcacatgccaaaacataaacagaacacaaaagagcaaggagggtagctagctccccctaaggtcatgcaaaacaactggcaagatatagaggggccaggcgaggtggctcatgctgtaatcccagcactttgggaggccaaggtgggcagatcacttgaggtcaggagttcgagaccagccttgccaatacagcaaaaccccatctctaccaaaaataaacaaaaattagccagggctggtggtgcacacctgtaatcccagctactccggaggctgagggaggcaaatcacttgaatctgggaggcagagtttctagtgagccgagatcctgccactgcactccagcatatatatatatatatatatatatatatatatagagagagagagagagagagagagagagagagagagagagagagagagagagcacctccagtcccacagccccacttcacagggctgagataatctgcaccctgatcagaagagaaggcctcctgccttgaactgttgttcttagcaacttgggctggggggagctttgggtcacatgtggtttcaatcactgcctttatctgcatcattgtcactgtatttggaagatgactgaatccttattcctgtcccaggcctctctacattgtgcagggggttcaagtcaaatctggaaaagctgtctcatctttggcaggtcagaaatagggagaggcttcacgaatgtatagtaatgtcccacccatgccccttccctgctttattaaaacaaatctgaaacaacagaggtctgaaactttccactctatcatttcatactgccttgttataaccctgcccttcatccacaccccgctggggtttttgcagcctgagggaagccgggaagtgtctgctcctagctctcagtcactcccataataaacaatcactaaacagccggctgccctaggcaactgtctagcttgcccgagccctgagactttagctaggccagagggtgggaggtgttttctgtaaagcagtgttcaggatctgaggccagggagtttgactttgaccagagatactgtttgggagcctagcacatctttgtggacctggaggatctttagcgggactgctcctcggttacctgagttatctaatgaagttcttccactgggagtggcaggagcttgggccaaggagtgggaggtcagtgagggaaggaccaactatttggcactaattgtacataaggtagttttcctgatgcaagtgttccttctatagctgggacagttggcaattctaccagtcatatgtccttaagagatatctttaacaccaccaccaccaccaccaccaccaagagaataacatcactttgaggactggggcaagcttaaattaactggtttccctgcagccattagaaaatttattttttctctgtgattggatctcttggaagctttcttcataatagacagagggggctcaggcaaggcggcctaagtagataatgaggatttaggatagccgtcttacactcttagcacagaggcaggcatgaagaattgcaacaattcctcttgattgtaataattcctctttattgttgggcattggggtgtttctttggtttaaaaaaatgtgctatgtagaggaggagtaaggggagattgttttaatgcttagcagaaaattgaaatactgggtctcggagagtggaaggagggctgggagaggcagctttcggatcggcggtcgctttctatgaagtcttcctttcctccctgcttccctccttcaaagcatctttctctaggcgttccggcaggcagcccaggaggccagattctccagggcgcccggggccgcgcggcacggggcccctgccggtgcctccttccccggccgccgcgtttccgcaggcgcctctggtccccggcacggcgcaggccgagatccgggcctgggcgcgccgaggggccgcggggctcgcaccgggccgtcccgcgctccacctgcccggcagcccgccggcagcttgcaacccgggagccccggctccctgcgccccctacgcccccaacgccgcgccggcgcctcggcccgcggccgggggttatgaatgggcgcagcggaagcaccgccccccccggacgtgacgctcggccaatggcagcgcgggctgcgtggatggatgaggtcagcgctgtcgtgtcgggaatggaatgtgtaagtgtaacattcagaaccgggtaacattcggcgaccgaacgcggcggtcggcagcgttcgcgcgggggcctgcgaagcgctgctcggggccggcactgcccgcggggaggacgcgccgccgccgccacccagcgccgccgccgccgccgcctccagccgggccgccgcgcgtcccgggggccggccccgcgagcgcaggagtaaacaccgccggagtcttggagccgctgcagaagggaataaagagagatgcagggatttgtgaggttacggcgccccagctgcaagatgcactagccggctgaacccgggatcggctgacttgttggaaccggagtgctctgcacggagagtggtggatgagttgaagttgccttcccggggctcattttccacgctgccgagaggaatccgagaggcaaggcaatcacttcgtcttgccattgattgggtatcgggagctttttttttctcccctctctctttcttttcctccgtcttgttgcatgcaagaaaattacagtccgctgctcgcccgccctgggtgcgagatattcagccccgctctctcccgtgcattgtgcaacccaaagatgaaagaccgaaggggagaaagttaaagaaatcgcccacatgcgctggatcagtccacggcttggggaaaggcatccagagaaggtgggagcggagagtttgaagtctttacaggcgggaagatggcggactggagctgaaagtgttgattgggaaacttgggtgattcttgtgtttatttacaatcctcttgacccaggcaggacacatgcaggccaaaaaacgctatttcatcctgctctcagctggctcttgtctcgcccttttgttttatttcggaggcttgcagtttagggcatcgaggagccacagccggagagaagaacacagcggtaggaatggcttgcaccaccccagtccggatcatttctggccccgcttcccggacgctctgcgccccttcgttccttgggatcaattggaaaacgaggattccagcgtgcacatttccccccggcagaagcgagatgccaactccagcatctacaaaggcaagaagtgccgcatggagtcctgcttcgatttcaccctttgcaagaaaaacggcttcaaagtctacgtatacccacagcaaaaaggggagaaaatcgccgaaagttaccaaaacattctagcggccatcgagggctccaggttctacacctcggaccccagccaggcgtgcctctttgtcctgagtctggatactttagacagagaccagttgtcacctcagtatgtgcacaatttgagatccaaagtgcagagtctccacttgtggaacaatggtaggaatcatttaatttttaatttatattccggcacttggcctgactacaccgaggacgtggggtttgacatcggccaggcgatgctggccaaagccagcatcagtactgaaaacttccga

SEQ ID NO: 2555 - DNA, 6000 bp, Homo sapiens
ccggcatgttcccgtcatctcagatccctagctggaaggtttgtgtctctccccctcctcctctccccgtcattgcctctgtgctcacccctcttctgttccaaccccctcaccccgactatcccctcatccccttcctttcacactctgccttcttccccataatgcctctccctcaggaaactcccattgggggagaagcagaaagcagccggcagctctaagacagcaatttccacaggtagctggggctgagggtcttccttcaggggactttggtcaatccctgatggacggcagtgcagtgtgcaccgcaggcagcggcaattccaagtccaaaggcccagttttgcatcaagttgaaatctatgggttggtccctcccgggggccacctgagggtgtcagcatgatcagagcttctagggggtttaggggggactttccttctggccatgtttcccattttccctaatgagctccctgctgggctgtggtaacagaaccataacccaaagcaggtttggggtgatcatgttgaacttaacagtacacgcagactttagttttagtcttgagtgttcaaacatgtttgctttaatataaagacgaactttgaaaatgatcccctagcaagtccgatcaatgctcctccaggaggataatctgctctcttttgagaggaggaccctaatttgaaaagtaggccccttggctgccagcgttttaagcaggttttgactttagccctcacaggcggtgtgggcctctcaaggcttctcggaatctttctactgcccctgggcgccttcctttccttctgagggcttgagagggcagggagcctgccatgccctttgaggctggtttcctgggaatggagggagaagggctgatgttgctttagtgctcgctggtggccattcccctaacgggaagccatctgggttgttaaggagcgctggtcccttcagacaggagaagcacgatgtactgcccactggtgggtccccttagcttacaccggtcacctgttaggtggctgccgggtctcctgctgccacctggtgggtgagggtttttaatctttgggcagagacgaggaaaagggaggtacacagggggctcccaaagggtttccattccttgccctttagagcctggagagggcatgcagagggcctgtggcttgtcccagccggaggttccccttaaggggaccagctgccttctctggggagctgtctatggggtccccgcagccctccagtggaggcagaggccctggctcctgaccgcacttgttttgcataggactgggctaagcctgggccctatgaccagcctctggtgaacaccctgcagcgccgcaaagagaagcgagaaccggaccccaacgggggaggacccactaccgccagcggcccacctgcagcagctgaggaggctcagagaccacggagcatgactgtatcggctgccaccagggtgatgctcttgttctcagtagctggttggggccacctcagcctggctggggatcacattctggccagcaactggggggccaaggcagccttgcagctggagggacctgggctccattccctgacttcctgctctacagcaaagtccctgggaaaaaaaccttgtgtgggaatgagagaggcagaactttctagggtcagagtgggacccaagcaagtcaatagccccctggccccacagacatgtagtgctcacgggggcagaacaggagtgctgttgagccccccccctaaagcaacctgtgtatttctctcctccaacctgcagcctggtgaggagatggaggcttgtgaggagctggccctggccctgtctcggggcctgcagctggacacccagaggagcagccgggactcgcttcagtgctccagcggctacagcacccagacaaccaccccctgctgctctgaggacaccatcccttcccaaggtacgaggcagcctggggtgtgcacttaggctttctgagcagcaccaggtgaggagatagaaaactgctggtccattttaaccacaacccaccactcgctaactaacaggtgtcaggattgttttcgtcatctgggaatgctttggggagctcatctgtagttgtcaggtagctgccatataagaaagggatctggggtcgggcgcagtggctcacgcctgtaatcccagcactttgggaggccaaggcaggtggatcacgaggtcaggagatcgagactatcctggctaacatggtgaaaccccatctctactaaaaatacaaaaaaattagccgggcgtggtggcaggcgcctgtagtcccagctactcaggaggctgaggcaggagaatggcgtgaacccaggaggcagagcttgcagtgagctgagatcgcgccactgcactccagcccgggtgacagagcaagactctgtctcaaaaaaaaataataataaataaagggatctggactttcacagctttttgcgttttgcagcatcatatacagcagtctccaatttgaatggagacatgtgctgtaataagaatagcttcaggccagggcagtggcttacgcctgtaatctcaacattttgggactttgaggtgagcagattgcttgagctgcagaagttcgagaccagtctgggaaacatggcaaaactcttgtctctacagaaaatacaaaaattagccaggtgtagcagcacacacctgtggtcccagctactctggaggctgaggtgggaggactgcttgagcctgggaagtcgaggctgcagtgatccatgactgcatcactgcactccagcctgggcaacaaaatgagaccctgtctcaaaggaatagcttcatttttgttttagcactttgcactacacactttatggttattttctcatttaatctttacagccacttatggggtaggtattttcacccctattttacagaagtggaaattaaggctcaataactcgctcatattcacacaaccaataagtagaactggagtttgaacctaagtgtgttagagtgtaatgcccaagttcttaacctattccagccaaatcctctatcaaacctgcctccttcatcctcaagtccactgcacacacaagtcaggcaagatgaaaatctaacagctagaatatatctatgataattgaccaaaagctatgccattcatcattcaaaacctctaagacagtgagtcttattggagggtgattttattccccaggggacatctggcaatgtctgtagacatttctggttgtcacaactggaggggtactattggcatctagtgggcacagggcagggatattgcttaaacatcccagaatacacagcacggcccctccccaccacgtcctccataacaaagaactatccagcccaaattatcaatagtacggtggttcagaatcagggctgtgagctgtttaatctgtaagctcccacatcatcctgagattggtcttacaaggaagtgagcacatgacactgatggaaactgtctttgtcccttattgtcagggactcactgtcagtagctttgttctttgtctagcccttgcctctccagttaattatcagggagatgttatagcctaggctagtctatttgaggtttgatcttcacgttgagttctggactggagaatttgtcttctttcatcccccttattcctcccagagacgcttgcaggtagcttcgctgcagcctagcagctttaccttcttccccattgacgatatttgagtgcctaccgtgtccagcactgttctaggtacttgggacacatcagtgaacaaagcaaagatccctgccacggagttcttagttggtgaggctttctgaagatggtagagaagcctgggggaagcttgggatgagactgtgtgtgtaccctgccttgcgtgccttttgtcctcccagcccagaagaatcaaaaaagcacagctgctgtcttgaatatgtctaatcaaatcctataatcagtttcagattatgattatttctctgtaagtggtgaccaggaggcagatcagcaggagttcgacaagtcctccaccattccaagaaacagcgacatcagccagtcctaccgacggatgttccaagccaagcgtccagcctcaactgctggcctccccaccaccctgggacctgctatggtcactccaggggttgcaactatccgacggaccccttccaccaagccttctgtccgccggggaaccattggagctggtcccatccccatcaagacacccgtgatccctgtcaagaccccaaccgtcccagacctcccaggggtgttgccagcccctccagatgggccagaagagcggggggagcacagccctgagtcgccatctgtgggtgagggcccccaaggtgtcaccagcatgccctcctcaatgtggagcggccaagcttccgttaaccctccacttccaggcccgaagcccagtatccctgaggagcacagacaggcaattccagaaagtgaagctgaagaccaggaacgggaacccccaagtgccactgtctccccaggccagattccagagagtgaccctgcagacctgagcccaagggatactccacaaggagaagacatgctgaacgccatccgaaggggcgtgaaactgaagaagaccacgacaaacgatcgctcagcccctcgcttttcttaggttcacaagaaatgcgccggtggggaatgaactgtttcattaataaaacctaatttgtcttgatccattccactctataataaaacaaaagattttgtaggcaactcggaatatagctcttttgaaagtactcgacacctttagataagaattaaaaccaacctatgtaactgacataatcttgatcttttaatttgtaaatattgacaattttctttctgcacattttaatcttagtttcccttttgatttttctgaaggtgccaaattccatttaacttttttacaagtctttgtaaaattttaaatgcataaagggggttggggcaggggaaccacgaagtagttaattttagaaaaggatttactatacttcactcttctttttttttccccacaagcttttgtagatgcattgtagtagtctagcttagaagcaaatgcaagttattttaatgtacaaactaaatgggtaagaggtaaaatcttcatttaaatatactatgttctggatgaaaagagcaggagtaacaattgatgagcaatattcagagtgaagtaaatctggaaatggtagactgtgttgggattggggggagggccatgggaggggtacatcgtcaacatagccgatcctgttacatttaagagtagcctcgtaggttgaatttcttctggtagcttcatggtaaatgcatccgaataagccatactggattgcagtgtttgtttctgtagggtgtttaaggacttgacttcctttctcccatgattcctctggactgcacacagcacccacaaccagccccatgcatgctgctgcctctgggcagtcgtagaatctcccacttcagtttctcgttgattgtactcacctttatggaatccaaatacatccaaaagggtaaggcagttttaaaaatgtgaaaacatttaaaaatgataatagcagggaattcttagattatagtaaatgccttttacttaactgtgcccagcaggctgggtgcgttaaaaagcccaagtattttgaaaaaactcgaacagatttgacaagggtagccagcttggagtctagcaacttgccaatgtgtttaccaatctgggggcttgtttttcttttcttctttcaaataaatggcagttaactggctttacagtaaacattgaagagaggaggatttgtttattgtcactgggaatctgaccactatactgtcctttttttgtattctgggtaaatgttttttggaaaagatttgtcttttctaag

SEQ ID NO: 2556 - DNA, 6000 bp, Homo sapiens
tagcaccaggaaaaaaacaaaactcaagactgaagatgcctaagatattacagaagaaagccgaaagcaattctttgctcaagaattttgtctgggaagcccatcgaaggcaccccctccctcctcctcttggctgcttgatggtcctggaattgggtggttctgaagtattaggccatttaagggaatgatggttgaggccagtgagcaaacttggtcacgttgtatcaatgcttgattcatttacaaatatttgaacacctgccgccttccaggcaagtgtgctgactgaggagatacagtactgagcaaaagcattcatgggttctgcccccgtgggactgccccctgactaggggagactgacgtcaatcaaataactagagaaataaagatgaaattcaaaccgggggtagtgctgtgaataagtataagggatttcagagatcaagtaagagaagcctaatctggggagaaagttcacagcaggattccctgaaggatcgagaattaagcgagacctgtaggataaaaggtgttaggaatgtagcagagggacagcagagtgaagatgggaaggggcccaggccctggaggatgagagggagaggagagagggagagaatggcccacaaaggctgaggctatgaggtagacaggcaatgacctttcatgccttgcagggcaggccatgttaaggatattgttcttttcttgcgagcaatgggagctgttgaaaagcagtgagaatatttgcattttgaaagtaatccacagccgggtgtggtggctcatgcctgtaatcccagcactttgggaggccgaggcaggtggatcacttgaggtcaggggttcaagaccagcctggccaacatggtgaaatcctgtctctactaaaaatacaaaaattagctgggcatggtggtacatgcctgtaatcccagctacttgggtggctaaggcaagagaatctcttgaacctggcaggcggaggttgcagtgagctgagatcacgccactgcactccatccagcctgggcaacagagcgagactctgtctcaaaaaaaaaaaaaaaaagaaaagaaaagaaagaaagtagcccagggctgctctgggcgagctagtccaagtgcagtctggggtgagacattaggggctgttggcatctgttcaggtgagagatcgtgatggcccagtgagggtagaggtagcagaggtgagacgaggatggagtcaagtccgtgggagctggaatagccaggaccagcgctcaaggagtcagtggtgactctcctaacactgccgatgggagtgaagagaatgggcttttgtatatattaaatcagtaccaacacaactctctgaatttgtggacctcaaaagatcactctatcttaaaaccagtatatccaactgggacatgaaataatttctttcacagtttttttttataaatataattacatgttgtattagtgaatttaataaataaacattgtagttttagcttatcatctatcctgaatggaaatgtcttgactataattatagcaatctttacagagtatacttattttagaatgctacaatttgagagtcctttaattataatacacatttaaaataactttgctataatcataggataacttaaatttatattttccaaattagataacactgggttcagtggcctttttttctttcctatgtagatacagtttttaaagtcagcattattaattatggatagacatgtgccttataacttgtgaaaggaagtaaagatacatttttccaatttctgacaatcacaggctgttattttttaattttattttatctatttatttattttagatggagtcttgctctgtcgcccaggctggagtgcagtggcatgatctcagctcactgcaacctccccctcccaggttcaagcaattcttctgcctcagcctccccagtggctgggactacaggcgtgtgccaccacacccagctaatttttgtacttttagtagagacggggtttcaccatattggccaggctggtcttgaactcctgacctcatgatccgcccgccgcggcctcccaaagtgctgggattagaagcatgagccaccgttcccggcctcataggctgttatttttttaaattgctaccataatcaaagcccaccgagcaagtttggtcaaacacaatgtgtctcaatctggtgtctcccgacttctgttcaccatcctacacgagagttgagaacattctgaggtggtctgcagccctctgtgttttgttattagaacatcatagaatagatcgagagactagaagtagccctctagaccagccctgagtcatgtgacccaacaaggcccacaattggccatgctgtttggctgcttgcagaggaaaagcaagggtttacagctttccagagcttccctgctggtggactcgtatcatacacacattaagtatatctggattaattttgcactagccagcattttaaaatagaagagaaaactcacagttttcatagtgctggtggcacccagccttccctctgtaagccgttggccacaggtggtgggtctctgtgaacagagcacctgccctgaggcagattccaggagagaatgggagaatgtttttacaggtttcttgtctactaaaaacacatgaaaccagtggctcaggtggccagattaatgtatggtgatgattactcctacatccttgaggaagaaattgaaggcatggtaaagaattattctgaggggtggaggtagtgactacatggaagaatgggtgagtgggtcaccttgaaaatatgctgaaacacccaggcgctgtggctcatgtctgtaatcccagcactttgggaggctgaggtgggaggatcacttgaggccaggagttcaagaccgtctggccaataaagcaagacccaatctttataaaaaaaaattgaaaaactagctgggcatggtggtgcacgctggtagtcccagctgcttaagaggctgaggctgcaatgagctatgatcattccactgcactccagcctgagtgacagagcaagactctgtctccaaaaaggagaaaattatgcagagacttctcaagcagcaaatttcttatatatagtagttcccccttctcctcaggggatatgttccaagaccccccgtggatgcctaaaactgcagatagtacccgaaccttacatatactgtggtttttcccatgcatacatgtctatggtaaagtttaatacataatttaggcacagtaagagattaacaacaataataatagaacaattataacaatatactgtaataaaagtcatgcgaatgtagtctctttctctctttcaaaataccgtattttaccacaccatgggtagctgaaactttggaaagcaaaaccacagaggaggggccagtgtagtataatcgttgggtagcacccctccgtggacttagatacatactatctacacatttgtactcacttgactgatgagagttatatacacaaagctgtccatactgtatttactggccatctaaggcattttcaagggtgatctttgactataattttctcataatgtgctaacttagaacttattccctgtctgagaagtgacttttccttactaaaatctgactaccttttctattgggatgtgctttaagcctgattgcctcttgctccaaattaaactttctcctctgcttatgagtgaaaaatacagaatatgttcctacatccaaggcaattttccctgaccctttctttcttcagaccaaatggttcattgcatttaatgttctctacatcactaagagggatagatggaaactgcagggcccttcctgcgaggcggtggggcagagaataggttcagtgttaagggaattaggcagtgtggctcaaccctgcctctgtaccattctttctgtgaccttaggtgagtcccttgacttctctaggacttggtctccattgaaacatgagcagattggcccaattggataaccccttccagctctaacattttgtgttgaaactattaaacagacatttatcaagcacctgctgtatacacacatgacattgtactaggggctgtgctgggaaagaccaaaatcctgccctgaagaagtttaggaagtatctctctggtttgagtgataggtaaggcccctgcataggcagcccaaggtggaagctcatgagctggtgtcccctgctgtcaccctgctgtccccacctacagatcagatttgtagtagctgctcctttggacacagtgcctcttggtccatgtttatcttttagggcagcaggcttcttttgcaagaggccatggtctgggggccatactctgtgtcacactactctgccattgtagggagaactggtacaggcaatatggtaaataaatggatttggctgtgttctaataaaactttatttgcaaagatggtttgctgaccatgtgttagtcattcaaaagactaacaccctgtcttaaactccagaagtggttgcctgcacctaactggggtctgtggacctggccagataattcctaaacatgggccaggctccgcatagaccccactttcagtttttcatcatcagagacctgtctggaggtcttgttattactgggcttgttctacagcaagagcattcaagactctccactagagagtcaaaggaactgccaaggattcccatgggcccccagagccaggagagcggatgcttgccacctttgtctttaggagcagatccttctatccagacagaggctctttgattgagattgacccaacaaagccagcccgtgcccgtttttggaaacacccacaggctcttaccttgtttccacatctcttagcctcttcagaatgttctgcaaggaaagaatgctgtctggctctgtgttccagggttgtgttggcagaagagttggtgggggttgtgcagtgtgagaaggcaagtcatgaagagttgccccaggacattttccttgtcaggaataagccaggctaaatgtgccctttgggcattgaaaattggaaatggctggtcctagaaaaacagctgccttaaatccttttggggcatgaataaatactttttttacatcctggaaaattgtggttttgactccagcaaggaccccagggaggaggggcacttgttccagaagctggtatttcagcaagccgtgcttgggtctctgttttttgcagggagaggtgatatccagcctcagttggacagtgctctccaagatgtcaatgataagtatctcttattggaagaaacagaaaagcaggctgtccggaaggctttgattgaagaacgtggccgattctgtaccttcatctctatgctgcggccagtgattgtaagttaatggaaaactccagaaggtttaaactgctggtgtagaggtggcttccttctaattttatccatccactgttgagtcatggagaatctactgtcaggaatcatgatggtggtatctcctgtacagaccagcgattcagtgcaagttgatggccatgtagctcactcctcattcactgttctagtaccacttgttccccgttactttgtctcaccaagtcaagaaggcccagcagggtggttctcaaagtgaggtccccaggtcagcagcatcacgtgggaactggctagaaatgcaagttcttgggcccaacccagacccaccaagtccaaacctctgggggtggggacccagtcgtctgtgttttaaaggagcactccaggtggttttgagactcactgttgtagccgagtactaaggggtgaccatgagatgaatatccaagagcctcaatgaatcaatttagacttaatttttaaggaaatcatttgcatgccgtaattgagaacttgcactgcaggcgttctggaagctgattcgaaggtaccagc

SEQ ID NO: 2557 - DNA, 6000 bp, Homo sapiens
ggcagaggtttgctatggaatttttaaaaatgtatcatgcatgttttattccattatcacataaagacatacagatgcacgtgcatatgtgaatgggtgtgtgtggatggattttgttagtgtttgttttacagaagcaggatcacataacacatacttttctggatcttactatgaagacaataatttctgcagaaatccctccaggtcaatgaatattattctaattcattcttttttcttttaattttttattttgacataatttcagacttatagaaatgttgcaagaatagtacaaagatatctcatttccccttcattagatttcccaaatgttaccccattatggtatttgcttcaagcttgggttttgttttttttttgtttgttttgttttgttttttaattgagacaagttctcgttctgtcatccaggctggaatgcaatggtgtgaacacatctcactgcagacttgacatcctgcactcaagcgatcctctcacctcagcctcctgagtagctgggactgtaggcacatgccatcacagctgtctaattttttgtacagatgcggtcccactatgttgcccaggctggtcttgagctcctaggctcaggtgatcctcccacctcagcttcccaaagtgcttggattatacatgtgagccaccgtgcctagccaagcttaggtatgttttaaaagctcctcaggtgagtctaatgcacagccacgttgctctgtggggcctcccagttagccatgagacttaaggcagtgtttgtgaaacttctgaccttcgagaggggtctttgcattagaggcagttatctgaagtggttaagacagtgggctcgaagtcatgctgctatgtttgaattctagctcttttgcttcctccctcctgacccaccttctgtgcctcagtttcttcatctgtaaaataaggataatcgaagtgctaactcctaaggctttgtgaggattgagtgagattacttaagatagtacttggcacacagtaagtatacactaaaggttagttatttgtatatttatcattaccatagctcatctatgaaacaaaattggcttaagctcgccctggtcacctataaacagaattctttctgatcgagtcattaaattctttagacaaattcgggagttatcagcatataaaagttcccatttagaaacaggccccttttgaaaatgaaattagcgaggatcaattaaaaatatctgtcacattgactcaccctaagagatgttttgtatgtgttttgtggatggcaggctgaaaaatgccgaaatataaccctaatgtccagaatgtgtcactggggcaggaaaccaatgaaaggtgatgaactgattagtagcaaggctgaaggggggtggcggggagcgtaaagagcaagttctccccccacggaccagctgtcccccaggcctaggccaggtgggaatgtgagccctgaattgccacatgttcctatcttcctggaagtgctgaaactttgttccttgaggtgaagtttcccaacttctaaatatttttagatttcccaattttttatttttttttttttagattttccaattttaaaaactcctctgcaggccagtttgtagcttccaatcatgggagtcaaatagcggggttggaagatccgaaaggggaaagaagtcataatattttgtatttctccaggactatttgaggaagagaggctgtatctgatggttctaggtcgccaagacattgtgtctgctctctagtggggtaggaacctggttgggttccattcctgagacatttcttgagcacctgctttgtaccaaaccacgcctgtcctcccaggagcatccaatctcctttgctttgtttatgtgctcccaagctgcctgctgactactaatttgacttctgcagtgccttgatatggagaactgggctctcaggggaacagatatccctgctgcaagttataaaccaagactgtccaggacctgatctccctctcattaacagtatttctggggcttagctctttctgtaccatataagcatgatgagaaaaatatatattttataagtaagataagggtctggtcagagtagcaataaaagagcatgaaaaagatattagtttagaaaaccttaagtttacataccatatgaagcaattcagaaatatatctggttatttcgaatccatcagaggcatctgagtttacctaaaagtgtaaaatattatacattacacaaaacccaacatttcatcatgtaaacaacaaaaacgggacaccctattgtcgcagaggcagattctataacctgaaacccctcctgccatagccacgtagacacagttggtaaaatgtaatcagaatctctttaaatatatgcagagccagtctaaaagaagggaagtccccaacagccagaaacaaaggagaatctgaaaacaaggaaagaatgtatgacagctggccaggcacaatggctcacgcctgtaatcccagtactttgggaggccgaggcgggtagatcatctgaggtcaggagttcgagaccagcctgaccaacatggaggctgaggcaggagaatcgcttgaacctgagaggtggaggttgcagtgagccgagatcgcgctactgctctccagcctgggtgacagagtgaggccctgtctcaaaaaaaaaaaaaaaaaaaaaaaattgccaggtgtcactcccactttcctgcatctgggaacacttttccagcctccctttcaaggagttctcatgagagacaagggcctggtggtcaggcccagggaaaaaggccacaagagaggtatgctttggcaaacattgctaaagttggggtatttggggcattgaaatttaagcatgtggcaggaaagctagaccaagtgtccactgggctaaggccccttatcccaggagttcaggaggctgggtaaaagagagacctggggcatggaagtcagaaaaccagggttggattccttccaacagtgcaacaaggaccagaatgataatttccttcaagtagacataatacgtataaaatgcccagaatgcacacagtagaccctcagcaatgtgcctgggacagcacaccaatgttacagaagtgaaatggggccagggctggacctgagccttggcctcatccctgcttcttctgttgataagatttatcgaatgattacttacgagatgccaggtaccacttgaagtgctttcatcgatcagctcatgtaatgttcagaacagccctatcaggtagaagccatcattatccccatttacagatggatgaggaaactgaggcccagaaaggttaagtaacatacctaaaggcatacagttagtaggttgtgaactggagtttgaatccaggcaatctggctctacaagcagtcatcttgatagttagaataccaatagtattaaaatcacaataatgattggcagcaaacgatgtgtcaagcacccgttattggcaaggtgaagatgagtcggatgcattcgaacgcccttggggacaggatccagcaggggtgatcaagagatcagttacttcctgaaggtaacacccttccgggtgatttcggggagacggatggggaaggtgggttgcagttaagagttgggcagagtgatccaggggaacattatcttctgcagctgtgctgtgtaactccatgcatccctttgatccataaagttttcaaagccagaccttttcccattacggagtgaatctgacacaagtgtacagaattttgcacttggtttcttttggccccactccccccagtcttttcttttgttatgttttgtgcttcaaatggttagctcaagggttaaaggaactgtccggagttaggtgcctatgtcttaatatcttttaaaagttgctcatttgattctcctccctctggcccatttggcgttcatctgaatgagggctcctggttatgcagataggcagtggagctgtgaaaatggaccactaggccccaaatcaacctgggcacatttgcgctctgcaggttcaacctcccaggagggctccctgcggttataccaacgctggctgctctcagtgggcctgaaaaccatcaaccgtccaagtcataggcaatcagcaatctcgatagactgatggatcgtggacagaagctctaacgctgtttccattcatttagcaacagcaaatcaatccactttcccagcatcctgcaactttatcgaactcggcatcccattgcaggatacgcccccgaactctccttaattatatatttcgctatttgcaatcaggactcggcgatgcagtcctgacatcagagaatgggcgtcttctcagaaggccgcagtagcggcagcagctttcccgccctactgagcgctcactacaagcgggctctgggctaggcgcgccacccgtgcaagtccccggggagcggcggtgcaccctccgtcccgcgcgctcgcagccattgtaggggtgggcgctcgccaggcagggtgccgacacgccctctccgcgctgcgacgggcggccgggggaggagagggtgcgctgtgcgcaccggagggagaggctccggcccagcgccgcctgcccgccagcagaccagcaggctcctctttgcggcgggtgccccacgcgcctctcgggcgcgcgctcccagccccgcccgcgtgcggcggccgcacggccgcgagagcgcgcctccgcttggcgggcacggccgcgagcgcgcgtgcgcccctccgaacgtccccgggagcccagccagagcgagcgccggggccgggcgcgcaggagtgaaaaggaggcggcggccgcagctgcgagcaacagatccggacgccgcgagctgacccgctctgctgttgggcgatttttttttaattgcagaaaaatttattaaattggaaaatcttgcgtttttcaatggcgctggccccgggtcagcgggcgattttctctgcatcaagatgggctttgccgtttccgtagtgggcaccagtggtggcctgattgtcagtcttctcccggcatttttaaggccaggagccgagcgctgcttgtaggcgaataccctacagagcggtttggctttttaaattactgttattattttgggcagagaacagtcggtctggtgcaccccgtcctcgctgcagaagaggctgcgagtccgaggtgggtctctcggaaggtgaaattccttctggggtgagcgagccccggccccgcgcgcagtccagcggccccgcgtgtgtgccctcgccctgccggagccgggaaaatggaggctgtgattgagaaggaatgcagcgcgctcggaggcctcttccagaccatcatcagcgacatgaaggtaggacgccgggggtgcggctgcggcgccggccgccgcgctctgacctcgccgccgcgcttcgcctccaccccgggccgggcacccggcccttccctgcagtgtggccaccggccacctgcgggagctcccggccggagtgtcacctgctcacccggggcgctgctccgggctctgcggggtcactgggcgggtggcttctctggggggtgtctgctgtcccacgccatctcccccgctcattgtcccagggggcggcaccatttctttccctcgggggctcaaggcactggctgcaagttttcccattgtctgtccctgaagtaagtgtctgggacccgcgggggctggatgcccgggaggacacctgattcctccgggcacggggtgggggcgcctggcgcggtggtggggaggaagtgggggctctgcccgctcgcaggaaggagtcccctagcctaggagactgagagggaaagccagtccctccttggctgtcaggtctacttggagtggggtatctgagcaaattagttattaattgggccgttccgaagctggtaaaggtgtgcgtgccctc

SEQ ID NO: 2558 - DNA, 6000 bp, Homo sapiens
acgttccctggctagcttggtttttaatctaacagcccttctttcaaaatgatccttccactggagatagatatttatcattctcttccttcacctcatctcttgacaggccgcacgtgacttgaaggaatttttcaaatagcagctcagccaccctgaggggcttcagtctcacccctaagttcgctggctttttcttcaccacgtccagttgctttccatcttattaactgctcttttcactagaggaccaactcagtaggaaattttttgagaggtggagaaagagatgttcaaagaaggtgttggggtcgggggaaactggttttattttatacaagtcacacattctgaatcttcccttttgtgtctctggggagaaaggagaaagtttgatcaaatcgctcattatttctgcacttctttcttttttcctaagtataaaaatatatgactactactactgtgagactatgtgattgtgagaatgaatgattcttttttttttttttttttttttgaaacggagtctctcgctgtcacccaggctggagtgcagtagcacgatcttggctcactgcaacatctgcctcccgggttcaagcaattctcctgcctcagcctcctgagtagctgggactacaggtgcgctccaccacccccagctaatttttgtatttttagtggagacggggtttcaccatgttggtcaggctggtcttgaactcctgacctcatgatcctctcacctcggcctcacaaagtgctaggattacaggcgcatggccaagaatgaatgattatttgtgccttcctatgtgaaaaaaaaatgtttcctctagctacacactattctgttctgtgaggccgccccatcagactgttgacctagagtcccaaccccggccctccaggagacctgcctgttcttagaagcccaacccactcagcagcagctccaaataacagggggagccaacaaaaaagagtgctgctagagcaacaagcaaggggcaattagtcagaaggcaacttccatggtcttccaaaaaaaattgaggtgaaagaccaaagatgtccctaaaatgtcttcctaaaagataaacttcatcaactacctctgactggtcagtattaagaaccactttcaggccaggtgtcatggttcacgcctgtaactccatctactccagaggctgaggcaggacaattgcttcaggccggaggattgcttgaggccaggagctggagaccaagcctgagcaacacagtgagacctcatctctaccaaaaatgtacctctattaaaaaacaaaaaagaagaagaagaagaagaagaaggagaggaggctgggtatggtggctaatgcctttgtaatcccagaactttggaaggctgaggcaggagaatcacttaggctgaggcaggagaatcaccagagtctaggagtttgagaccagcctgggcaacatagtgagacccccatctctacaaaaaaaaaaattcaaaaattagccaagcgtggggtttgtgcctgtagacccaactactcaggaggctcaggtaggaggatcacctgagtccagggaggtcgaggctgcagtgagtcatgattattccactgccttccagcctagactacagggtgagaccctgtcttaaaaaaaaaattaaagaagaaaaaactctcttttcttttctttctttcttcttcttcttttctttttttttttttctttttttttttttagagatggcacgtcaccacattgcccaggctgttgtcgaactcctggcctcaaacgatgctcccacttgagcctcccaaagtgctgggactacaagcataagccaccacacacggccttttcctttctttttctatttctcaatggatttttccaatggacacgtatcactttggtagttatacatgatactagttgtaatctcagccatttttcaacccagcaaatgtctattctaggtcaaatatgtctcaaaaattactaaaagaaaatcagttatgtcctttaacctggctgaggtctggctttgttttctctcatgtaaaaatggagatggcacaaaacaactccaagctgttacttgaaagtaacacctcaggtgatgtcaccagcctgagggagagtgaggttaagttctgaacccacaggcattatatctgcctggggttcacatgccctacactggactggcataatttgagagtcagatccgaagatgtggtatatccgccatctttagcaactttcaaaaactaccctatgaggtcaagctggacctacttttggttttgccattgttgtttgtttgttgttgagggttttctttgaggggcggggagtgcatgcccctgtggagagcactcatttagcttcaattagagtaatgccaaaagtgccagattcctgggaaatcagcctacaaggctcctgcgggaaggaacctccactgccagaagtccttagggcatctaagtgatcagacaccgtcagggattctttgccccgtaaaaacctacttgaccagggacacgtgccaggtaaatttccttcacatttacttcaaccttattgcatactcattttagtattaaaacctttaataaaatgctcctattccttcacactttttttctatgagatctcaaataccccttcttgctattaaaaaaaatcacttattattcaccagcccaatattttaaaagtaaaaataataagccaaggccaggagcgatgactcgcacttgtattcccagcagtttcagaggcaaaggccgaaggatcgctttaaccgaggagtttgagaccagcctgggcaacatgaccagactgcctctctacaaaaagtttaaaaaattaaccgggtgtggtggtgcactgcactcccagctactgggctggggtatcaggctgaggtaggaggtttgctttgagcccggggggatcgaggctgcagtgagctttgattgtgccactgcactccagcctgggtgacagaaggagaccctgtctcaaaaataataagaataataattaataataataggccaaaccaaatacccatcaccttctgctgtgcctcccctttccccaataaatccagtgtcttgctttcaaattttgtggttaaaaaagatgatgagtttctaagacgtgggggctaaagcttgtttggccgttttagggtttgttggaatttttttttcgtctatgtacttgtgaattatttcacgtttgccattaccggttctccatagggtgatgttcattagcagtggtgataggttaattttcaccatctcttatgcggttgaatagtcacctctgaaccactttttcctccagtaactcctctttcttcggaccttctgcagccaacctgaaagaataacaaggaggtggctggaaacttgttttaaggaaccgcctgtccttcccccgctggaaaccttgcacctcggacgctcctgctcctgcccccacctgacccccgccctcgttgacatccaggcgcgatgatctctgctgccagtagagggcacacttactttactttcgcaaacctgaacgcgggtgctgcccagagagggggcggagggaaagacgctttgcagcaaaatccagcatagcgattggttgctccccgcgtttgcggcaaaggcctggaggcaggagtaatttgcaatccttaaagctgaattgtgcagtgcatcggatttggaagctactatattcacttaacacttgaacgctgagctgcaaactcaacgggtaataacccatcttgaacagcgtacatgctatacacgcacccctttcccccgaattgttttctcttttggaggtggtggagggagagaaaagtttacttaaaatgcctttgggtgagggaccaaggatgagaagaatgttttttgtttttcatgccgtggaataacacaaaataaaaaatcccgagggaatatacattatatattaaatatagatcatttcagggagcaaacaaatcatgtgtggggctgggcaactagctaagtcgaagcgtaaataaaatgtgaatacacgtttgcgggttacatacagtgcactttcactagtattcagaaaaaattgtgagtcagtgaactaggaaattaatgcctggaaggcagccaaattttaattagctcaagactcccccccccccaaaaaaaggcacggaagtaatactcctctcctcttctttgatcagaatcgatgcattttttgtgcatgaccgcatttccaataataaaaggggaaagaggacctggaaaggaattaaacgtccggtttgtccggggaggaaagagttaacggtttttttcacaagggtctctgctgactcccccggctcggtccacaagctctccacttgccccttttaggaagtccggtcccgcggttcgggtaccccctgcccctcccatattctcccgtctagcacctttgatttctcccaaacccggcagcccgagactgttgcaaaccggcgccacagggcgcaaaggggatttgtctcttctgaaacctggctgagaaattgggaactccgtgtgggaggcgtgggggtgggacggtggggtacagactggcagagagcaggcaacctccctctcgccctagcccagctctggaacaggcagacacatctcagggctaaacagacgcctcccgcacggggccccacggaagcctgagcaggcggggcaggaggggcggtatctgctgctttggcagcaaattgggggactcagtctgggtggaaggtatccaatccagatagctgtgcatacataatgcataatacatgactccccccaacaaatgcaatgggagtttattcataacgcgctctccaagtatacgtggcaatgcgttgctgggttattttaatcattctaggcatcgttttcctccttatgcctctatcattcctccctatctacactaacatcccacgctctgaacgcgcgcccattaatacccttctttcctccactctccctgggactcttgatcaaagcgcggccctttccccagccttagcgaggcgccctgcagcctggtacgcgcgtggcgtggcggtgggcgcgcagtgcgttctcggtgtggagggcagctgttccgcctgcgatgatttatactcacaggacaaggatgcggtttgtcaaacagtactgctacggaggagcagcagagaaagggagagggtttgagagggagcaaaagaaaatggtaggcgcgcgtagttaattcatgcggctctcttactctgtttacatcctagagctagagtgctcggctgcccggctgagtctcctccccaccttccccaccctccccaccctccccataagcgcccctcccgggttcccaaagcagagggcgtgggggaaaagaaaaaagatcctctctcgctaatctccgcccaccggccctttataatgcgagggtctggacggctgaggacccccgagctgtgctgctcgcggccgccaccgccgggccccggccgtccctggctcccctcctgcctcgagaagggcagggcttctcagaggcttggcgggaaaaagaacggagggagggatcgcgctgagtataaaagccggttttcggggctttatctaactcgctgtagtaattccagcgagaggcagagggagcgagcgggcggccggctagggtggaagagccgggcgagcagagctgcgctgcgggcgtcctgggaagggagatccggagcgaatagggggcttcgcctctggcccagccctcccgctgatcccccagccagcggtccgcaacccttgccgcatccacgaaactttgcccatagcagcgggcgggcactttgcactggaacttacaacacccgagcaaggacgcgactctcccgacgcggggaggctattctgcccatttggggacacttccccgccgctgcca

SEQ ID NO: 2559 - DNA, 6000 bp, Homo sapiens
ctagctacacactattctgttctgtgaggccgccccatcagactgttgacctagagtcccaaccccggccctccaggagacctgcctgttcttagaagcccaacccactcagcagcagctccaaataacagggggagccaacaaaaaagagtgctgctagagcaacaagcaaggggcaattagtcagaaggcaacttccatggtcttccaaaaaaaattgaggtgaaagaccaaagatgtccctaaaatgtcttcctaaaagataaacttcatcaactacctctgactggtcagtattaagaaccactttcaggccaggtgtcatggttcacgcctgtaactccatctactccagaggctgaggcaggacaattgcttcaggccggaggattgcttgaggccaggagctggagaccaagcctgagcaacacagtgagacctcatctctaccaaaaatgtacctctattaaaaaacaaaaaagaagaagaagaagaagaagaaggagaggaggctgggtatggtggctaatgcctttgtaatcccagaactttggaaggctgaggcaggagaatcacttaggctgaggcaggagaatcaccagagtctaggagtttgagaccagcctgggcaacatagtgagacccccatctctacaaaaaaaaaaattcaaaaattagccaagcgtggggtttgtgcctgtagacccaactactcaggaggctcaggtaggaggatcacctgagtccagggaggtcgaggctgcagtgagtcatgattattccactgccttccagcctagactacagggtgagaccctgtcttaaaaaaaaaattaaagaagaaaaaactctcttttcttttctttctttcttcttcttcttttctttttttttttttctttttttttttttagagatggcacgtcaccacattgcccaggctgttgtcgaactcctggcctcaaacgatgctcccacttgagcctcccaaagtgctgggactacaagcataagccaccacacacggccttttcctttctttttctatttctcaatggatttttccaatggacacgtatcactttggtagttatacatgatactagttgtaatctcagccatttttcaacccagcaaatgtctattctaggtcaaatatgtctcaaaaattactaaaagaaaatcagttatgtcctttaacctggctgaggtctggctttgttttctctcatgtaaaaatggagatggcacaaaacaactccaagctgttacttgaaagtaacacctcaggtgatgtcaccagcctgagggagagtgaggttaagttctgaacccacaggcattatatctgcctggggttcacatgccctacactggactggcataatttgagagtcagatccgaagatgtggtatatccgccatctttagcaactttcaaaaactaccctatgaggtcaagctggacctacttttggttttgccattgttgtttgtttgttgttgagggttttctttgaggggcggggagtgcatgcccctgtggagagcactcatttagcttcaattagagtaatgccaaaagtgccagattcctgggaaatcagcctacaaggctcctgcgggaaggaacctccactgccagaagtccttagggcatctaagtgatcagacaccgtcagggattctttgccccgtaaaaacctacttgaccagggacacgtgccaggtaaatttccttcacatttacttcaaccttattgcatactcattttagtattaaaacctttaataaaatgctcctattccttcacactttttttctatgagatctcaaataccccttcttgctattaaaaaaaatcacttattattcaccagcccaatattttaaaagtaaaaataataagccaaggccaggagcgatgactcgcacttgtattcccagcagtttcagaggcaaaggccgaaggatcgctttaaccgaggagtttgagaccagcctgggcaacatgaccagactgcctctctacaaaaagtttaaaaaattaaccgggtgtggtggtgcactgcactcccagctactgggctggggtatcaggctgaggtaggaggtttgctttgagcccggggggatcgaggctgcagtgagctttgattgtgccactgcactccagcctgggtgacagaaggagaccctgtctcaaaaataataagaataataattaataataataggccaaaccaaatacccatcaccttctgctgtgcctcccctttccccaataaatccagtgtcttgctttcaaattttgtggttaaaaaagatgatgagtttctaagacgtgggggctaaagcttgtttggccgttttagggtttgttggaatttttttttcgtctatgtacttgtgaattatttcacgtttgccattaccggttctccatagggtgatgttcattagcagtggtgataggttaattttcaccatctcttatgcggttgaatagtcacctctgaaccactttttcctccagtaactcctctttcttcggaccttctgcagccaacctgaaagaataacaaggaggtggctggaaacttgttttaaggaaccgcctgtccttcccccgctggaaaccttgcacctcggacgctcctgctcctgcccccacctgacccccgccctcgttgacatccaggcgcgatgatctctgctgccagtagagggcacacttactttactttcgcaaacctgaacgcgggtgctgcccagagagggggcggagggaaagacgctttgcagcaaaatccagcatagcgattggttgctccccgcgtttgcggcaaaggcctggaggcaggagtaatttgcaatccttaaagctgaattgtgcagtgcatcggatttggaagctactatattcacttaacacttgaacgctgagctgcaaactcaacgggtaataacccatcttgaacagcgtacatgctatacacgcacccctttcccccgaattgttttctcttttggaggtggtggagggagagaaaagtttacttaaaatgcctttgggtgagggaccaaggatgagaagaatgttttttgtttttcatgccgtggaataacacaaaataaaaaatcccgagggaatatacattatatattaaatatagatcatttcagggagcaaacaaatcatgtgtggggctgggcaactagctaagtcgaagcgtaaataaaatgtgaatacacgtttgcgggttacatacagtgcactttcactagtattcagaaaaaattgtgagtcagtgaactaggaaattaatgcctggaaggcagccaaattttaattagctcaagactcccccccccccaaaaaaaggcacggaagtaatactcctctcctcttctttgatcagaatcgatgcattttttgtgcatgaccgcatttccaataataaaaggggaaagaggacctggaaaggaattaaacgtccggtttgtccggggaggaaagagttaacggtttttttcacaagggtctctgctgactcccccggctcggtccacaagctctccacttgccccttttaggaagtccggtcccgcggttcgggtaccccctgcccctcccatattctcccgtctagcacctttgatttctcccaaacccggcagcccgagactgttgcaaaccggcgccacagggcgcaaaggggatttgtctcttctgaaacctggctgagaaattgggaactccgtgtgggaggcgtgggggtgggacggtggggtacagactggcagagagcaggcaacctccctctcgccctagcccagctctggaacaggcagacacatctcagggctaaacagacgcctcccgcacggggccccacggaagcctgagcaggcggggcaggaggggcggtatctgctgctttggcagcaaattgggggactcagtctgggtggaaggtatccaatccagatagctgtgcatacataatgcataatacatgactccccccaacaaatgcaatgggagtttattcataacgcgctctccaagtatacgtggcaatgcgttgctgggttattttaatcattctaggcatcgttttcctccttatgcctctatcattcctccctatctacactaacatcccacgctctgaacgcgcgcccattaatacccttctttcctccactctccctgggactcttgatcaaagcgcggccctttccccagccttagcgaggcgccctgcagcctggtacgcgcgtggcgtggcggtgggcgcgcagtgcgttctcggtgtggagggcagctgttccgcctgcgatgatttatactcacaggacaaggatgcggtttgtcaaacagtactgctacggaggagcagcagagaaagggagagggtttgagagggagcaaaagaaaatggtaggcgcgcgtagttaattcatgcggctctcttactctgtttacatcctagagctagagtgctcggctgcccggctgagtctcctccccaccttccccaccctccccaccctccccataagcgcccctcccgggttcccaaagcagagggcgtgggggaaaagaaaaaagatcctctctcgctaatctccgcccaccggccctttataatgcgagggtctggacggctgaggacccccgagctgtgctgctcgcggccgccaccgccgggccccggccgtccctggctcccctcctgcctcgagaagggcagggcttctcagaggcttggcgggaaaaagaacggagggagggatcgcgctgagtataaaagccggttttcggggctttatctaactcgctgtagtaattccagcgagaggcagagggagcgagcgggcggccggctagggtggaagagccgggcgagcagagctgcgctgcgggcgtcctgggaagggagatccggagcgaatagggggcttcgcctctggcccagccctcccgctgatcccccagccagcggtccgcaacccttgccgcatccacgaaactttgcccatagcagcgggcgggcactttgcactggaacttacaacacccgagcaaggacgcgactctcccgacgcggggaggctattctgcccatttggggacacttccccgccgctgccaggacccgcttctctgaaaggctctccttgcagctgcttagacgctggatttttttcgggtagtggaaaaccaggtaagcaccgaagtccacttgccttttaatttatttttttatcactttaatgctgagatgagtcgaatgcctaaatagggtgtcttttctcccattcctgcgctattgacacttttctcagagtagttatggtaactggggctggggtggggggtaatccagaactggatcggggtaaagtgacttgtcaagatgggagaggagaaggcagagggaaaacgggaatggtttttaagactaccctttcgagatttctgccttatgaatatattcacgctgactcccggccggtcggacattcctgctttattgtgttaattgctctctgggttttggggggctgggggttgctttgcggtgggcagaaagccccttgcatcctgagctccttggagtagggaccgcatatcgcctgtgtgagccagatcgctccgcagccgctgacttgtccccgtctccgggagggcatttaaatttcggctcaccgcatttctgacagccggagacggacactgcggcgcgtcccgcccgcctgtccccgcggcgattccaacccgccctgatccttttaagaagttggcatttggctttttaaaaagcaataatacaatttaaaacctgggtctctagaggtgttaggacgtggtgttgggtaggcgcaggcaggggaaaagggaggcgaggatgtgtccgattctcctggaatcgttgacttggaaaaaccagggcgaatctccgcacccagccctgactcccctgccgcgg

SEQ ID NO: 2560 - DNA, 6000 bp, Homo sapiens
tcaccagcccaatattttaaaagtaaaaataataagccaaggccaggagcgatgactcgcacttgtattcccagcagtttcagaggcaaaggccgaaggatcgctttaaccgaggagtttgagaccagcctgggcaacatgaccagactgcctctctacaaaaagtttaaaaaattaaccgggtgtggtggtgcactgcactcccagctactgggctggggtatcaggctgaggtaggaggtttgctttgagcccggggggatcgaggctgcagtgagctttgattgtgccactgcactccagcctgggtgacagaaggagaccctgtctcaaaaataataagaataataattaataataataggccaaaccaaatacccatcaccttctgctgtgcctcccctttccccaataaatccagtgtcttgctttcaaattttgtggttaaaaaagatgatgagtttctaagacgtgggggctaaagcttgtttggccgttttagggtttgttggaatttttttttcgtctatgtacttgtgaattatttcacgtttgccattaccggttctccatagggtgatgttcattagcagtggtgataggttaattttcaccatctcttatgcggttgaatagtcacctctgaaccactttttcctccagtaactcctctttcttcggaccttctgcagccaacctgaaagaataacaaggaggtggctggaaacttgttttaaggaaccgcctgtccttcccccgctggaaaccttgcacctcggacgctcctgctcctgcccccacctgacccccgccctcgttgacatccaggcgcgatgatctctgctgccagtagagggcacacttactttactttcgcaaacctgaacgcgggtgctgcccagagagggggcggagggaaagacgctttgcagcaaaatccagcatagcgattggttgctccccgcgtttgcggcaaaggcctggaggcaggagtaatttgcaatccttaaagctgaattgtgcagtgcatcggatttggaagctactatattcacttaacacttgaacgctgagctgcaaactcaacgggtaataacccatcttgaacagcgtacatgctatacacgcacccctttcccccgaattgttttctcttttggaggtggtggagggagagaaaagtttacttaaaatgcctttgggtgagggaccaaggatgagaagaatgttttttgtttttcatgccgtggaataacacaaaataaaaaatcccgagggaatatacattatatattaaatatagatcatttcagggagcaaacaaatcatgtgtggggctgggcaactagctaagtcgaagcgtaaataaaatgtgaatacacgtttgcgggttacatacagtgcactttcactagtattcagaaaaaattgtgagtcagtgaactaggaaattaatgcctggaaggcagccaaattttaattagctcaagactcccccccccccaaaaaaaggcacggaagtaatactcctctcctcttctttgatcagaatcgatgcattttttgtgcatgaccgcatttccaataataaaaggggaaagaggacctggaaaggaattaaacgtccggtttgtccggggaggaaagagttaacggtttttttcacaagggtctctgctgactcccccggctcggtccacaagctctccacttgccccttttaggaagtccggtcccgcggttcgggtaccccctgcccctcccatattctcccgtctagcacctttgatttctcccaaacccggcagcccgagactgttgcaaaccggcgccacagggcgcaaaggggatttgtctcttctgaaacctggctgagaaattgggaactccgtgtgggaggcgtgggggtgggacggtggggtacagactggcagagagcaggcaacctccctctcgccctagcccagctctggaacaggcagacacatctcagggctaaacagacgcctcccgcacggggccccacggaagcctgagcaggcggggcaggaggggcggtatctgctgctttggcagcaaattgggggactcagtctgggtggaaggtatccaatccagatagctgtgcatacataatgcataatacatgactccccccaacaaatgcaatgggagtttattcataacgcgctctccaagtatacgtggcaatgcgttgctgggttattttaatcattctaggcatcgttttcctccttatgcctctatcattcctccctatctacactaacatcccacgctctgaacgcgcgcccattaatacccttctttcctccactctccctgggactcttgatcaaagcgcggccctttccccagccttagcgaggcgccctgcagcctggtacgcgcgtggcgtggcggtgggcgcgcagtgcgttctcggtgtggagggcagctgttccgcctgcgatgatttatactcacaggacaaggatgcggtttgtcaaacagtactgctacggaggagcagcagagaaagggagagggtttgagagggagcaaaagaaaatggtaggcgcgcgtagttaattcatgcggctctcttactctgtttacatcctagagctagagtgctcggctgcccggctgagtctcctccccaccttccccaccctccccaccctccccataagcgcccctcccgggttcccaaagcagagggcgtgggggaaaagaaaaaagatcctctctcgctaatctccgcccaccggccctttataatgcgagggtctggacggctgaggacccccgagctgtgctgctcgcggccgccaccgccgggccccggccgtccctggctcccctcctgcctcgagaagggcagggcttctcagaggcttggcgggaaaaagaacggagggagggatcgcgctgagtataaaagccggttttcggggctttatctaactcgctgtagtaattccagcgagaggcagagggagcgagcgggcggccggctagggtggaagagccgggcgagcagagctgcgctgcgggcgtcctgggaagggagatccggagcgaatagggggcttcgcctctggcccagccctcccgctgatcccccagccagcggtccgcaacccttgccgcatccacgaaactttgcccatagcagcgggcgggcactttgcactggaacttacaacacccgagcaaggacgcgactctcccgacgcggggaggctattctgcccatttggggacacttccccgccgctgccaggacccgcttctctgaaaggctctccttgcagctgcttagacgctggatttttttcgggtagtggaaaaccaggtaagcaccgaagtccacttgccttttaatttatttttttatcactttaatgctgagatgagtcgaatgcctaaatagggtgtcttttctcccattcctgcgctattgacacttttctcagagtagttatggtaactggggctggggtggggggtaatccagaactggatcggggtaaagtgacttgtcaagatgggagaggagaaggcagagggaaaacgggaatggtttttaagactaccctttcgagatttctgccttatgaatatattcacgctgactcccggccggtcggacattcctgctttattgtgttaattgctctctgggttttggggggctgggggttgctttgcggtgggcagaaagccccttgcatcctgagctccttggagtagggaccgcatatcgcctgtgtgagccagatcgctccgcagccgctgacttgtccccgtctccgggagggcatttaaatttcggctcaccgcatttctgacagccggagacggacactgcggcgcgtcccgcccgcctgtccccgcggcgattccaacccgccctgatccttttaagaagttggcatttggctttttaaaaagcaataatacaatttaaaacctgggtctctagaggtgttaggacgtggtgttgggtaggcgcaggcaggggaaaagggaggcgaggatgtgtccgattctcctggaatcgttgacttggaaaaaccagggcgaatctccgcacccagccctgactcccctgccgcggccgccctcgggtgtcctcgcgcccgagatgcggaggaactgcgaggagcggggctctgggcggttccagaacagctgctacccttggtggggtggctccgggggaggtatcgcagcggggtctctggcgcagttgcatctccgtattgagtgcgaagggaggtgcccctattattatttgacaccccccttgtatttatggaggggtgttaaagcccgcggctgagctcgccactccagccggcgagagaaagaagaaaagctggcaaaaggagtgttggacgggggcggtactgggggtggggacgggggcggtggagagggaaggttgggaggggctgcggtgccggcgggggtaggagagcggctagggcgcgagtgggaacagccgcagcggaggggccccggcgcggagcggggttcacgcagccgctagcgcccaggcgcctctcgccttctccttcaggtggcgcaaaactttgtgccttggattttggcaaattgttttcctcaccgccacctcccgcggcttcttaagggcgccagggccgatttcgattcctctgccgctgcggggccgactcccgggctttgcgctccgggctcccgggggagcgggggctcggcgggcaccaagccgctggttcactaagtgcgtctccgagatagcaggggactgtccaaagggggtgaaagggtgctccctttattcccccaccaagaccacccagccgctttaggggatagctctgcaaggggagaggttcgggactgtggcgcgcactgcgcgctgcgccaggtttccgcaccaagacccctttaactcaagactgcctcccgctttgtgtgccccgctccagcagcctcccgcgacgatgcccctcaacgttagcttcaccaacaggaactatgacctcgactacgactcggtgcagccgtatttctactgcgacgaggaggagaacttctaccagcagcagcagcagagcgagctgcagcccccggcgcccagcgaggatatctggaagaaattcgagctgctgcccaccccgcccctgtcccctagccgccgctccgggctctgctcgccctcctacgttgcggtcacacccttctcccttcggggagacaacgacggcggtggcgggagcttctccacggccgaccagctggagatggtgaccgagctgctgggaggagacatggtgaaccagagtttcatctgcgacccggacgacgagaccttcatcaaaaacatcatcatccaggactgtatgtggagcggcttctcggccgccgccaagctcgtctcagagaagctggcctcctaccaggctgcgcgcaaagacagcggcagcccgaaccccgcccgcggccacagcgtctgctccacctccagcttgtacctgcaggatctgagcgccgccgcctcagagtgcatcgacccctcggtggtcttcccctaccctctcaacgacagcagctcgcccaagtcctgcgcctcgcaagactccagcgccttctctccgtcctcggattctctgctctcctcgacggagtcctccccgcagggcagccccgagcccctggtgctccatgaggagacaccgcccaccaccagcagcgactctggtaagcgaagcccgcccaggcctgtcaaaagtgggcggctggatacctttcccattttcattggcagcttatttaacgggccactcttattaggaaggagagatagcagatctggagagatttgggagctcatcacctctgaaaccttgggctttagcgtttcctcccatcccttccccttagactgcccatgtttgcagcccccctccccgtttgtctcccacccctcaggaatttcattta

SEQ ID NO: 2561 - DNA, 6000 bp, Homo sapiens
cctggcctccatcaaataacactatccaaggtggcacctcttctgcaatgtttaaccctgctagtaatgaacgatgacttagttcggatatttcagaactttttgtttataccatcaggtatgcatgaatttataatctgaaagaggacttaaaataataattaaaacttaccagcttaagtgctaaactttttattttttaggtatttggggaagaactctttttaaagtatacacctaactgctttttaaaatgagtacacatgacatactttaattccatatgtattcccctactctttgggagacactgtgttgagaccaaggtcaaaaaacgtggtcaccgccctccaaatcgtctccgttccctgaggaagatcatatacctgtgtagtagccacagtacaaaacagactagaacacagcccatagcatgtaaccttttcctgactaactcaaggataggccaacacctatggtattagattctgccctaaaacaataagagttagatgctaagttatatagtcctggaccttaactcaaatagccagaatagccctagtaacctagaatattcctgattaaatatcccctgcttttagatacctgttgtccatttgggtttgttttttacagtctcttttgtaccacagtggatacatttgcttcatgagtgcaggaaccatgttcactgctgcattcttacccctagccctgcaacaaacacacaaaagatacccaataaatatttgttgattcactaaatgaatgaatgatgagtaggcctgcttctagaagtgcactgccaataagaatgtaatgcaagccacatatataattttaaaaattctagtagccatattaaaaataataataggccaagtgcagtggctcatacatgtaataccagcagtttggaagaccaaggtgggcagatcacttgagcccaggagtttgagaccagcctgggcaacatggctaaaccccatctctaccaaaaaagatataaaaaattaaccaagtgtggtggcatgtgcctgtagtcccagctactcgggaggctaaggtgggaggatcgcttgagcccagaaggttgaggctgcagtgagccatgatcgtgtcactgcactctagcctgggtgacagagtgagaccctgtctcaaaaaataatcagcatcataaaaagaaaccagcaaaattaactttactagtatatttaacccaatatatataaaatattatttcaatatgcttccactataaaaaattattttacagtcttttatttccatattaagtctttaaaaatctgatgtgtagtttgtacttacagcacgttgcagttaggactggccacattttaagtgcacagtagccacagggggccactggctaccatattggatagtgccattctagaagctttcagctttttcaactggatgcctctgatttgtggactcagaatacagataaccaaagaagtgggactagtgtctgaagtaagaatgacagggtatgattgagagccccatgagcttacctaggagagaaacttgtggggttgcagaataaggatttgtcaatattggctctagctgttcacactatttctgggccaactcccagatcatttctcaactccagatagttaagtggggagcatggctgcactttttaaagtgatggcacaaaaaaagatattgaacgttggtcctctgattatatattctaaatatgcagttagaaaagaggccttttaagaatccctaagagtaaagcaaattagtatctttgtttcctgaaaattagagaaacttgatatgccatgatagccctcttcattttatttggaaaactcttctatgaaagcttattagagaaaattttctgattagcttcatgcctcccctccttcagcaaggtcaagggtgcagttgtcactatcacataagaatctcataaaaattaaacatgaatatactgcacagatctgattgggtttgtcatgccacacattgttttaaattccataattctattctataaagagtggtttctatgacaatagatcgttttaaaaacaaacaaacaaacaaaatttagagttgtcattggtaattgtggttgcaagtatgctttcaaagaccagaagcttttgttttgctttgaatgtaatttttttcttttttctttttgatacggagtctcactctgttgcccaggctggagtgcagtggcaccatctcagctcactgcaacctccacctccgtggttcaagcaattctcctgcctcagcctcctgagtagctgggattacaggcgtccaccaccacgcctgactaatttttgtatttttagtagagatggggttttaccatgttggccaggctggtctcaaattcctgacctcaggtgatccacctgcctctgcctcccaaagtgctgggattacaggcgtgagccaagcttcaatattcttaaacccaacctcacacagcctgatttaaaaactaaatttctgctaggcacggtggctcatgcctgtaatcccagcactttgggaggcggaggcgggcggatcacgagctcaggagatcaagaccatcctggctaacacggtgaaaccccgtctctactaaaaatacaaaaataaaaaaattagccgggcgtggtggcgggcgcctgtagtcccagctactcgggaggctgaggcaggagaatggcgcgaacccgggagacggaggttgcagtgaacgcagatcgcgccactacactccagcctgggcaaagagcaagactccgtctcaaaaaaataaataaataaataaataaataaataaaaaactaaatttctggccaggcacagtggctcgtgcctgtaatcccaaccctttgggaggccaaggctggcagttcgcttgagcccaggaggtcgagactagtctgacaaacatgtcaaaaccccgtttctacaaaaaatacaaaaattacctaggtatggtggtgcctgcctgtagtctcagctacttggggggctgaggcatgaatccaggagttcaaggctacagtgagctatgattgtgtcactgcactccagcctgggcaacagagtgagaccctgtctcaaaaaccaaaacaaacaaaaaagaaagcaaaaactaaatttctgataatcactaagtttttaattatgaaattactagaggaaatgcagcatcaccttggttgaaaaccatttggagagccgtgcacattcctgatccctaagtccttgatgttgcacccatcttgaggagcagtgctctctctggaccgatgttactgaatccaacccagttcctacttgatgtttgtggcattagcttggcagctagtttttacgtttactatttttactacatattaggagatggcaaattactgatagccaggataagggaatgattttcaaggcattatagctctaaaaaacaattgagaaatcagctccctcatcacttccttaatgcaatgagagaacacgacacggatgaacaaactgttctgttatccaacaagattatcaagagttattagtgagataataaaaaagtatatgtgactgccaaaagtctccagactaaggaccagaagacctggtttcttgttctttcactttctagtcctgcaattctggcgaagatactatactgctctgagcttcagggtttttttcactgtgaaagagggtgcaagttcctccacattcttccaatctactgaggaaacccaatgagataatgcatgggaacatgttttggaaactcaaaagtgctgcccaaaatgtaaggtaacactgtttacaattgacacttccagaaagtttagccagcacccccacacatggcatccgcttctgacaacgttaatcaaaatcaggccaaaggtgcaggcaggacagaggcctgacttaccagaaaataaacgtctggtctattccacttgtagtgccagtttacattgtctggcgagagccaactaccagggcctccgggtagaagaaagaaagggtatcagtggaactgagagtgtatacagtggcgcctgaaagcgggtagaagaaagaaagggtatcagtggaactgagagtgtatacagtggcgcctgaaagcgggtagaagaaagaaagggtatcagtggaactgagagtgtatacagtggcgcctgaaagcgggtagaagaaagaaagggtatcagtggaactgagagtgtatacagtggcgcctgaaaacccaacctcgccaggcttccctgtctcctgtgtgcagcatgtgtgcagtgcattcccctggaaggtaaattcgcggagtcccgcagcccacctgtgtccacctagcctgtaagtgccccctgagggtatcaaagcacgcggacttccgcctgaagcaaagccaccgggcggcaagtttccccgttaacaacaacgaagacagagaggacttggcagctgtgacggatctgcaataattaaactgacgttgctgtttagaagcctgggggtcgcctgcagcctcccaggctccactccatcggctccagcgctgcaggcgggccgtgcatgtctctagatgcatattaagcaaaaagtttctaaagaggatcgcgtggaacccagcaattgattaagaatctcaatggccctaatcccctgagaattgaactaagggctccccagcaaacacagcgatttacatggggcctagagagagcgagcactgccgggggcggcggcgaagggcagcagtggtgggacgggcggggtagggggagttactgagcatgcgcccgggtaggggcgtgggggagttactgagcatgcgcccaggtaggggcgtgggggagttactgagcatgcgcccgggtaggggcgtgggggagttactgagcatgcgcccgagggtgtttcggggcgtccgaagcgggcgtgctccagcctgctcagcagcgagtggttggaaattagcaaagtgagagggtgcgtggcctgagggactcggggaggctgagggctttttttctcaacactgtgaagctcagggaaaggagtagaactgggaaccaagtaaagtaaaatcgtggcaagtgggcatagacctgaaatctccttcgtgagggaacccagaacgtgcagctcaatgtatgtttggaacgaacaggtgaaaggaagcaggaggaggagggagttctagcgaagacttcggagggaagcaacccatcccctgccacaagaaagcaccgccactccagtgggaacggacacgcgtgcacacagccacgagtgaggtttgaaagaggccccaccctccattacacctgtgctccaccgtggcccccagccaagtttaatctcccattcagcacttacttctggaagcttctttccctttccttcccaccactcattggcctttcaccccctagttttttgtctgtgtgtgggactgtcttcccccactccccttgactgaagttccttgagagcagcagccctctttttatcagggaagagatttgaagctcaggacattcttatccaagtaggtgctagccacctgggtagtcaagacagggccctgcacagttaatgtgaatcttgtcataatgccagggttattgttttgcaaggagccggtcatagaacactagattgcattgtcactgggaaataagctcattctattagcttgtttctcagctagcttatgtagaaatttgccacagttgttactgctgggcacctgccctggatctgatcatcaattatatcatctcttccatctgatggactgcacctcaccccttgctttttcagagctggcgaagctgggccaaggaaagcgatagtgccagctgagtggaatgtgcaggaagggaccgaggaggggcactatgtactggagaaaagagatggggtctccaggacaggggtaaggacactagactgagggcacaa

SEQ ID NO: 2562 - DNA, 6000 bp, Homo sapiens
tagagatgaacatgtatatactgatttagacaaagagaagtactttatgaaaatgtgacaaggaaaaggggcttgctagttaattggtgaagaagtggtgaagaggataaggattagtctaacaagtttgtttgtaatatttccctcagactcttcccctccttgatgatgataatatttccttctggtagagagagaacatcttttgcatgggaattttatctgctgcttttaagaaacagaaggaagggtagagtgatcttcttgcacctgctgttttttaagcgcctttaactcaaaatggtcaacatgctagagtagcatatttttaactccttcaagcagctacaacaaaatggggagaaaaaatagttacaactgtggcagtaacctacacgtgtcaaacatctctcatgaagcaaaattaacaagaataataaacaagtgacatgtcagctatggagttatcctcttactgaaagagatcccatagataataggaatttcaaaaaatctgtaatggaaactggctttaatgtaactggtaactccataaggctcttcactctgaaccactcattaacaagtgcttcagttgatgagcaagttggttcttatcctggactgcagatgccattaggtctctgctggccctatgctgatgaagacttttttaaggatgaaaatgagccccatgttaattcatgttcaactacagaaaacaacaagtgaaactttgtttgctccaaattggaaactgaaatatggaaacagcagtgtggaaggaaatttaacatatgaaggtgatttatcagaaaacgaaaaggcaaaggatactttattcaattatatttaaaggagggacctaaactgaaagccagaaacaacagaaaatgttgtagaatctttcacagaggagccaagtgaagtttttccataccctgattttctccctcctacggagcttcagtaccctggacttgcacagatgaggccctcacaaaatctgaaaattggaaagcaacaggggaaccttcagaaagctctattattggaaatggaaagattacaacatatgactatacaaaaagagaggtcaaagttacaaactactttctgtaccccagcagttactgaatgactttcttcctccaaagctatactgagagtgggacagccaaaactttctgattcactgagtcttcagacatctcgtgtagataaaagttgagaaaaaagaaaaaaaaaaccaatcgggttctttcaagcttgagcaaaatgcttcaaaatggatttggagcaatgctggaaaatataaatgaaattctagaccaccaactctaaaaagttcatccaccacaaaacagttggttgcaacttaggactttaaaactcttaaaagttcatttttaaatccgtggcaagaactttcagcaaggaccagacaacgcactgactggttaaagtggcctcaataaggtgtctgcccccaaggttttcagtaccagtctccatcttttcttgaaaatgagaagaaataaatcaaggcaccaagaaccaatcacaaactttataaaaaaaaaatagtgttgcatagaccattctatatttagaagctatttgttgccttcatttatagctaagggcttatgtattgactaaaaataattcttttctttcatatatctcagtgtgagcaaatctattccaagaagcccagctaaaatatggttcattgttcccagatacaggtattcgcccacgcacagacatacacacacacacacacacacacacacaccccaattgcttgatatgatatcgattggaatttgtgaaaattactgctgagagtattttaattttcttaattgttactttttaaaaaaatagagatgaggtctcactttattgcccaggctggtctcaatccaattcctgggctcaagctatcctcctgctttgggatctccaaatgatgggattataggcacaagcgcccagcctcgcgagagtctttatataaatccaagggcttctatgctgacatgtttgacaatctttcgcatgttatatttcaagaaatgtttcacttagtaaacggttctattcaaagattgttcttttgtgacagttttccagtataattctatcatcagtaaatggtataatgggtagggggaggaagaaagtactgaaacatactacagcatggatgagccttgcaactattatgttaagtgaaagaagctagtagcatgttgttatgttcctagttatatgcaacgtccagaatcagcaaatccatagagacagaaagtaaattagtggtagccagcggctgggagtagggaggaatggggagtgactaatgggtatggggtttcttactgggatgtcaatgtctggaattagtggtgatggttgtgtgactttgggaatatattcaaaaccactgaattatacattttgggagtaaattgtatggcatgtgaattgtatgtcaataaaataactaaattaaaaatgaaatttcaagtataaatccactaaaaattcagaatctgccatacttttgattgattcgttttgcttactcttgagggcctatcaatgtttactgactaaatgcaaagagggagaaataaaggagaggtgaaggctgggaattctggggatggagagcactttttttttttttttcttagagtcgtgctctgtcgcccaggccaaagtgcagtggcatgatctcggctcactgcaacctcagcttcccgggttcaaggattctcctgcctcagcctcccgagtagctgggattacaggtgcacgtcaccacgcccagcgaatttttttgtattttttagtagacatggggtttcaccatgttggccaggccggtgttgaactcctggcctcaagtgatccacccatctcggcctcacaaagtgctgggattataggtgtgagccagtgcacccggtcgagggcactatttatttatttatttttgagacagggtcacactctgtagcctggactagaatgcagtggctcaatctctgctcactgccgcctcgacctccagggctcaggcgatcctcctaccttagcctccagagtagctgggactacaggcgcgcgccatcgcgcccagctgatttttttttttttttttttttttttttggtgaaaacagaatttcactgtattgcccagaactcctggggtcaactgatctacctgtctcggcctcccaaagtgtgaggattataggcctgagccactgcgcctggccgacgagcacttttaaaatgcaggagtcttcctgcctctgatatctcatcccttatcaccatgcaaacaattctccttttcatagaagagtagacatttggggcggggtggtggtggtgggggattttagaaaatatctactgcatccaaatgccctactctacagacgaaaaagcaaggcccaggaggaggaaagagtttgcttactgccacccagtgagctggcaaaggcgctgagattcaaaatgagctttcctgccttcacatatcttccggctgccctttgcctattccctaaacagtcaggagccatcaagttcaggaatttgcaggtgtgcttcgctgtgaactgtggaaaagcagcgtcttctccccagaggcaagcatgtcgccttgtgaagtttgatggctcttcacttgcacactcacaaaaaagactgagcgtgtgtaacgccctgctggatgtgtgcggtgctagagagcttgggggtgaggggaggactctctcccttaagaaaatcagttgactgcagagctaacattgttttttgagtaatacctggtttttataaagtcgtcccttcagttcccaagctcctcttctgtttgttcaagccaccttcaatttgaaaaagactgaagtcacagcttctcaatccctactaatttctcatggacctactggattgctccaaatcgagtatttgggactgaactaggaagccagttcaatcctgagcccccgaggcaggcgttgggtcttctgtggagtccccagagacctgcaaccttctgaacacgcatcctcccctttccgccgaggactctgtcctgcagccgagccagggcgaatgcacggaggtcacaagggaggtgcccttggaggcgggaggtttctggccgccggggcgaccgtgctgacgaggcacctgcaggaaacagagctctgcacgctccggtccccctcacccggggagggagaggaggtacagaggcgctgggggaggacgtcgagcaggccagcctcgttgccagaacccccgccccagccggagatgggagcaccgcaccgtctcacgggggctggatttcttctccccttgcgggtgtgtgtgcgaggatggacgtggtaaatacgggttggcagaaggagcgaaccgcggtggaggaagttcttctgcttagttctcgccgcggcgaggcccgcgggccaggcgcggcgacgaaggtgcacgaaggtgccccgcgggcctggtggagttgcagcggcgcgcaggcgcactgagggccgcccgcggccggctccgcggtacaaagagcgcccccgcggggagccgggcgtcctctgggcggagggagcagccggggcttcgccggcccgcgccgttcttctcacgcgccgctccggggcgcagccacagctgtcgcccaccgcgggtgagaggcttgctggtccgccccggcttccccgccccggcggcggccgtgcggttcgggctttaattctggcgcttgccagccggggccgactccgccccctgcgccccgcccttccccgagctccgggtccgcggcggagcgagcgagcggccggcaggttgggaggagcggccgaaggtgagtgacgcggcggggccgtgccgcgccccgtgccgcggcgaggttgtcccggagcgcgaggcccctacccctgcctcgggctggccccgcgcggagccgacttggcgcgcgccggggttgcgcggcggccgtggcggtggcggagggcagcccccgcgggctcccgctcgtgcgggtgaacccggcggcctcggggcggtcctgggggggggtccgagaggtggcgtcggccccgcggccgtcggagtttggcgcgctctgcagcggcggcgctcggccggtctggaggagggagaggcgcgccgggcacggagcagcgagaaagttcgggccgggccggccggcgggagggtgcgggcgcctggctaccccggcccggcgctctgtccctcggatgcctctgggcccttccctagcccggggcggaacgggggaccctctctgaagcggctctccgtggagttggatgttgcccttcgcgggagggagtggcggtcaagacccctttatcctcggccccagaggggcaggtggcctcgggtcgccctccgccaactccgaggtggcttcggccggggctggagggcggggaggcgggggaggggcgtgggcgctgcggcctctggggcggcccaacccggcgcgggcagcgtgggtttccgaggtcccgcggttccaggtcgagggaaggtgtaggggccctgaagcgggctggtccccgaatgttgcgttttctgtgccgctttgggcaacacgcagtggcgctcgcggcagccacggctccttgaccgttcatctccttcacccgggtcccgtggaactttcagaggcaactgttcttggtggctcttgcgggtcagcacgagccgtgctgcacgagcgtgacctagtgaaggccttgggcgagttggcgttaacaatttatggcgtccgccagcgctcgctttccgcacgtggcctctgcggagggtcagcccatcttattaaatagtggattctattagaccctgatacccgaggctaataaggaagcttaatcatccagatgtgtaatcgtgcagttcctttcctcaccgtcattgc

SEQ ID NO: 2563 - DNA, 6000 bp, Homo sapiens
cagtggctcatgcctgtaaatcccagcactttgggaggccgaggcaggcagatcacttgaggtcaggagttcaagactggcctagccacatggcaaaacctcgtctctactaaaaaatacaaaaccacagtgaggtatcatctcacatctactagaatggatattatcaaaggcaaaaggtaacaagtgtgttgggaaaatgtgagataaagggaccctcttagactgttgatgagaatgttagtacaaccaatatggaaaatagtatgagtatggaagttctgcagaaaataaaaactgaacttccatatgatccagcaatcctacttctgggtatacatccaaaggaattgaaatcaaagagatacctgtacttctgtgtccctcgcagcatgattcacaatagtcaagttatggagacagtggaagtgttcatcagtagatgaatgggtaaagaaaatgtggtatatgtgtacactggaatactcttcacccttacaaaagaagaaatcctgtcatttgcagcaatatagatgaacctattcataaatgaaatagccaggcacagaaagacagatactgcattttctcacttatatgtggtatccaagaaagtcaaactctcacagaagctgagagcggagtggtggttgtcaggggctgggagatgagcggtgcttgggagggcgttggttaaaggtaaaaagtttcagttaagttaaatatgttctggagatctattgtacagtgtggtgactgtagttaatgtatacttggaaattactaagagattagctctcaaatgttctcaccacaaataagtgcgaggtgggtatgttaattagctagatttaatttcacgaggtctatgtacatcaaaccatgtatattgtaaatatatacaatttttattttttaattataaccttaataaaagtgggaggaaaagtgataaacggtaataagcccttaaaggtaataagttaacttgtcacccaacgtatttattaatttttctatacaatgtaatgtgcttggagaacattgaggccgggcacggtggctcatgcttgtaatctcagcactttgggaggccaaggtgggcggatcacttgaggacaggagtttgagaccagcctggccaacatggtgaaaccccatgtctattaaaactacaaaaaaaaatagctgtgcatggtaacgggcgcttgttatcccagctactcgggaggctgaggcaggagaattgcttgaacccaggaagtggaggttgcagtgaatcaagatcacaccattgcactccagcctgggcaacaagagtgaaactctgtctcaaaaaaaaaaaaaaaaaaaattgaaaatccgcaagcttcagaagacacactactgcgtgtttgtccttctacggaagtcagtacagatctcaatgacttgttctcatttcaccagaaaatgaccattgtgcattatgctgtcagtgcagatggaaaactagcagcagtttacaaagtttccacttgaaaaaacataactctaattgatttaaaaaagtagttgattgttgcaagacttgacatttctctagttaatttctatgcctgttgttttgccccttaccgtcttcaaaatctgaatccaaatccagggcttctctattaggaggctccatatcatatctctttaatcctgataatttctcagttttttgtttcctacctacctggctattttcttacgctatctttatttgcttagtaaatataacatttcatgttctattttattttattttattttattattttattttttatttttgagacaatgttctgttgcccaggctggagtgcagtggcatgaccatggctcactgcaacctccatctcctaggctcaagtgatcttcccacctcagcctcctgagtagctgggaccacaggtgtgcaccaccatacccggctaatttttttattttttgtagagacagggttttgccatgttgcccagactggtctcgaactcctggaatcaagcaagccaccccccacttggcctcccgaagtgctaggagtacaggcaagagccactgcacctggccctgttaacttcttatgtcatttccccactttaatatatttgagggctagttctgtgtcatgtatgtattttaacatcactaccgcatctggtgcagagaggggcattctgtagtcttcgtacttcttatcttcactattgctgatgagccataacaaatttgagatgagcaattaatagatggaccggccaacaaacactatgtggaggaataagtgaggccaaagctgatggatgatgcaaagtgaggacgtaacatatttcgctggggaaccagacagatatgcagagtaagcgctctgataggggaagtacgggctgttatgggcgcttcatactgggaacattaatgggaggtggaggtcgtagttgaagctgaaacctgttgggtgaggtggagttcgccaggtgaagtggtagacttggggaagaggagaggagggggagcatcctgtgtttagaaccaaagagagtttagtgtgtgattattgggtgggggtgggagggtaggtcataaagggcctggtaaactgttaagaaattttaaactttatctcaagagttgtgggaaatcactggcaagttttaagttggtaggtgaagtgctggctggaggaatccctccagcttgggtatgtgaggatggcctgagaacggaggcacctgcagtaatcccccagtgagagacactgtagcctgagctgaccttggggctagaaaaaggggacaaatggcggctgaggaggagaatctctgtgagttgattgaatggggagaggcaaacatcaagcccagtgcccagacttctgggaggatctggctgctactcagtatggcggttgaggaggagaatctctgtgagttgattgaatggggagaggcaaacatcaagcccagtgcccagacttctgggaggatctggctgctactcagtgaaaggaagcctgggaggtttgggagggcagatggatgagctcatttatggacagattgagttcaagcatctacagatcattgaaggggaaatgtgagcttgaaccctgcatttgaagttcagaaaagagaaagagcagaatgaattgagttctgggagtctttcccatgtggatagtaactgcagcggatgaggtgataagatcacctagttagaggtgggggagcagaagagggcttagggcagaactctgaagagcaacctgcaaaggagactgaggaggaatggacagaaagggtggaggaaatcttcatgggtgcttttcaaggaggcagtggttaccagcattagctcctgcagagccaagagaattgagtcattttgctgggcttagcaacaagaactttcagggacttcatggcagcgtgacagcatatggagatgcagtactgttggcctgtacagagcctttttttttttttttttttttttttttaaattccctgagatgtagtctcgctgctctgtcgcccaggatggagcgcagtgactcgatctcggctcactgcaacctctgcctcacgggttcaggtgattcttctgcctcagcctcccaagtagctgggattacaggcatgcaccaccatgcccggctaatttttttgtatttttagtagagacagggttttgctatgttggccaggctggtctcgaactcctgacctcaagtgatccacccgccttggcctccaaagtgctgggattacaggtgtgagccaccacaccctgccagtacagagcctttgaagacattagaaaatgtgtgcctttctggatggacacagtccctggcttggtgagtggaccgtgcatgggacttcagctcttatgtgccaccttagctgggtgcacttgtttagtgtgcagaatacaccttccatgcgtggtggcctaggatatatctgcacttctcaatcgaaggcaatgttgcctcccagggaatatttggcaatatccgaagaaatttatgattgttatagctgaatcagagagggtaggtgctactgtcatctagtgtgtaaaggccagagatgctgctaaacactctgcagtgtccaggacaacccctgacaacaaagaattatccagccccaaacaccagttgtgctgagaaacgctggtgtctgtgaccctttcaggctcatgggaaaaggcggtcagagagggtgatagctggaggtgggtggacctgagaacaggctccttacatactttgctgcagtctcatttgcttgtggcagttttcaccttgcctctcctacctctctaccatagaactcttactcatcatgttataggttttcatttgtttattcttatgtagccattttcactattccctctcccacccccactcccccaagcagtaaattctgtaatgcaaggcaatcttgtgtccttatttctgtttctgggcacactgtaaaacatctgtattttaatagtatctgtcaggaaattctattttggcaaccaagtacgggctaatctaaagtagcccatacttgagtgctatgttgataaggctctaatgcatagttagccccttgactgtcaggcttggaaaaaagacaggaagtattccttgtctttggaaatgagcctactctggctttgggaaggaaagagtacaaatggttctcaccagatagggttgcagcagctctcccagcattttgggaacaaatcaggtcattatctcaacaatgtcaaaattgtgttcccagatcggttgttgtttgaaacatttggggctgatgcggaggaggagaattaattagcagctccctctgttggtgttctttttcagccttctcacattgcagcacgagagtcccttagacatgctggctgctcatttgataatctgtgttttgctcagtacaaaaggttgctggctaagttttgtgagcccctctaacgtcaggctggcagtatcttgggttcaattaacaagaaagtctacagtaacattttgtcaatggggaaggacttgaattcacagaactgtctcggaaagccctgggtaagtttgaagagcaaagttgccttttctgttttcagaaatattttaccccgcaacgatgtgtaaatctaaagcctgtgcaagaatgaaaacgagcttgagtattaagatttggcacagtgtgtgcaagcaatgagactgggttaaaaacaggaagtgtcttaatttaaagatggtgatggggagacggattaaaataaactgctggccatgttgaatctgagataggcaagccttggttgtgggcacattcccttctgaattactctatgcagatatattttaggcctctttctattaaattgtctttcacatggtttcaaagatagggctagtgataagaattctcttcctgcatggtgggtaccattatataaacggtatgagcatgcttttcttgtgtctctgtataactgcttggtctggcactccacaaaatagtaaaacacatttctgcagtggactagcccatgctgtgaaagaggaaggtggtggtggacaaaaagtggtaagttttaggctgaaggatgttgatgttaaactttatttctgattatggcagtctttcatcatgtaatttaagaagcctgagatcatctgacttttttttatgttttttttctttaggactgcaggaagtgttgataaacatctgtttaagttgtctataccatgaaatccataatcttccttcataactatgatagcatatggttttctatagttaggaaaactatttctcatgtatttcatggtttggccaaatccttttattacattagtactaaaaaattccttaggatttctagagaaaataatatgtattatggataaataagggaaagtaagataattcttaaaccttagtatcagcagtcattcta

SEQ ID NO: 2564 - DNA, 6000 bp, Homo sapiens
ccatctcctaggctcaagtgatcttcccacctcagcctcctgagtagctgggaccacaggtgtgcaccaccatacccggctaatttttttattttttgtagagacagggttttgccatgttgcccagactggtctcgaactcctggaatcaagcaagccaccccccacttggcctcccgaagtgctaggagtacaggcaagagccactgcacctggccctgttaacttcttatgtcatttccccactttaatatatttgagggctagttctgtgtcatgtatgtattttaacatcactaccgcatctggtgcagagaggggcattctgtagtcttcgtacttcttatcttcactattgctgatgagccataacaaatttgagatgagcaattaatagatggaccggccaacaaacactatgtggaggaataagtgaggccaaagctgatggatgatgcaaagtgaggacgtaacatatttcgctggggaaccagacagatatgcagagtaagcgctctgataggggaagtacgggctgttatgggcgcttcatactgggaacattaatgggaggtggaggtcgtagttgaagctgaaacctgttgggtgaggtggagttcgccaggtgaagtggtagacttggggaagaggagaggagggggagcatcctgtgtttagaaccaaagagagtttagtgtgtgattattgggtgggggtgggagggtaggtcataaagggcctggtaaactgttaagaaattttaaactttatctcaagagttgtgggaaatcactggcaagttttaagttggtaggtgaagtgctggctggaggaatccctccagcttgggtatgtgaggatggcctgagaacggaggcacctgcagtaatcccccagtgagagacactgtagcctgagctgaccttggggctagaaaaaggggacaaatggcggctgaggaggagaatctctgtgagttgattgaatggggagaggcaaacatcaagcccagtgcccagacttctgggaggatctggctgctactcagtatggcggttgaggaggagaatctctgtgagttgattgaatggggagaggcaaacatcaagcccagtgcccagacttctgggaggatctggctgctactcagtgaaaggaagcctgggaggtttgggagggcagatggatgagctcatttatggacagattgagttcaagcatctacagatcattgaaggggaaatgtgagcttgaaccctgcatttgaagttcagaaaagagaaagagcagaatgaattgagttctgggagtctttcccatgtggatagtaactgcagcggatgaggtgataagatcacctagttagaggtgggggagcagaagagggcttagggcagaactctgaagagcaacctgcaaaggagactgaggaggaatggacagaaagggtggaggaaatcttcatgggtgcttttcaaggaggcagtggttaccagcattagctcctgcagagccaagagaattgagtcattttgctgggcttagcaacaagaactttcagggacttcatggcagcgtgacagcatatggagatgcagtactgttggcctgtacagagcctttttttttttttttttttttttttttaaattccctgagatgtagtctcgctgctctgtcgcccaggatggagcgcagtgactcgatctcggctcactgcaacctctgcctcacgggttcaggtgattcttctgcctcagcctcccaagtagctgggattacaggcatgcaccaccatgcccggctaatttttttgtatttttagtagagacagggttttgctatgttggccaggctggtctcgaactcctgacctcaagtgatccacccgccttggcctccaaagtgctgggattacaggtgtgagccaccacaccctgccagtacagagcctttgaagacattagaaaatgtgtgcctttctggatggacacagtccctggcttggtgagtggaccgtgcatgggacttcagctcttatgtgccaccttagctgggtgcacttgtttagtgtgcagaatacaccttccatgcgtggtggcctaggatatatctgcacttctcaatcgaaggcaatgttgcctcccagggaatatttggcaatatccgaagaaatttatgattgttatagctgaatcagagagggtaggtgctactgtcatctagtgtgtaaaggccagagatgctgctaaacactctgcagtgtccaggacaacccctgacaacaaagaattatccagccccaaacaccagttgtgctgagaaacgctggtgtctgtgaccctttcaggctcatgggaaaaggcggtcagagagggtgatagctggaggtgggtggacctgagaacaggctccttacatactttgctgcagtctcatttgcttgtggcagttttcaccttgcctctcctacctctctaccatagaactcttactcatcatgttataggttttcatttgtttattcttatgtagccattttcactattccctctcccacccccactcccccaagcagtaaattctgtaatgcaaggcaatcttgtgtccttatttctgtttctgggcacactgtaaaacatctgtattttaatagtatctgtcaggaaattctattttggcaaccaagtacgggctaatctaaagtagcccatacttgagtgctatgttgataaggctctaatgcatagttagccccttgactgtcaggcttggaaaaaagacaggaagtattccttgtctttggaaatgagcctactctggctttgggaaggaaagagtacaaatggttctcaccagatagggttgcagcagctctcccagcattttgggaacaaatcaggtcattatctcaacaatgtcaaaattgtgttcccagatcggttgttgtttgaaacatttggggctgatgcggaggaggagaattaattagcagctccctctgttggtgttctttttcagccttctcacattgcagcacgagagtcccttagacatgctggctgctcatttgataatctgtgttttgctcagtacaaaaggttgctggctaagttttgtgagcccctctaacgtcaggctggcagtatcttgggttcaattaacaagaaagtctacagtaacattttgtcaatggggaaggacttgaattcacagaactgtctcggaaagccctgggtaagtttgaagagcaaagttgccttttctgttttcagaaatattttaccccgcaacgatgtgtaaatctaaagcctgtgcaagaatgaaaacgagcttgagtattaagatttggcacagtgtgtgcaagcaatgagactgggttaaaaacaggaagtgtcttaatttaaagatggtgatggggagacggattaaaataaactgctggccatgttgaatctgagataggcaagccttggttgtgggcacattcccttctgaattactctatgcagatatattttaggcctctttctattaaattgtctttcacatggtttcaaagatagggctagtgataagaattctcttcctgcatggtgggtaccattatataaacggtatgagcatgcttttcttgtgtctctgtataactgcttggtctggcactccacaaaatagtaaaacacatttctgcagtggactagcccatgctgtgaaagaggaaggtggtggtggacaaaaagtggtaagttttaggctgaaggatgttgatgttaaactttatttctgattatggcagtctttcatcatgtaatttaagaagcctgagatcatctgacttttttttatgttttttttctttaggactgcaggaagtgttgataaacatctgtttaagttgtctataccatgaaatccataatcttccttcataactatgatagcatatggttttctatagttaggaaaactatttctcatgtatttcatggtttggccaaatccttttattacattagtactaaaaaattccttaggatttctagagaaaataatatgtattatggataaataagggaaagtaagataattcttaaaccttagtatcagcagtcattctaaaccacattacacatcttcagtaaaagtggttacaaaagatttttctcacttcaaaagatccgccagggaagagtcccagctttttcttggtgttattttaggtattaactcaggagggcttcctgaaggtttgtcagtgagatagttggggggttcctgagctttttattgttgtacgtgaacttggtacttacttctttggcttttaaactctcagcagcacgtacagatgccctcacatgctttctgggatgactttaacgctaaatagcaggggtgtttctcaagaatgtttaagaaaagaaagcagacatttgtttgcacaaacagatatttgtgacttctgtgaaaaaattccaatagttgtaatataggaaatttttataaacaaacacccctaccaactaacccatcgtgtatttttatgtgtgtatagaaaaaatgaaaggatatactaaaatgttaattgcatagtttctctgggaattgaatttaattaaaatttttttatcaagatttttaaagttttataatgaccacgttatgtttatgtaataaaaataaaatagaggctaggcacagtggctcacacctgtaatcccagcactttgggaggctgagatgggaggattgcttgagtccaggagttcgagaccagcctgggcagcatagtaacaccctatctttatttttaaaaaataaaataagagagggggacaataaatgcaaatatataaatgacagaaattttatggtctggtcaaagaactatcattgcatgaaattatagatatggtcatgtaaggttaccttttttcattataattccaccaataattctaaagtttcttttctttttttttttctacttcttccacagaaaaacaggacaaagaaacctgtgtgaattttcagcttttcaccttctctgattttatttcttcctcactcttcctttgacagtcctcgcagtccgcctgagagagtagagaagaccccctcccagaaccttcctgtaaggtctccccgctgacttcctgtagtggatgtgactgtgtgccaggtgcctgccgaagacccctgtcactgactgtgccctttgggaaagagtcaacaatggcctcctcctatggctgacttcgttcatgttcaggctctccagcttgctagtgagaattgccaaggattggttcatggcaggatagaactaaactgatagatgaaagctccacagtgcttcaagacggggtcccgttcatgttaagcagttttccttccttcaaaataaaaaactagcagtccttagggaggacagttttttccttccttttcctattctggctccaacagctgtctcaacacagcccgagatggggagcagcctggcttccaccggcaatagctgtattgtgggagtgtgaaagagaagccaccttttcctccctctgcccaagccacctggcccctttgtcctttctcctcctcgtcctctgaggtatgagtggctgtgactgtatgacataggaactatgaagcggggtgaggggacggtttggtgcgtaaatcctcacgcaggtggcggttattgtctgtgtggaggaaataagcccggttcttcctgggactgctttcatttccctctagcttccagagggtaaaatgaaccttaatggaggttggggggtggcacgcacaaagtcctgggttgagggggcagtggtcagaaagttccctagggtaatatacaaaggagaattaacactggggacactgaggtgggttttggtcctttccacataactgacacctttcaaagcaaggacttgctttctcgtgaggaatgtcagcagtcgcaacaccactgggttggatgcagga

SEQ ID NO: 2565 - DNA, 6000 bp, Homo sapiens
cacctagttataaattatatacgtgtacatatctctattgaggatatatgttcagattgttttatgctaatatgaaacatacatagttgcaatgttgagagatgaaaagtaatgttttagcatgtattgataaccatgatggctttatattaatattaaaagctatacctatttctgcccatgcctacttttggtgttctcataatctgagcatgcgctcagctctggctctttgcagccgctcttccacctcctaacactctttcaggagatgcccttactgttaactgcttattctctgtgcttcttaattcatattcttgagagtcagcatctaattgactcagttcaccttatcattccaggtcaactcatgtgagtctcattgacatacagtgttgtttttggcttctcttgggaagcccactctggtccacacaggtgactgcatgaagtgggaaatgaagacacttggcacagacatggctgttcaggtaacaaagagtgtgtgcagggcggcttcactgagaaggagcctggtgaggctggaatggtgactgctttcaccattagacaaatgtcagtgggtagagaagagagaccaaagtgtgactttagaaacagaaaaatccccttttcttcctttgcaaatccatacctatatattttgaagaccactaggcatgtcaggtaaactttcagcaatttaaattaatcagagagctggagaacatctattcctgttaagatctttcccacccattcaactccctgactagttactgctaaagagaaaaatggtagcagcttcatctttaagacttaagccatagttcttgcaatgggaaagtcaaccctaaagaatggtttcatgtttgctcccattctaccttgtgcagacagtagtttaaggatgtcttctgcagagcataacttgtgtagtcacccaaaagggtcttccagttcactgagaccatggtattgcagtaaagaaagagtttaattgacgaagaggtggctagccgcatgggagatggagttatcactcaaattaatctccctgaagttttgggggttgaggtttttcaaggatagttcggtggacaggggactatagaatggatgttgctgattggctggggatgccatcataggagtgtggaaaacagccctcatttgctgagtctgcctctgggttaggggccataggaccagttgagtcatgagtcgcaggtccaggtggagtcagccagtcgtcaaaaatgcagcagtctgaaaagacatctcaaaaggccaatcttaggttccgcaagagtgatgctatttaccacagtaattggggaagttacaaatcttgtgacttccagaacaatggctggttatcatttatacctacgcttttaacaaaacttttattttaggttcaggggtgcatgtgcaggtttgttaatatgggtaaactcgtgtcatgggggtttgttgtacagattgtttcatcacccaggtgttaagttaataatacatagttatttttcttcaccctctgcttcctccccaacctccaccctccattaggctgcagtgtctgttgttgtcctctatgtgcccatgtgttctcatcatttagctcccatttataagtgacaacgtgtagtatttggttttctgttcctgcgttagtttgctgtgggtgatggcttccagctatccatgcaaaggacatgatcttattcttttttatggctgcatagtatttcatggtgtatatgttccacattttctttatccactgtaccactgatgggcgtttaggttgattccatgtctttgctattgtgaatagtgctgcagtgagcatatgtgtgcatgcatctttatgatagaatgatttatatttcttttggtgtacacccagtaatgggatttctgggtggaatgggagttatatttttagaactttgaagactcatcacattgtcttccacagtggttgaactaatttatacttccaccaatactgtgtaaatgttcctttttctctgcaacctcgccagcacctgttatgttttgatttcttgataatagccattctgacaggtgcgagatggtatctccttgtggttgttatttgcgtttctctaatgatcggtaatgttgagctttttttccacatacttgttggccgcatgtgtgtcttcttttgaaaggtgtctgttcatgcctttgcctactttttaatggagttgtttttttcttataaatttaagttccgtgtaggtgctggatattagacttttgtcagatggatagtttgccaaaattttctcccattctgtaggttgtctgtttactttgttgatagtttcttttgctgtgcagaagccttttagtttaattagatcccatttgtcaatttttgcttttgttggaattccttttgacattctcgtcacgaaatctttgcccattcctatgtccggaatggtattgcttaggttatcatccaggtttttgagtattacatttaagtttttaatccttcttgagttgatttttgtatatgatgtaaggaaggggtccagtttcaattttctgcacatggctagccagttatcacagcaccatttattcaacagggagtcctttccccattgcttgtttttgtcaggtttgtcaaagatcagatagttgtaggtatgcggccttatttctgggttctctcgtctgttcccttggtctgtgtgtctggttttgtaccagtgccatgctgttttggttattgtagcccagtagtgtagtttgaagttgggtagtgtaatgcctccagctttgttctttttgcttaggattgccttctatgcctacatcttagcagaattcaggcccttctcataaccctaaccttgtggtgtttcattagctttacaaagttgatttagttttggaaagtgctattctcattcttgctttaaagttaaactataaactaaattttccccgaagttagctttgcccatgcccaggaatgacgaaggacaacttggaggttagaagcaagggtcagatatctcttactgtcacagttttgcaaaagcagtttcacttccctcttctaagtaccttctgcattgattggagccagcaaagagaacttttgcagcatttcttagtttgaatgtgccatataaatgaaacatgtttggaaatgtgaaaccaagtcatccatgagaatgttttcctctgaaaggcagcacttcttgataagtcccttcctcatggaactttggtgcagtgttggcccattttaaaatttattggttacccagggagatgcccgagcttatcagaattagagtctctcatttgagtacgttcttgcagtatagaagtttgcagatgttttataactttaagaggcccagtggtattgaatttagagttaatttttaaaactggctccaaagtcaccagcatggacaaaacttacagtcttccaaagagagagtgccaaagttcaacgcttggcattgttggtttttttttttctttgtgcccatatcaggtagctatgattatcttcattttacagagaagaaaacaaagctcaagagttaatttgactaaattcacagatgagtgaagtatgaggtagagagtgatcctgtgtgagaatagtttacatttatcttgatgtggttataaccactaccttatctataatgcatgttaaaaatcaacttctcaagattttttacaccaaaggcaaaaatattcaaatgttgatatagtcccttccattcatttttatatttttgtttaaaatcttcaacatcatacccagttttcaacctaactttataaagtaagcatttccttaatcttcataaacatgtttaagatatgtatcataatttaacaaattattaagtttctgaaatttttacagtagtgaggcagtggatgtatttatgtgtaagtctgtggggtttttttcctgtctctcccatagaggcagagacttgctctgtgacccaggctggagtgcagtggcatgatcgtcactctgttgcccaggttggagtgcagtggtgcagtcatggcatgctttaacctcaaactcctgggctcaagctatcatcccgcctcagcctgctgaatagctaggactacaggtgtgcatcaccatgcctgcctaattttctaaaatttttttgtagagacaaaatctcaatatgttgcccaggctgatctcgaactcctggcctcccaccttaacctcccaaagcactgggattacaggtgtgagccaccatgcctggccaaggttgattttttaaaaacattatttccttagtatgtgtatgattagaagcaaaattacaggtcagaagtcacattttaaaagatcatgaccacttaaaaaacccttaatatgttttgccaaatttatatcttttaaaaatgggatcgatttccacactcatcggggtatatttgagtatgtagctcactgtagacagagctcctggggagggaggaatggctctggtgctcttctacccacctgtagaggttcagctggggaccagctccactgtggggcattgggaggctgttagtgcagaggtatcttctcagtatctgcctgacacactactgtatccagctgcctgacccagtcctgcccacctgccttcctttcttcctgcctcccctctgttttatcaactttgtctcaaaaaacatagcttcctatctctatatgttcgtctcctatttatggtccctcagtatgttatagtgcttgctaaggtttgaatgtcccatgtgaatctcatgttgaaacttaacccccaatgtggcaatattgagaggtggggcctttaagaggtggctctgccctcatgaatggattaatccattcatggattaatggattaatgggttatcaggggagtagggctggtggcttttaagaagaggaagggacctgagctagcacactcggccgcctcaccatgtgattccctgtgctgcctccagactctgtcaagtccccaccagcaagaaggccctcaccagatgcagccctagactttggacttctcagcctttgtacctgtaagaaataaataccttttctgtataaattacccagtttcaggtattctgttataagcaacagaaaattgactgagacaatacgtatattctaattgtgttcacttttctttcatctagacttaccagaagtttacttctctggttggcttttcaaggaagcttttgaatttcacttctattttttctattaatgcattcattattagtgaagtattttgtaatcatttttcaaacagattgggtgttttttttttctcatttcaatatgtagttcacttatgttaattatttagggcttacatttttctctgttctcaaccttcatcagattccgtaacacttgatacgttgtaaggtttctgttttcattcattatacaccttccccaccccaggccttttcattactttcaacacagtctcgtattaggatttatgttttttaaaacaattatttaggagaatagaatagtttttttctccttgtattgggttttttgtttgtttagatgtctgttgtttctgtgatggctttgttttaatctgtgcttggagagtgctctctcattgctactttggagaatgtattattctttggcctagtatgattgtgtgtgtacatttggggacaaaatgtttttgtggagataatgtagacttaaaattttaaatccgtagctgtattttcgtcacaatgaaaatttgatgtccttagtaagccccgaatagaaagccttgacttgctttttgagcatagttaacagtgttgagataagagaggtttgctggcagttgcactgatggctgcactgttgtccagtgggcccagctgggtgtacagctcgccgtataaacagaaatctagacacaggtccct

SEQ ID NO: 2566 - DNA, 6000 bp, Homo sapiens
agttccctagtgatggtgatgctgctgatctcggaacacgttttgagaaccactggaatagaccaataactctcaaatgtagcagttggaatctcctggaggagctttgaaatatacttctgctcaggtctcacccccagagattagttcaattggtctttgatgagacctagacagtaattctaataatcatccagccgggcgtggtagctcacgcctgtaaccccagcactctaggaggccaaggcgagtggatcacctgcggtcaggagctcgggaccagcctggctaacgtggtgaaacctcgtctctactaaaaatacaagaaattagtcgggcatgatggcacacgcttgtaatcccagctactcgggaggctgaggcaggagaatcgcttgaacccgggaggcagaggttgcggtgagtggagatcactccattgcactccagcctgggaaacaagagcaaaattctgtctaaaaaaaaaaaaaaaaaaaaatccaagattgtgaaccattactgtaggttgctccagataaaaggtaatgggttaggaagcttaagacttgatgaggaaaaataaaggttaaaccagtgctccttccacttcagtgtgcatacaaatcacctgggggtcttgctggaatgcagattgattctgtaggtctagggtagggcccaaaatgctgcttttttaaatcaagtcaggcagatgctgctaagattgcccaggggtctacactttgagtagtgaggtggttagaaagtgttgacctatgtaagtgcttatcaacacacagtttttatatatttttacgtagtatagaacaaataaaagcaatgtcattgagatttcagataccttagaaacaataaatattttgccattaatgactatttcccttcccttgatggctaaaacgttttgtttttgcttctccctacctgcttactcagagtttcaatcaaatgtttgtaaattaattttgctttagtatgacacatgtagtaacaggcctttcccctttgtaactgagtcccaggattcacggagtttgaggatcttgccttctggcttcctccttgcctcagaccctgccctttaggggttactgccctaagaggctgaaagtttagtaatgccccagagcctcgttgcaggagctagtcacttttggcactttcttgctgtcagaccgcaggctctgggagccagtcttcttgggacatggcttcatcctgtgtctctggcttgagcccaacctttcaggcctgggttaggggtgaagccttttatctggcaggtcccacagtctggcgcctttcccagcgtggtggagttgagaccttgctgtcagagcctgttcagaaggagagagggagagacaagaccttcgcgtgaggaggaaagagtttaagtcccgtctgtggaatctgtttcccctggcttgttgaattttctcagctgaacatggcagaagtggttgatatttgaattagaggctatgaaagtgtccttgggaaatgggtggggctgagccagtggtcttcccttttgcctctacctcatgctgaccaggggacaaggctctgtctcctgggtgtggcctgtcattggtcagtctgtgaccatactgctattctccaaggcattcctcaacagaatgggatcaggctttttcagtcatttcccatttttaaaggacatctccatggcagatgcccctactccctcccggtgcctgaatatttgcctgtctagcgtgggtaggtgaacgtcagcagaactcttgaagaatcactaaagggatgtgcttgtcctagcaggagagcctgtgacaataaaaaagcagagaatgttctgagtctcctgtattaaaaagggaaaagcttaagtgaggtttatttccactaaaggatagcaacataaggcagcttgacctttagtgtgactggagcaccgtaaatgctacttctacttttttcctttttttttattgtggtgaaaaacacatagcatagatttgccctctgaatgtttaagtgtacacttcattattgttaactgtatgcacaatgccatgacagatctctagaacttttccatttcacatgactaaaatgctgtgctcatcaaacaactctgtttccccctgtgccagccgctggcaccaacctttctactttctgtttctatgactttaattacatgtatgtgtcatagaaatttggctttttgtgattggcttatttcacttagcatagtgtcttcaagtttccattctattcatgttgtagcatgtgatagaatttccttttttgtaggctagataatagtccattgtatgcatataccacattttccttaggcattcatctgttaatggacttttaggttgcttctgcatgttggtcattgtgaataattctgtagtgaacatggggatgcaaatgtctcttcgagttcctgtttttagttcttttgggcatatacccagaagtagggttcttgaatctcatggtagttctatttcttatttttttgaggaacctctatactgttttctgtagcagctgcaccattttacagtttcaccaacaactctcaccaatgtagggttccagtttctctacatgctaccgatgctttgtttttttgttgttgtttgttcttgtttttttttaatagtggccatcctaatgagtatgaggtgatactgtggttttgatttggttctgcctttttaaactccaaattcagtctctggttacagcttttcccataaccattttcaggtgaggtgcgtatgctgcgttggtaacataaatttaacattgtgagagcttttatcaggcagcaaattgtaaagccccttctaggtcagacagttgacctctgtaaagcttaagttaggaacttttatgttcttaataaaacacaagaaaatatgggaaatttccatttggcatgagcctttctgttttcttggtggtggtggtgtgggggtggtataggctctccctaaattgcccaggctggaatgcagtggctcttcacaggtgcaatcatagctcactacagcctcgaactcctgtctcagcctcacaagtactgggactacaggcatgaaccaccatacccagttccattctgctttaaacagtggaaaaaatacatgtattttttaaatggaagggttggttatatcttcaatgtgaaatcctctatgtgaaatctaaataaactattcctggaatgtccagtgtcctttccccgtgatgataaacaaagcccagagctgcctctctttaaagatagtaagaagcctatgcataaacaaaacacttaaaaataagatcatttattttattttactcatccgcttaaacccatcaatgacttttaacttagaagaaaacctagtcttcctactatgaccaacaggactaagcaaatctcataacctagcctctgcttacctctcacttcagcccaacctactctttccctctcttaaaaactcagtagctgaaatatatggagctctttctggccccgagcctccagaccttttaaagaaaaaaaaagattgtaattttgatgaagaccgcattgtcaatttttatttctatggctcttacttttggtattatgtctagacctctctaagccctaggtcttaaagatcttctaggttttcttaagttttatagttttttttttaattttagatttaagattcatttggaattaacttttgtataagacagacggttaagaagattcattattttgactatagataccagattgctgtagcactgtttgttgaaaagactttccttccttttctgaaagagtttttcttttctgaaatgcctttgtcaaaaatcgcataggcacatctgtgtgggtctatttctgggctgtatgctgttcctgggaccatttttaccttccacctttcccctagttaactcctacttatccttcaggtcttagtttcaatgttgtttccgtggaaagacccttaaggaccacccattcctatacatctgcataccctcaacttcagtcctaaggaagggtacctctgttattctcactcaacacctgtttttttctccttcgtagcatttagcataatacgtttataactttttttgtttgtgcacatatagttcgtgcctataagcctcaaaaaggcaagaactgagtttattttgttcaccactgtagtgcccagcactgtgcctattacatgctgagttctcagtcaatatttttgaataaatgagtgaaacaaagttaggcttcctgggggatgttttctaaatccctaggtatcattttcttaaaattagaggatattcttggctcttggagccttagggcataatttttttcccagttaacccatctttgaagatagggattttgagaacttttggcctacctcagggtcacctagcgggttatcaaaatgcagattgcagggccccaaacccagagttcctgcttcagtaggtctgggatgggccccaaaatttggatttctaataagttcccagaaaataatgctgatgctgctgttctgggaacccactttgagaactgtattagtctgttcttgtactgctatgaagaactacctgagactgggtaatttataaagaaaaaaggcttaatcgactcacagttccacaggctgtaaagaagcatggctgggaagcgtcaggaaacttacagtcatggtggatggcgaaggggaaggtggcacgtcctatgtggtgggagcaggagaaaaagagggaagaaggtaatgctatgcactttcaaacaaccagttctcgggggaagtccgcccccatgatctaatcacttcccaccaggcccctcttccagcacggaggattataactcataagatttgggtggggacacaaatccaaaccgtatcaagcactagtgttttaacgttaagaatctgaagaggcccgagtcactgagccgccactgccaaggactcatctcccccttctcccgccaccgcccgcttttgcagccatttccactgaggaaaaacaatcgtatgtccacagtccagaacctccactctttccacccctttgctgatacaagtaagggtgatacctgtcctgctggcactgaggattatatccatataagaattcatccaacagagaaatggcaggaagacccttactactgtccaagggactgctgatgattatgataaaaagaaaccaatgaaggcatttaaaaagaaatttgcctgcaatgatactgtaattgagcatccagaatatggaggtcattcagctacagggtgaccagcacaagaacatgtgccagttcctcttagagattggaatggctaaggacaaccagctaaatgttcatgggttttaactgctgtggctcgctgaagcttgaatgaggttttccttgcaatgagtagaatttcctttctgtcccttgtcacaagtttaaaaacctcacagctttgtataatgtaaccatttgtggtctgcttttaacttgacctagtgtaattccttcatgcagtaaacttgaaagagccatgctgtctagtcttgaagtccctcatttaaacagaggtcaagcagtaggcgcctggcagtgtcaagtctgaaacaaagcaatactgtcatgtttcagccacacctagacccctaagatcatagacaactacgtctggccagaagctcctccgctctccctctgcagagttccctgccctaagagactgtcaccacccgaacaatcctcggtgaatctaagaggagaggatggggtaaggcagcaacagcaactctaccactggaagggagcctttggtggtcaaagaaagatcccctggtgtctataacctgaccaggtgcagagttttagagaggcccccttcccaatagcgaggtgataggacatctggcttgccacaaaggtctttttga

SEQ ID NO: 2567 - DNA, 6000 bp, Homo sapiens
ttctagcggtctcagctgcaattatctcctctgggtagaacactataacccaaacccagataaactcagttatttgttctgggatgactgatctttccctgtccattccatttttgaccttttttactgcccagcttcttgagacttttatagattctgctgtgggactgctatcaataataaagacatgaatgataatatctaacattcattgaacacttaaatgcaccatggtgcctaaaatgctttgcctgcattttcatacttaatcctcacaataatctaatgagattaagctattattttactgtcatcatcatccctatgtaatgtcacagagaagttcagggacttactgtaaatgaagtaagaaaaatcagaattatgggcagtggctcacacctgtaatcccagcattttgggaggccgagggggatggatcacccaaggtcggtagttcaagaccagcctggccaacatgacgaaaccccatctctacaaaaatacaaaaattagccaggcatggtggcgcatgcctgtaatcccagctacttaggaggctaagacaggaatggctggaacctgggaggcagaggttgcagtgggcccagattgcactactgccctccagcctgagtgacagagtgagactccatatcaaaaaataaaataaatcagaattatgatgactttctccagtaaaatatttggtgagagaggagattgaaacattatgaaatttcaagtgtagtgggtgggttttaattccctctgatgatgtggtttcctcccttgccctccatttgcttccattcacatgctcaggggaaggggtgtttaagattgttggtgcctcaagacctcaaccttcttctggtgccttgggcaaaatcctttcttcatgggtttagatacctaccccactaattcctttccaacttggtttgttctgtacttaccttttttctttgttcctgagatctaataagcaagctgtaacttttccttcccacctggtatcctgcctaacaggtctgggcattgaggttgaaggcaaaagaaagctctccgatttgtgactttcagggtgtcagagtatgaattgttactgcagacagttatctggactgtgcaggggaagattttttacttattctagtcaccatgacccatgtacatctataagcaaatctaattagagactcaaccataaacagtaatatatatgcaaacatacatatatgtgtgtatgtgtctgtatatgtatatacacacatagtaatatatacatacatatatgtatatacaaacacaaatgtgtgtacaccatatatatgacactcatagaaaaaaaaaatttttttttgagatggagtcttgctctgtcacccaggctggagtgcagtggcacgatatcggctcactgcaacctctgcctcctgggttcaagtgattcttgtgcctcagcctcccacgcagctgggattacaggcccatgccatcacgcctggccaatttttgtatttttagtagagatgaggtttcaccatgttaaccaggctggggttgaactcatgacttcaggtgatctgcctacctcggcactttgggattacaggcatgagccaccgcacccagctgaaaatttaaaagtatagatgtgtgttgtattgtctgaaaaccaaaacaaaagcaagaattactggtgataataccacctagaaataaatgtcttcctattttttatatagttgtcaaatgttatatatttcacatggttgagaatatgttaataaaaatcattcctttaccttttcccactttgtattacaaaggaaacacctctccaatgtttaaaaaaatactcaatgtaagagatgcgggttataaatacacttctgtgcatgtaaataacatttagagaacctagatgaagatgagataaagagggcttcatggcagctagtgagggccaattactggtctcctatgagaaaaggataagctatttgggtttagtaggagtttcagatgtggagtaaattatatgtttcttcaatttccaaaaattgctgcttgggcttcatagagcatgaggggaaatttcatgtgacgatggagtcagggcagtggcaaaagaagcactttccatagtgttagtaataaaacaagcaaaagaggagcctctgggaaagggcaaaccatgcccttggcacaaaatacatccgacgactgatcatctcaagttgacatccccatgtaacatttaaatgggataaggggtgattcacaaccttttatactctgacttccccttggagtccctcacggaggctgggtaaaagaaactgcttttaaaacgagctattcattaatgctgtaatttgtaaaatgtattatgccacacttcagacatacaaaatgtgtgaaagttatataacaagcacctttgtacacactacttagcttaagaaataaaccttattaatataggccagatatacatgagcacctactacgtgctgttttaggtactggggatacagcagtgaaccaaagaggcaaaaatttctgccctcaaggattgtacattctagggacagttaaagtctcctgtgtacacggttgccagaagaaaaaatactaagcacgtgttcatcgtttatctaaaattcggtttaatggtgctccactttcgtgcgcggccctacctgtgtaccccttgcagattgcacccctgcccttcctcaccgccagcccatcaaaatcaatcttccctcgtagtgttacctctttttcaccagatcctccatcctacttctcttgattggtacagtactgttttcattaattcaaaacattttaggccagatggggtggcgcagacgtgtaatcccaacactttggaaggccgaggagggaggattgcttgaggccaggagttcaagaccggtgtggggaacatagccagactccatctctacaaaaaaaaatttttttaaattagccaggcatagtggtatgcacctgtagtcccagctactcaggaggctgaggtgggaggattgcttgagcccagtagtctgaggctgcagtgagttatgatggtaccactgcactccagcctgggtgacagagccagaccctatctctaaagcaaaaaacaaaaaacattttattatggtactgctaacagtactgcagcgtcttttgttaaggaggtaagagcatcataaattgctcttgactgttctctcatagccagctaggaagtaaatggtgattgttggttaggaaaatagctgtgtttctttggggtgtagggatgaggcagtctgctttttccccaagtttctgaatcatgttgtaaactgaatgcactgattgatacctctctaaacactaatgttgtgaaactttaattagagcttagatatgctttagaagccaaataacaagtggcttatttgtgaaagaaagataataatagctatcctaccttcttcacaaggtggttgtgcagggaaaaaaagaatagctgtaaaaacactttttaaaacacaaagtgctggtcatatgtcaggggatagcaccattccccttgttctcttgtccttgtcatgagccgctgatcaggaaacatcccaggtaccctcatgtcaggccctgctggacgccatgatattggggccagagttgtattaacatcctcattaaacccagttaaatgacataaatggatgagcactgggaggtgactttttatgcctgctcttatcatctttatttttgctactagttgccttccccaattgattatagcttttccctcatgctctttctttttttgcagcctggatatatattttttcagacagatacatatttatttattaaagatgcttattgaattgcattaaaatgttatttaggctgggcacggtggcttacgcctgtaattccagcactttgggaggccgatgcaggtggatcacctgaggtcaggagctcgagaccagcctggccaacatggtgaaaacccgtctctactaaaaatataaaaactagctgggtgtggtggtgggcgcctgtaattccagctactcgggaggctgaggcaggagaattgcttgaacccgggagacgaaggttgcagtgtcccgacacagtgctactgcactccagcctccatgacaaagtgagactccgtctcaaaaaaaaaaaaagaaaagttatttaaattaatgataacataaaatttgacaggaaaccagaagagaagaattactcaaaattccacactaggtcttatttttagtatttatttttcatgcttttcaggctaacaaacttaaacacagtttcaataagcttttataatttggatatcagctcttgactttaacattctttgcatttttccaagtcttcatggaaaatagttttcaaattattattttcaatgactgtataatattccttatggtgtttctaccagttgaagtattctttttttgtttggatgtttggactgcttccacattttccctatggtagatgatgttgcagagaacatcttccctggtcatttttctcctccttttttattatttcccaacaatttcaaagaagcaggatgactgggttaaagggcacaatgttttcatggctttagtaactgttgtggggcttgaatctcgttatcttggtcagttatttggctccagcttttgtctctatgctgatcttaaatgagtacaaaggccactgataagaccgggtcagccagacagagccaggctcatggcagggtaggcagaatgctgcagtgcggtgcaccccactctcgcttgtgtaaatatttttctgggcaggagcgtttctcaaacagaactctgagcccactgcggtgaacctgatagcaggaattacgtgctatttgtcaagtataagactagtttgcagtgactggtctggctagaacccacctggtgttttctgagatcatctgtaaggaaacacacagcacagcagaggcagtgtgcgcccgtggtggtgagtcttagacctgtcatctgtgttagcattaccccgaaggcagagagtttgctgattagaaactatggctgctttaattcatgggtaccctccgtgacttttcagggtctcctggttgaatgaatttgcagaaggattaaaatgtgtgttcttatttgtgctttgtattctcccataagtagtgtgttggaggctattagaatagctgagagggtaaaacataaacacataggtaggagcctgacataaacacataggtaggagcctgccataagcacgtaggtaagaactaaaagggtgtgtttccatttcagttgtccagccttccttccatactctcagatgacaaaacacaagttgctgagctcacacagctaatgactaagccagaagttggacatggagaacatttttcctttgttcaaggttatttattatgttgacatttaaaatcagaagtgtgatatctgtgaagttctgattaaacagatcaagtgaaaaggatgtagttcagaaaactgcataaaaccctaaagtacagtgtttaaaaataaaacgtcctccctgatagggattatgttggtaagttactttttttcttagtatggattatttcaaattaataaacatattgttattcctttatttattgcatcatacagcttcatcctagtattagtgtgtttaataattgcatttaattagattatgcatttcaactttcaatgaaactgtagctgttagtcttttgaaggctaatttcacgctgaaatttatagatgaaataattttcttatagtggtggtgtttgagaagataatgtaactacttcttagatttcaatttcataacccttaaaatgttgggaccacctacaaatgggggacaccctgggttttgaagtcttgcctgtgtggttaatcagaacctcagaattcaccc

SEQ ID NO: 2568 - DNA, 6000 bp, Homo sapiens
cctgggttcaagtgattcttgtgcctcagcctcccacgcagctgggattacaggcccatgccatcacgcctggccaatttttgtatttttagtagagatgaggtttcaccatgttaaccaggctggggttgaactcatgacttcaggtgatctgcctacctcggcactttgggattacaggcatgagccaccgcacccagctgaaaatttaaaagtatagatgtgtgttgtattgtctgaaaaccaaaacaaaagcaagaattactggtgataataccacctagaaataaatgtcttcctattttttatatagttgtcaaatgttatatatttcacatggttgagaatatgttaataaaaatcattcctttaccttttcccactttgtattacaaaggaaacacctctccaatgtttaaaaaaatactcaatgtaagagatgcgggttataaatacacttctgtgcatgtaaataacatttagagaacctagatgaagatgagataaagagggcttcatggcagctagtgagggccaattactggtctcctatgagaaaaggataagctatttgggtttagtaggagtttcagatgtggagtaaattatatgtttcttcaatttccaaaaattgctgcttgggcttcatagagcatgaggggaaatttcatgtgacgatggagtcagggcagtggcaaaagaagcactttccatagtgttagtaataaaacaagcaaaagaggagcctctgggaaagggcaaaccatgcccttggcacaaaatacatccgacgactgatcatctcaagttgacatccccatgtaacatttaaatgggataaggggtgattcacaaccttttatactctgacttccccttggagtccctcacggaggctgggtaaaagaaactgcttttaaaacgagctattcattaatgctgtaatttgtaaaatgtattatgccacacttcagacatacaaaatgtgtgaaagttatataacaagcacctttgtacacactacttagcttaagaaataaaccttattaatataggccagatatacatgagcacctactacgtgctgttttaggtactggggatacagcagtgaaccaaagaggcaaaaatttctgccctcaaggattgtacattctagggacagttaaagtctcctgtgtacacggttgccagaagaaaaaatactaagcacgtgttcatcgtttatctaaaattcggtttaatggtgctccactttcgtgcgcggccctacctgtgtaccccttgcagattgcacccctgcccttcctcaccgccagcccatcaaaatcaatcttccctcgtagtgttacctctttttcaccagatcctccatcctacttctcttgattggtacagtactgttttcattaattcaaaacattttaggccagatggggtggcgcagacgtgtaatcccaacactttggaaggccgaggagggaggattgcttgaggccaggagttcaagaccggtgtggggaacatagccagactccatctctacaaaaaaaaatttttttaaattagccaggcatagtggtatgcacctgtagtcccagctactcaggaggctgaggtgggaggattgcttgagcccagtagtctgaggctgcagtgagttatgatggtaccactgcactccagcctgggtgacagagccagaccctatctctaaagcaaaaaacaaaaaacattttattatggtactgctaacagtactgcagcgtcttttgttaaggaggtaagagcatcataaattgctcttgactgttctctcatagccagctaggaagtaaatggtgattgttggttaggaaaatagctgtgtttctttggggtgtagggatgaggcagtctgctttttccccaagtttctgaatcatgttgtaaactgaatgcactgattgatacctctctaaacactaatgttgtgaaactttaattagagcttagatatgctttagaagccaaataacaagtggcttatttgtgaaagaaagataataatagctatcctaccttcttcacaaggtggttgtgcagggaaaaaaagaatagctgtaaaaacactttttaaaacacaaagtgctggtcatatgtcaggggatagcaccattccccttgttctcttgtccttgtcatgagccgctgatcaggaaacatcccaggtaccctcatgtcaggccctgctggacgccatgatattggggccagagttgtattaacatcctcattaaacccagttaaatgacataaatggatgagcactgggaggtgactttttatgcctgctcttatcatctttatttttgctactagttgccttccccaattgattatagcttttccctcatgctctttctttttttgcagcctggatatatattttttcagacagatacatatttatttattaaagatgcttattgaattgcattaaaatgttatttaggctgggcacggtggcttacgcctgtaattccagcactttgggaggccgatgcaggtggatcacctgaggtcaggagctcgagaccagcctggccaacatggtgaaaacccgtctctactaaaaatataaaaactagctgggtgtggtggtgggcgcctgtaattccagctactcgggaggctgaggcaggagaattgcttgaacccgggagacgaaggttgcagtgtcccgacacagtgctactgcactccagcctccatgacaaagtgagactccgtctcaaaaaaaaaaaaagaaaagttatttaaattaatgataacataaaatttgacaggaaaccagaagagaagaattactcaaaattccacactaggtcttatttttagtatttatttttcatgcttttcaggctaacaaacttaaacacagtttcaataagcttttataatttggatatcagctcttgactttaacattctttgcatttttccaagtcttcatggaaaatagttttcaaattattattttcaatgactgtataatattccttatggtgtttctaccagttgaagtattctttttttgtttggatgtttggactgcttccacattttccctatggtagatgatgttgcagagaacatcttccctggtcatttttctcctccttttttattatttcccaacaatttcaaagaagcaggatgactgggttaaagggcacaatgttttcatggctttagtaactgttgtggggcttgaatctcgttatcttggtcagttatttggctccagcttttgtctctatgctgatcttaaatgagtacaaaggccactgataagaccgggtcagccagacagagccaggctcatggcagggtaggcagaatgctgcagtgcggtgcaccccactctcgcttgtgtaaatatttttctgggcaggagcgtttctcaaacagaactctgagcccactgcggtgaacctgatagcaggaattacgtgctatttgtcaagtataagactagtttgcagtgactggtctggctagaacccacctggtgttttctgagatcatctgtaaggaaacacacagcacagcagaggcagtgtgcgcccgtggtggtgagtcttagacctgtcatctgtgttagcattaccccgaaggcagagagtttgctgattagaaactatggctgctttaattcatgggtaccctccgtgacttttcagggtctcctggttgaatgaatttgcagaaggattaaaatgtgtgttcttatttgtgctttgtattctcccataagtagtgtgttggaggctattagaatagctgagagggtaaaacataaacacataggtaggagcctgacataaacacataggtaggagcctgccataagcacgtaggtaagaactaaaagggtgtgtttccatttcagttgtccagccttccttccatactctcagatgacaaaacacaagttgctgagctcacacagctaatgactaagccagaagttggacatggagaacatttttcctttgttcaaggttatttattatgttgacatttaaaatcagaagtgtgatatctgtgaagttctgattaaacagatcaagtgaaaaggatgtagttcagaaaactgcataaaaccctaaagtacagtgtttaaaaataaaacgtcctccctgatagggattatgttggtaagttactttttttcttagtatggattatttcaaattaataaacatattgttattcctttatttattgcatcatacagcttcatcctagtattagtgtgtttaataattgcatttaattagattatgcatttcaactttcaatgaaactgtagctgttagtcttttgaaggctaatttcacgctgaaatttatagatgaaataattttcttatagtggtggtgtttgagaagataatgtaactacttcttagatttcaatttcataacccttaaaatgttgggaccacctacaaatgggggacaccctgggttttgaagtcttgcctgtgtggttaatcagaacctcagaattcacccagcccccggagaggttttgaaaagcccctggctcatcagagcttgcttgtttcataaactcttaaggctttgttttaacctgtagccagcttcgccttataagctttcttgccccaagccttgagccagtcataatggcttaagcatcagatttcagacaggcgattagctctccagctaagccaagaaaggatgatttatcttccagtgagtaccagcctatttgagtgtaggaaggagaaaaatctgtgctcctgctcctgggtactgggcaaagaaaccctttggttggggatttttgcctggtaccaactttataggtgccaacaagaaagaaagaaaaaaacacatacaaaataaacacccaacagggagattcgctgtgttaagaactcgagctgttgctattattctaagagactgggtagccagtcaaagggttaaaacagcccttcctacaaggatttgaaaactctgtgctctgctcttcctcagcagacttctcgttgtgagtattggcatttatttctgattatgcacttcccctctttcttgaatgagttgggtgggctagctgagcccatcaaaggtatagctcatttgcttccttttccagggtttgccttcttcctgtgtctgggataatttcagttcatctcctttgtgcagtttctgagaaaggtttgtatgggcttagaggaaaatgatcgtgactaaagctcacagtcaccgctttggctccttttctataaaaggtggtttgatttgatctggcatgaaaaatattatcataattctcaaattcacagaaacgataagttcttgctctttcctgaccaaaaaaaaaaattaattgcattgggtagacttctctaataaaacctttaaggagacccatccaggaaatcagattttataagattcattcaaacagttgtagaaattctaagttcaaaaaccaaaagcagactcttttctttttccttccttggcttctctgttggatatttttggagtgagccttaactgagttactcatttccacatgctttaggaaaagtatgctcatgttttacaggctaagcctggttctgcttttgagctgcagttcattatgaatccggaaaacacaggtttttgaaatgcggcccatttgtacatatagcattagtcatctcagctggtagttctatacgatgagttatctcaccacttaaaaataagtacgctgctattttgagatttaaaaatatatatagtgaccagatttcttaccctagttaaagcaagccatggctgaaactcagattaaacaatattctataaaaatgagagaaggccactctaatcaacagatagaaaaacagaactatagacataagggagagctgtgctaagggacaaattgttggatttgtaggatttgttcgtatcctga

SEQ ID NO: 2569 - DNA, 6000 bp, Homo sapiens
ataaatggatgagcactgggaggtgactttttatgcctgctcttatcatctttatttttgctactagttgccttccccaattgattatagcttttccctcatgctctttctttttttgcagcctggatatatattttttcagacagatacatatttatttattaaagatgcttattgaattgcattaaaatgttatttaggctgggcacggtggcttacgcctgtaattccagcactttgggaggccgatgcaggtggatcacctgaggtcaggagctcgagaccagcctggccaacatggtgaaaacccgtctctactaaaaatataaaaactagctgggtgtggtggtgggcgcctgtaattccagctactcgggaggctgaggcaggagaattgcttgaacccgggagacgaaggttgcagtgtcccgacacagtgctactgcactccagcctccatgacaaagtgagactccgtctcaaaaaaaaaaaaagaaaagttatttaaattaatgataacataaaatttgacaggaaaccagaagagaagaattactcaaaattccacactaggtcttatttttagtatttatttttcatgcttttcaggctaacaaacttaaacacagtttcaataagcttttataatttggatatcagctcttgactttaacattctttgcatttttccaagtcttcatggaaaatagttttcaaattattattttcaatgactgtataatattccttatggtgtttctaccagttgaagtattctttttttgtttggatgtttggactgcttccacattttccctatggtagatgatgttgcagagaacatcttccctggtcatttttctcctccttttttattatttcccaacaatttcaaagaagcaggatgactgggttaaagggcacaatgttttcatggctttagtaactgttgtggggcttgaatctcgttatcttggtcagttatttggctccagcttttgtctctatgctgatcttaaatgagtacaaaggccactgataagaccgggtcagccagacagagccaggctcatggcagggtaggcagaatgctgcagtgcggtgcaccccactctcgcttgtgtaaatatttttctgggcaggagcgtttctcaaacagaactctgagcccactgcggtgaacctgatagcaggaattacgtgctatttgtcaagtataagactagtttgcagtgactggtctggctagaacccacctggtgttttctgagatcatctgtaaggaaacacacagcacagcagaggcagtgtgcgcccgtggtggtgagtcttagacctgtcatctgtgttagcattaccccgaaggcagagagtttgctgattagaaactatggctgctttaattcatgggtaccctccgtgacttttcagggtctcctggttgaatgaatttgcagaaggattaaaatgtgtgttcttatttgtgctttgtattctcccataagtagtgtgttggaggctattagaatagctgagagggtaaaacataaacacataggtaggagcctgacataaacacataggtaggagcctgccataagcacgtaggtaagaactaaaagggtgtgtttccatttcagttgtccagccttccttccatactctcagatgacaaaacacaagttgctgagctcacacagctaatgactaagccagaagttggacatggagaacatttttcctttgttcaaggttatttattatgttgacatttaaaatcagaagtgtgatatctgtgaagttctgattaaacagatcaagtgaaaaggatgtagttcagaaaactgcataaaaccctaaagtacagtgtttaaaaataaaacgtcctccctgatagggattatgttggtaagttactttttttcttagtatggattatttcaaattaataaacatattgttattcctttatttattgcatcatacagcttcatcctagtattagtgtgtttaataattgcatttaattagattatgcatttcaactttcaatgaaactgtagctgttagtcttttgaaggctaatttcacgctgaaatttatagatgaaataattttcttatagtggtggtgtttgagaagataatgtaactacttcttagatttcaatttcataacccttaaaatgttgggaccacctacaaatgggggacaccctgggttttgaagtcttgcctgtgtggttaatcagaacctcagaattcacccagcccccggagaggttttgaaaagcccctggctcatcagagcttgcttgtttcataaactcttaaggctttgttttaacctgtagccagcttcgccttataagctttcttgccccaagccttgagccagtcataatggcttaagcatcagatttcagacaggcgattagctctccagctaagccaagaaaggatgatttatcttccagtgagtaccagcctatttgagtgtaggaaggagaaaaatctgtgctcctgctcctgggtactgggcaaagaaaccctttggttggggatttttgcctggtaccaactttataggtgccaacaagaaagaaagaaaaaaacacatacaaaataaacacccaacagggagattcgctgtgttaagaactcgagctgttgctattattctaagagactgggtagccagtcaaagggttaaaacagcccttcctacaaggatttgaaaactctgtgctctgctcttcctcagcagacttctcgttgtgagtattggcatttatttctgattatgcacttcccctctttcttgaatgagttgggtgggctagctgagcccatcaaaggtatagctcatttgcttccttttccagggtttgccttcttcctgtgtctgggataatttcagttcatctcctttgtgcagtttctgagaaaggtttgtatgggcttagaggaaaatgatcgtgactaaagctcacagtcaccgctttggctccttttctataaaaggtggtttgatttgatctggcatgaaaaatattatcataattctcaaattcacagaaacgataagttcttgctctttcctgaccaaaaaaaaaaattaattgcattgggtagacttctctaataaaacctttaaggagacccatccaggaaatcagattttataagattcattcaaacagttgtagaaattctaagttcaaaaaccaaaagcagactcttttctttttccttccttggcttctctgttggatatttttggagtgagccttaactgagttactcatttccacatgctttaggaaaagtatgctcatgttttacaggctaagcctggttctgcttttgagctgcagttcattatgaatccggaaaacacaggtttttgaaatgcggcccatttgtacatatagcattagtcatctcagctggtagttctatacgatgagttatctcaccacttaaaaataagtacgctgctattttgagatttaaaaatatatatagtgaccagatttcttaccctagttaaagcaagccatggctgaaactcagattaaacaatattctataaaaatgagagaaggccactctaatcaacagatagaaaaacagaactatagacataagggagagctgtgctaagggacaaattgttggatttgtaggatttgttcgtatcctgaaagttaaatctttgtactcttaccttgtttatggccagatttgcctgatccctgatttccctcccaactggatcagaggttgtggaattggaatttcaccatacaaacctttacttaaaggaggtagtactagagtaaccatttatgggaacagtttgctactaatagttactagtactgagtttattttagttcctttttcatgattttattccattggaaaagttttctctcagggatcttttctactttggacatgatctctgttaggcagaatcaaaagatagctgtgtggctttctgaatttagtctcacaatatttggtttagttgataaatcccatccatcagctttgcaaataattttgtgaaaacattgattcagcttgtcctgcccaattttcccatccctgcccagtttactgagtgccttttccatttgcatccactgtccattaggccaaggcgtttgaagtgtttctgtacagcaggtacatttaagactctccaggaagaaagggggaagaatattccaaactgaaaacatcaaagagagagatggggtatttccagtaacttatatgcccagtgcttaatatcttaaaaaccctactcatgtgcatcagctcttacttttttctaactaaaaccagaaaaaagttctctcttcctctgttctcagtatccccctcatgtaagtctgtctacccaacacggtgcagccgatttatttatttttccctcagcatttttaggtggattgactgggatgctttattcaactcagggacgcaccacgaatatgttttttggggcaacccgtttggcatgttccccctcagctgtgaggacaaagactggtttgtcttcttgtgacctggcagaggaggcagaagtacctgctgagcttatgcagcatgtaccccaaccggtgccccacctcttcaagtggtgaatcagcctgatgatacactgatttttagaacacgctagggtggagacctggaagtctgtacactggtcggggagggagggatggtttgcatgtcaaaccatttcaacaatgcagcttacaggaaaaaaaaattaattgcaaaacactgtgatgccctttgccaccagatttttccattagcaccacactttatacagcttccaagtctgccccagggacaactgtttggcagtgtgaggggaaatggcagcatcacgtcataagtgcaatgattgttacctatgagcctatccggtaagggatctgagtgggcccaagcatcacacacgtgctggagctgagtgttctctgaggaacatgctaggatgttacttgggtgctagaaaacagcagctggaattcacaacacctcaggacactgattgtaaatgaagaatcctgagactaaacatcttctagaaaggtaaagggggcttagggctgggggcttttcctctgggctcttatcctttggtatgttgtccctggatgctttgagatgagactttgcagatactgctgaatttcttttcttttctttttttttaatactgctgcatttcaattggggtgttgtttggggactactggaaggaatgttatgaaactccatagaaatacttcaattcagtgagttcattcattcagtggctcacttttaaatgaccatacagatgtatttggcagaatacatctttgccattttccttctttgtgtaatggaccagccccgaggctgcgagcattggtccttctttgcctttttctccctgctttgtggttttgtgtatgtaaggatggctggcaagattaaggatcattgagctttgtattttctgttatttttctgtctccccaaacattttcactttcacaaactttaatctctaactattattcccttatcttaactctgaacttttgttttggacttattttgtctgaaatcatggtctatttccgtttcttcagttcttgtgtctgtaaaaatcacagtaggccttaccggaggtccatgactacaggtactcagagaccagctgtatccaaagagttgtgtaagataggggcatctgctccctcccagtgctgttgcccagccccaccctgccctgttccccagttagtgtctttgctttcttgacctggatatctttcccatatctattaatataagcccttcttatccttcaagtcttgctgcctctcttacctctcccaacaggcattctcagatactcccaatgggagttcctctcttcctcttctttattccttttattctgttattattctattat

SEQ ID NO: 2570 - DNA, 6000 bp, Homo sapiens
tgtcaggggccatttggaaagttcttcctggctgccatggcctttcattgctttttgtggcatgttagcagcacaaccagatagggaggaggtggtactccagttggttccttttgtctcaggcttattctctggtgcagcttggtgggctggttgcaaccgtaggtaagaacctgagctggtagcccctgggggtatggctggctggcctgctttccttctttcccactgttttcttgggaaggtctctacagacctcacctcttttaggtgtgaggagataaatagtccttattatcccttatttacagccttcatagagtctttgtagtaatctaagttaaggtcttaatgttcttatttagttctgtgtccccccaattcatttggtattggcttttcttaatgctgatttcaaatcttggatgaaaatatattatgagaccatctcttctttagatgtgacaaaggtaataaccatggggcaatccagactgtgaagaaagcctaaggtgtagaaagcccatgcgacactagttttaagccttcacatgtgtttggggaaatgcgtttgttgaataaaggataagaagacagaagactttttatttttcttgtcttttaaggtaggaccatcagatagcatcgtcttcctaaagtcactctcctgacaagaatcagacccctctgccggggcacaccctcctcatgtggaaggcagggtggcctctccttggaaaatctcccctcatgttaagtcttctgagcggatcctgctaatccaggcatgtaaaggaggagtcctcatccaagacccaacatggtgcacacctcacaggaggaggaatggaaaagcaggcacctttgctggactttccttttaatcccctaaatcctgtcacaccctaagactatgaaagagatgggtggagaagagccttggtgctgtggaaagggccatacccactttctccctcattgcagctcacagtgtaggtctcacacccatcccaagcacctaaggggaggggtcggttaaagcagcacaatacagtatttgaactcttcaggggtttggggaagtccaatataacagaaataacccaggccctcagcgtggggtagcagagcatcctcctttcactctgtctctttctaaggcaaatactcataggtagagtttttgcaaggtaagcttacctgagccagaaagggtgggaggaatgtgagattgttttgattgttgtccttgggttttgttgttgctgttgttattgttgtttataagaactacaagaggctgggcacggtggctcatgcctgtaatcccagcactttgggaggctgaggtgggtggatcacctgaggtcaggagtttgagaccaggctggccaacatggtgaaaccccatctcttctaaaaatacaaaaaaaaaaaaaaaaaaaaaaactagctgggtgtgttggcaggcccctgtaatcccagctatttaggagactgaggcaggagaattggttgaacccgggaggcagaggttgcagtgagccgagatcccgccattgtactccagcctgggtgacggagcgagactctgtctcaaaaaaaagaaaaaaaaaaaaaaggctacaagagagaatgtccctagtttatggcttttcagtaccaaaatagtatgcattcagcagtagagtaagcagtagcagtagaatagcaccatgcttatgcatgacataagcttcatctgtaaaaggctgaagtaatcataccttgctgtagggttgttgtgaggattaaatgagttcgtgtatgtataaggcacctgcagcagtggagtccagaagaattgtgcacagtgggtggtggggaaagatgagggcagggaacattgggggaggaaagtaaattcaatggatgtcaggaaataggcatcttgacctgtccacagtgtaattcaggccaccactcactacttaatttaactttgttcttatctctagactaatggagcaggctctctgggggaaaagtgttgctgcagtaatcctgttaagtgtaagaactgaaggttcaggttgaagtctcaaagttccaaagccaccatcccagggataaagactgtgctggtatacgctcagccagcctggtaccacagaaggcttttgtctccagcaggttccttttctcactgggcgtcaccttttctggctactctccgcctgtcagaggccaagccttgagtatatcttcatcttcccacatcttacttggcttctttctttgtatgtatattgaaagagtaaaggcagataggtgtgtgtttctctcttcagtgggaacctttgtgactgatggtttccaggcagaagaggttcaaatttttaattgtttcccttcccaacccttgtcatcgtctgataaaggactaggcatttatttgcatacaatgactttttctggtggacctcaccttcacagaagcacagaggcaaacacccatagggtcagatacaagctactttagcaaaatgattgactttgactgctttatgtaatctaaactcttaccagaacacaatatttatgaatgtagcagatttttttttttgcaggatcaagaaacactacattcagtactttattcgtttaacttttaagaacaagtcttttgatagttttaaaattgtatgtgtgtgtgtgtatatatatatatatttatttattattattttttttaatagagacaaggtctcactattttgcttaggctggtctcaaactcctgagctcaagtgatcctcctgccttggcctcccaaagtgctaggattgcgggcatgagccactgcacccagccgatattaaatcttagtttggaatataataatgtaactaaataataccagaatttttttttttttttttttgagaccagagtctcactctgtcacccaggctggagtacagtagcatgatcatagctcactgcagcctcaacctcccaggctcaagtaatcctcccagtctcagctcccgagaaactgagactacaggggcaagccagcacacctagctaattttttttttttttttggtagagacagagtgtcactgtgtcatccaggctggtctcaaactcctgggctcaagtaatcctccttcctcagcttgccaaagaattgggattacacgcatgagccaccatgccccccaaaaagggttcttttaaatgccttcttcacctttgtctaagtacattgggtaaatgtggcactagttgaacaagatttactgaattttatcacagggcaggcaggcaaagccagttctaaacaataaaacagagatcaacaaagatgacggatgactctaaatagcctgttttgtaaaattcaaaacgggacagctgtgtagagagaggcacagttttataagaattcactggacctgcctagtttggctcatcttggtgcctgcacatgccctgccttattccatttactttccttctgtctcatctcctactggtgaccacagttactgatgggagaccttaaaggtgattatctttgagacacatactttcctgtgtgaagacacaaagattaaactctataagaccatggcacttatttgggcttggggcttggtttataccaaataaaccaacagattaaaaaataacaaactaaaaacaaagtttcaagtgccaggtattttgaaatagcagatccaaataatttcatattactttacacaacaagacctccattagtaagagatttgggttagattttttcttccttttttttttttttactttaaactttattgagctgttttacataccatagaattcacccattttaagtgtatggtttgataagttttagtatatgtggacagttgtatatccacaatccagttttagaacatacccataacactaaaaattctcttgaggtttatgttatcatttacttttgacagaaatgttttcttctgcttttgaaaaaaaaaaaaattctgggccatgtgtggtggttcatgcctgtaatcccagcactttgggaagccaaagctggaggacttcttgagctcaggcattcgagcccaacctgggcaacatagtaagaccccatcactacaagaaaaatacagaaattagctgagcatggtgtcgtgctactctggaggctgaggtgggaggatcacatgagcccaggaggttgaggctacagtgagctgtgattgcaccgctgtactccagcctaagtgacagagtgatacactatctcaaaaaagaactttttttttttttaggtaatgaatttaaatcattaggggaacataccattcttactaactttttgaaacaaaaacaaaggttgctcgaagatgttatgaataaaatgtttaagagtatgagggtacagagcaagggaaggaggcttgggcctatggtttacgaatggtgattgtttttagccttctaattatatgttgcattaaataagaagaaaccaaaaaggaaccacttgcctccattccagcctcggttcagcataaaactcaatcatttccttcacaagccagctgctgtgctatagctcaaattgtaacagagagcctttctctgcagtggagggttagggaaagagggagtaagtcagcacaaacaatgaggaaacatttgctgcctttctgatttcttcctagaattaacaggcttacagctgcatttctaggtcagcatttcatatgcctgaagagtatgaggatagtttgaaaaatcagaaggaagatgagagagggctttgcctcttttttaagatcttgctagcagttttgtttgttggtaatttttgctgtctcactgacgccaagagtcctggaattaaaccccgtggccagcaggctgttagttcgtcaggaaattccaaatgggtataaataaattctctgcaacagctcctgggctctttgcctgctaatgtgtggagtccctttaatgctgagggaagtttgcctgagacctggcttcctgctcgctgaaaatcacagttattttgtttctgggtgggtaagtaagaatgcccacaaaagaaagagaggaggagagcatgatgtttgggtgggggttggtgaaatataaactcgagctctgtgtgttgtgaaaaagatttgcttttacttcaagctagaaagaataacccagtacttgatttttggtccagtgaaaatttcagctttacctatggctttaacataaagatgtcattgttgcaggagtgaatggttgtacatatatatatgctaagatttgagtttttgagtttaaggtttagttcaattcaataatttccttttttgttgctaaatccatctttgggtatttgttttcagctctgtttttccaatagggagttgctcaatattcattaaagctggcttcttgtataaacactataaaacaaaataaggacagggattcatacaaatactagctttccactaccaccccacctccccctggccaaaaaactgtaatgttttgttagaaaagcctgttttatccctaagttagccagtgctccttttctgcttttcacagaattactctctgaactggcacatttcttttttacgcttagaacagcatgttacttttgaagaaagtttggaaaataacagtccaagctcattctcttctgtgcatgcatgattgatttgggctgtatttcagcaacaacttttaaaatgagacagtggacattagagagcagcatagttggggttgcacttaggagcccatggcattttggctgttttgagacagatttggggtaaagagttgctgcatcttgtagttggcactgaacactggagaagagggccactgtataaaccgcaaggcccctgttaccatcacatgcctccctagcacaatgtgccctttattaagacaggccgttccactactgagaatagtaaccctttccgc

SEQ ID NO: 2571 - DNA, 6000 bp, Homo sapiens
tttattcgtttaacttttaagaacaagtcttttgatagttttaaaattgtatgtgtgtgtgtgtatatatatatatatttatttattattattttttttaatagagacaaggtctcactattttgcttaggctggtctcaaactcctgagctcaagtgatcctcctgccttggcctcccaaagtgctaggattgcgggcatgagccactgcacccagccgatattaaatcttagtttggaatataataatgtaactaaataataccagaatttttttttttttttttttgagaccagagtctcactctgtcacccaggctggagtacagtagcatgatcatagctcactgcagcctcaacctcccaggctcaagtaatcctcccagtctcagctcccgagaaactgagactacaggggcaagccagcacacctagctaattttttttttttttttggtagagacagagtgtcactgtgtcatccaggctggtctcaaactcctgggctcaagtaatcctccttcctcagcttgccaaagaattgggattacacgcatgagccaccatgccccccaaaaagggttcttttaaatgccttcttcacctttgtctaagtacattgggtaaatgtggcactagttgaacaagatttactgaattttatcacagggcaggcaggcaaagccagttctaaacaataaaacagagatcaacaaagatgacggatgactctaaatagcctgttttgtaaaattcaaaacgggacagctgtgtagagagaggcacagttttataagaattcactggacctgcctagtttggctcatcttggtgcctgcacatgccctgccttattccatttactttccttctgtctcatctcctactggtgaccacagttactgatgggagaccttaaaggtgattatctttgagacacatactttcctgtgtgaagacacaaagattaaactctataagaccatggcacttatttgggcttggggcttggtttataccaaataaaccaacagattaaaaaataacaaactaaaaacaaagtttcaagtgccaggtattttgaaatagcagatccaaataatttcatattactttacacaacaagacctccattagtaagagatttgggttagattttttcttccttttttttttttttactttaaactttattgagctgttttacataccatagaattcacccattttaagtgtatggtttgataagttttagtatatgtggacagttgtatatccacaatccagttttagaacatacccataacactaaaaattctcttgaggtttatgttatcatttacttttgacagaaatgttttcttctgcttttgaaaaaaaaaaaaattctgggccatgtgtggtggttcatgcctgtaatcccagcactttgggaagccaaagctggaggacttcttgagctcaggcattcgagcccaacctgggcaacatagtaagaccccatcactacaagaaaaatacagaaattagctgagcatggtgtcgtgctactctggaggctgaggtgggaggatcacatgagcccaggaggttgaggctacagtgagctgtgattgcaccgctgtactccagcctaagtgacagagtgatacactatctcaaaaaagaactttttttttttttaggtaatgaatttaaatcattaggggaacataccattcttactaactttttgaaacaaaaacaaaggttgctcgaagatgttatgaataaaatgtttaagagtatgagggtacagagcaagggaaggaggcttgggcctatggtttacgaatggtgattgtttttagccttctaattatatgttgcattaaataagaagaaaccaaaaaggaaccacttgcctccattccagcctcggttcagcataaaactcaatcatttccttcacaagccagctgctgtgctatagctcaaattgtaacagagagcctttctctgcagtggagggttagggaaagagggagtaagtcagcacaaacaatgaggaaacatttgctgcctttctgatttcttcctagaattaacaggcttacagctgcatttctaggtcagcatttcatatgcctgaagagtatgaggatagtttgaaaaatcagaaggaagatgagagagggctttgcctcttttttaagatcttgctagcagttttgtttgttggtaatttttgctgtctcactgacgccaagagtcctggaattaaaccccgtggccagcaggctgttagttcgtcaggaaattccaaatgggtataaataaattctctgcaacagctcctgggctctttgcctgctaatgtgtggagtccctttaatgctgagggaagtttgcctgagacctggcttcctgctcgctgaaaatcacagttattttgtttctgggtgggtaagtaagaatgcccacaaaagaaagagaggaggagagcatgatgtttgggtgggggttggtgaaatataaactcgagctctgtgtgttgtgaaaaagatttgcttttacttcaagctagaaagaataacccagtacttgatttttggtccagtgaaaatttcagctttacctatggctttaacataaagatgtcattgttgcaggagtgaatggttgtacatatatatatgctaagatttgagtttttgagtttaaggtttagttcaattcaataatttccttttttgttgctaaatccatctttgggtatttgttttcagctctgtttttccaatagggagttgctcaatattcattaaagctggcttcttgtataaacactataaaacaaaataaggacagggattcatacaaatactagctttccactaccaccccacctccccctggccaaaaaactgtaatgttttgttagaaaagcctgttttatccctaagttagccagtgctccttttctgcttttcacagaattactctctgaactggcacatttcttttttacgcttagaacagcatgttacttttgaagaaagtttggaaaataacagtccaagctcattctcttctgtgcatgcatgattgatttgggctgtatttcagcaacaacttttaaaatgagacagtggacattagagagcagcatagttggggttgcacttaggagcccatggcattttggctgttttgagacagatttggggtaaagagttgctgcatcttgtagttggcactgaacactggagaagagggccactgtataaaccgcaaggcccctgttaccatcacatgcctccctagcacaatgtgccctttattaagacaggccgttccactactgagaatagtaaccctttccgctgtcttcccctcactcttacgtgcagcctggcttctggcctcttaacccatgcccagagtagaattggcaatacccaggagggacactgcactggggattgttaggtcatgccagttaggatgcagctggaaaggtgctgctgagtgggacgtgcagaggggaagactgcaggctctgtctgcctgagctcatctggtctgacacctgccgtgattcatttttcttcatgccatgttaagaaattttgtatcaagtctagtcgacagttactcatagcctggaagcaactttggaaatcagagttccactgacccccctcattttaagggtatgaatcacatcactgcattgtatgattccagggctctcttgcccatggctcgtgcatgaactaggaagtgatcatagttcctgttcttgttttatgaaaacaatagtataccttcccccaacctaggcaggccattcaggacgactaccctggaggtgctctgggtggcttaaagcaccgtctttgcacagtgtgttagagagcactgtgccctgaggacttcgggagagctgcagaatgagtgttcagaataatcggcactcacctttgccctcatgttgtgagatggagatattttaacctggccataatatgctttaaaagttggggggtgtttgtctgcttttgcttttatttccttcctgtgctggactgggactcccccttatctaactggtacataccactctgcccaagcagtgcgtgtgcacacacacatcccctacagctccctgctggcatctccttcatacactcttaagaagaagaaaccaatgtagaactcaagattttagcagacttacttggtcttgaacaagtatcacaaataccttaaaccctgacttcgtgggggggggggcaaggtatagaggaggaagggttctggatcctctctggggggccagggttgtgttcttctccagacaacagagggtgatccagtaccactagtagtgacaatagaacccacccattgttctaagtgacaacacactgatgcaggtactattattttctcaaacaattggaatatagtctaatttgccgacagctgcaaagcagcagagccaggattcaaacccaggcagtctggccccagagtgcctgcttcaaatcactacatctcttcctctgttatacttattcatcagtagatgcctagatgtggggctttacacttcagcagatactaagagggccatgtaccaagcgccaagtactgaggaatacaaacataaatactgcttgagggccaggcgcggtggctcatgcctgtaatcccagcactttgggaagcccggctcacgaggccaggagatcgagaccatcctggctaacatggtgaaacgccgtctctactaaaaatacaaaaaattagccgggcgtggtggcgggcgcctgtagtcccagctactcgggaggctgaggcaggagaatggcgtgaacccgggaggcggagtttgcagggagccgagatcacgccactgcactccagcctgggtgacagagcgagactccgtctcaaaaaaaaaaaaaaaactgcttgacttctgcctcccctagacacttagagtctggtagagaaacacaggcatgtgcttgctaactgtaacacagttccgcgtatataggcaaagtgacttaggaaacaagagggaagaaggggaccagttattcccaggacagagcagttgagggtaagtagggctttacaaaaatgaggtatctgggttgggccctttaggacaatgcagctgattttgacagatgggagagtgtggggaagggtgtgctgggtagaggggatagaatgagcaaagatagataagcttgaaaatttctcagtacgttgaggtttggggtggggaggaacctgggaggtgctggattggggctaaattgttgacatttcgtgccacagaaaagagcttttaggctttcttctttaaagtggagctcctggcacatcactttgcaaggatagtgattgagaagttgtagacgtttccaggaatacctgaaacaaatgtaaaatttctcaaataatatgtaatacaggaaagcaaagccatctgcccctgaaaacaggctgcatatttgcagtatgagtaacagcagagtctgggctgtgctccctagtggcaggctgactgcactcgtgcaccctaaggacattgatgcacagatgaagaaaggaaagacagaaataaaatttatttttaaataattttaatcgtacataaaaagagctctcatgtcttcctcacccagactcagatttcccagtggttaacattttaccgtatttgttccatctgtgtgtgtgtgtgtgtgtgtgtgtgtgtctgtgtgtagaaatgcagttgtcatgtctttttggcctccttccatctgaaaagttctcgtttttacctttttttcatggccatgatggttttaaaaagagaggcctgacattctgtagaatgtgtttcaggcagggtccaggccatgccttcttggcaggacagtgcaaaagtgatgctctgctcttccccatgcagatacatgatgtcaactttgatcacctggtcgaggtggt

SEQ ID NO: 2572 - DNA, 6000 bp, Homo sapiens
cgctggtataaattctggcaatgccagctgtcatgtagctgtttgcttcacttctgcctttaattacttttctatgcaccccatccccactagactgtgagccttgtgagaacagagactttgtccattttgttcggtgcccccagctccgagaacagtgcatggtaaatagtaagtgaagatccatagaaaactagagagatagagaaagagagacagagacagaaagcagaaattaattcatgtgcctttattatcaatatcaattataaatgtaagtcgaatgtgtgaataaatgttttattcggtctgcacttcccactgggtattataacattttaactggtcctattgaatgtagcctctttccctacgtcagtctcacgcacgcacaattgtcaagacgatctttgttgatgccttttagcccctagtttcagtggaaaaacttgccctgctccaggatgtgagattggtggcctctcctgtactcatcttcttccccttgtctaaccttggcattccttcagcagcaccaacaggttctgtcctggctcttcacctttttactctggtcatttaccttgtcttcagaactcatctctcgttaactcggttctgttttgatcactagtttacatactttcatactgcattgtgttttggttttttggagtgggggcggggttgttgttttttggggttttttcagacggagtctctctctgttgcccaggctggaatgcggtggtgcaatctcggttcactgtagcctccgcctcccaggttcaagcgattctcctgcctcagcctcccaagtagctgggtttacaggcatgtgccaccacacccagctaatttttgtattttcagtagagacagggtttcaccatgttggccaggctggtctcgaactcctgatctcaagtgaactgcccaccctggcctcccaaagtgctgggattacaggcatgagtctccactcatggcctgcattgttgatatatgcctttgtcactgatctcaattagtgttaagggtgtttggtagtcatctctcagctagactatatctgattttatttcttaaaaatttttcctcttactccttccactgaataggaccattttctgtagccaattaagctttcaataaatgtttatataatgaaagtagaggtggtgccaggagcagtctccaccactggatttccagacattcaaaaaatttttgtaaacaccagggacagccctccaattccagaatatttagttggaagctattactctcaggatttcagttgcagatatagccagtggaattttgactgtgcaaaagcaggcatagttctgttagtccaaaaaggcttagttaagagtctctttataacccaggtagatttttttttttaaactgctcttttttttttgagacggagtcttgctctgtcacccaggctggaatgcagtggcgtgatcttgacacactgcaacctccacctctctggttcaagcaattcccctgcctcagcctcctgaatagctgggattacaggtgcacaccaccatgcccagctaaattttttgcatttttagtagagacctggtttcaccatgttggacagactggtcttgaactcctgacctcaggcaatctgcccacctcggcctcccaaagtgctgggattacaggcgtgagccactgtgcccggccaaaactgttgtttttatacttcctcttgatcctgaattaataatttaagttttattgtaacacttttccagttaataatttagcgtctttctcctttttaagatctagtcttaatttttgagagggaaagggggaagaactgtagtacctgttagaattcagtgtaactccaagtaaacaagacccaaaacaaacgatagctaaaacaaaatagacctttatatctttttcacttaaaagtatagaggtaggctttttagaaatgttatagtagctctgatccacaaagtcctttgaggcccaagttccttctagtacatcgttcctccacccctagatatgaactcatgtttcaaagttacactagtgttctagtcatcacatctgcattccaggcagcaggatggaggaaggcacaaagaagaacataggtgaaaggattatttctgtgtttcttaatggaggttcctggggtatactacatgacacttctgcttacagacttttatttgcccctattagtgtggaaggaggggataatgcatactaaagaacatcaagctgtctttgccatggccacccctattcattcacctcccaagtgaactttctcattttattgcagtcaattccatttgccttccaaacagagacttcttgtaatatattttaagacaaatgcccaggccaggtatagtggcttacacctgtaattccagcatgttgagaggctgaggtgggaggattgcttgaggccaggagttcaagaccagcctgagcaaaatagcaagaactcatctctattaaaaataattttaaaaaattaaaattagccaggcgtggtgctacatacctatagttcccagctactcaggaagctgaggcgggaggatcacttgagcccaggagatagagactatagtgagccatgatcgcaccacgtcactccagcctgggcaacagagtcggaccctgtctcaaaaaaaaaaaaaaaaaaaaaaaaagagcaatacccacgtgttgtaaaaattataaaatataaagaataaaaatcatctataattccacaacctaaagataacaactgaaacaatatcatggaagaaatgtccttaacactaatatttaacgaacaacttctgtcttcagagcatcaagatgtttttcaaagtttattatcttattctgttggccaggcacagtggctcacagctgtaatcccagcactttgggaggccgaggcaggcagattacctgaggtcaggagtttgagaccagcctggccaacatagtgaaaccccatctctactaaaaatacaaaaagtagctgggcgtggtggcacacgcctgtaatcccagctcctcgggaggacgaggcaggagaatcccttgaaccagggaggtggaggttgcagtgagccaagatggcgccactgcactctagcaagtttattatgttatactatatattcagttatttattccttcagtaaacgttgtcagacatctcctttcttcccagcatgttgataattggtgtgtggttgggagaggaagcaatgaaaaaaaaaatgtatattttttttgggggggtgggggcggagatgaagttttgctcttgttgcccaggctggagtgcaatgtgtgtgatcttggctcactgcaaccttcacctcccaggttcaagcgattctcctgcctcagcctcccaagtagctgggattacaggtgcccgccactatgcttgggtaattttttatatttttagtggagatggggtttcaccatgttggccaggttggtctcgagctcctgaccttcaagtgatccaccctcctcggtctcccaaagtgctgggattacaggcatgagccagcgtgctctccaaaaaaaattttttttaattaagttttttgctctctgggtgcttatagtctggtacaaaagacaaaaaagtgttttcgtcttgttaaagttgggaaataaatcagggactcataagtgcctaatttatgttgatgtatgtaaacatacactagaaaacaggatattaaaaaaataatgacaccgggtagttttattgtagaataatttttaccatggacaattgtttgtgaaaatgacaccttgaaaacacatcttacttttttacttgctggagaatgaaacttgaattacaagtcctttgggtagcctggtttgagcagtattaggaaataagcaagcctaacttagttaaattctaacctcttctgattcccagaagtccaaagttcatttgggggtaatacaacgtgatacatgctttttgtgatttctacaaggtgaactaaagaaataactaaagatggaccagttaggttttggtaaaaactgtgataagttttgttgtgttttaaatactgatgttgagtcagttcatctttcctactgaaaatccttaagtgggaaaagtatagaaaaagtaggagttacaccaaaatattaacgcttgccacttgatggtaggatctgagtgccctttttttacgttctttaaattatctgtatgtggcttttttttttttttaatgttttacaagcatgtactactttcgtatctggaaaaaggtttgtttttctttcattttttaagaagaacttttcatcagtggcaaaggctcagttgaaattaatgataaaggataactacttgccacgtgtcataagcccagggctgagaagagtcaggcagtgctctggaaccagtgagtgctgcccggatcctgagaacccgcagagaacagtggggctgattgtgcctctgcacctcctcaggtgaccgagggctgggcaggaggacacagactctttcatgaagcagtgactagtataggaaaaacagagcctctctgtagagatgcttaaagtgctagctttatttaaaaatcagctggcaaagcgggagtgaagaacacacattttcagaagataccggtttcctgttttcattaagaaaacagggaatgcggaacagctgagtgcggcgggggtggtgtcactgcagccggagggagacctcgccggtgaaagctcagcctatggcatccgagcgtggccggccaagtttacacgaatgttgaaacttctcctcacggggtgaggatcgagggcgcccgaggccgggtccggctgagctggagcgagctgtgcggggcagcgcgggctggcggggagcgcggcgggcgccacgtggtaggtgagctgcgagcggcgtggggcggccaccgctggccgaattccggggggcctgggcgaggggggccggccgggaaggtgcgcactgctgggccgcttcactccaccgcaggcctacgggagtccagcttagacccgccggctcccacacacacatcccgggaggcccggatcagcctgcctgacagccaagctgcagcttctctcctgttaatggagtttcagacagtcctggagacaggtctggctgctgcagcttctctcctgttaatggagtttcagacagtcctggagacaggtctggctgctgcagcttctctcctgttaatggagtttcagacattcctggagacaggtctggctgctgcagcttctctcctgttaatggagtttcagacagtcctggagacaggtctggctgctgcagcttctctcctgttaatggagtttcagacagtcctggagacaggtctggctgctgcagcttctctcctgttaatggagtttcagacattcctggagacaggtctggctgctgcagcttctctcctgttaatggagtttcagacagtcctggagacaggtctggctgctgcagcttctctcctgttaatggagtttcagacagtcctggagacaggtctggctgctgcagcttctctcctgttaatggagtttcagacagtcctggagacaggtctggctgctgcagcttctctcctgttaatggagtttcagacattcctggagacaggtctggctgctgcagcttctctcctgttaatggagtttcagacagtcctggagacaggtctggctgctgcagcttctctcctgttaatggagtttcagacagtcctggagacaggtctggctgctgcagcttctctcctgttaatggaatttcagacagtcctggagacaggtctggctgctgcagcttctctcctgttaatggaatttcagacagtcctggagacaggtctggctgctgcagcttctctcctgttaatggaatttcagacagtactggagacaggtctggctgca

SEQ ID NO: 2573 - DNA, 6000 bp, Homo sapiens
gagacaggtctggctgctgcagcttctctcctgttaatggagtttcagacattcctggagacaggtctggctgctgcagcttctctcctgttaatggagtttcagacagtcctggagacaggtctggctgctgcagcttctctcctgttaatggagtttcagacagtcctggagacaggtctggctgctgcagcttctctcctgttaatggagtttcagacattcctggagacaggtctggctgctgcagcttctctcctgttaatggagtttcagacagtcctggagacaggtctggctgctgcagcttctctcctgttaatggagtttcagacagtcctggagacaggtctggctgctgcagcttctctcctgttaatggagtttcagacagtcctggagacaggtctggctgctgcagcttctctcctgttaatggagtttcagacattcctggagacaggtctggctgctgcagcttctctcctgttaatggagtttcagacagtcctggagacaggtctggctgctgcagcttctctcctgttaatggagtttcagacagtcctggagacaggtctggctgctgcagcttctctcctgttaatggaatttcagacagtcctggagacaggtctggctgctgcagcttctctcctgttaatggaatttcagacagtcctggagacaggtctggctgctgcagcttctctcctgttaatggaatttcagacagtactggagacaggtctggctgcatattttgagtgatcaccttctccatgtggagatgaaagttaaaagggaaagagagaaggacagctacgttcttttaacacgagcacaagtttccaggcacagccctcccgaccagccctcccattcttaggctagagcatgactgctgctgggcacttctttcacatagaattcacttcccacacgtgttagaatcgaacagctagagcaatttaatattgttttaaattgggacgtaaggaatatacgtcctttttattcctctgcttggcaatcttatttttgtactttctttccaacatttgggaagaaagcgggcagatggaagcagaagtgttcttcacagcattcacactgtcgggtgtaaatgttcggcagtgctgggggttgggagggcagacagcaaccaggtttgctggaagttacttcaaactggacagcagtcaagtgggtttgtatactcaggagagggcagggagactgatggcttacattttcactcattgcttttgagttctttccatagctctaaaaatgcgcagcttattagcgtggctctgggaaaacaacacatgacctgatcctacaatttaaaaaaataaaaatgaccttgcttttaagtttgaaatgcatagcccaggtcagcgacaaggtctgcgctttgaaaggttcttgtgtttcctcttttaaatgtctggtttagccttaagtagtatttactgagtgccacatgatccagtggttggagtatgtaggttttgcccttatcttcattctttgcatctgtttgaactcatgacaatacaaaacaaggtgttcctgggatagggaatgttttgtccaaaaggagtcaacacggagaaaactcttcctacagttaagacagggtttggttttgtttttaaatgaggagagaaactgagaagtggaaaacacaaaatagagttgaagtctttcctctgtgtgcttctactcatgctgccagagttaatcactaaatatcccatgccccagctttctcagccggggaggtgccaaggcaaattgtaagcccatggaggtagtcaggagctgagtgcccttgacctccatttagaaaggcagcccagtctgcaaaagacagcagcagggacatctcatcccaggcctcctggttatgctgctgactttgtctgtctgctactgacttttagtttttttgtgtgcctcagataacactttgaaaaacaggaatcttaatgtctgctgtctatattccaagagactgtagatgaccaatgaaattatctactggacaatgctttcatgtcttttttttttttttttttaattgagacggagtttttgctctgttgcccaggctagaatgcaatggtgtgacctcgcctcactgcaacctccacctcctggattcaagcaattctcctgcctcagcctcccaagtaactgggattacaggcgcctgccaccatgcccagccaattttttatttttagtagggacgaggttttaccacgtgttggccaggctggtctcaaactcttgacctcaggtgatccacccgccttggcctcccaaagtgctgggattacaggagtgagcaccgtgcccagcctttcgtgtcttttataatgaattcttttaaaaatatttagtaaggacttactatgtgcttgtctcttaatcattatctctgagtactgatggacataaagatggaaaaagatggaaatagtagacattttagactacaaaagtggggaaagaggggagtgagggttgaaaaattacctattgagtacggtgtgcactatttgggtgatgtgtacactagaagctcaaagctcatcattacacaatatatccttgtaacaagcctgcacatgtactccctgaatctaacatacagttttaaaaaataatacaatcattatctcattacattgtttttaagcctgtgagttaaatatttgcatctccatttttactcagggagaaactgaagttaagagaggtttattaacttgcttacccaagccgggcgcagtggctcacgcctgtaatcccagcactttgggaggccaggttgggtggatcacctaaggtcaggagttcgagaccagcctggccaacatggtgaaaccctgtctctactaaaagtgtaaaaattagccaggcgtggtggtgcacccctgtaatcccagcaactcaggaggctgaggtaggagaattgcttgatcccaggagacggaggctgcagtgaaccgagatcatgccattgcagctccagcctgggtgacagaatgacctgtctcaaaaaaaaaaaaaacaaaaaaaaacaaaaaaaacttgcttacccagctgttgtagatccaggttcaaaacataggtgtgtcaactcttaaaatcataccagcttgctgtactgcaacaaacacaaatattagtttttaccattaggtgtattgcatgtcattataatattcttttctccctcttctaggaaaagcaggtgatattctcagtggagaccaggacaaggaacagaaagacccttactttgtggagaccccctatggttatcaactagacttagatttcctcaaatatgtggatgacatacagaagggaaataccatcaaaagactgaacatccagaagaggcggaagccgtccgtgccatgcccagaacccaggaccacatctggtcagcaaggtatatggacttccactgaatccctctcatcctccaacagtgatgacaacaagcagtgccccaacttcctcatagccagaagtcaagttacatcaactccaatctcaaagccacctccccctctggagacctcactcccttttcttaccatcccagaaaatcgacagctgccacctccctcaccacaactcccaaagcataaccttcatgtcaccaagacactgatggagacccggagaagactggaacaggagagagccaccatgcagatgacaccgggtgagttcagaaggcccaggctggccagttttggaggcatgggcaccacaagctccctcccttcttttgtgggttctggaaaccacaatcctgccaagcaccagcttcagaatggataccaaggtaatggggattatggtagctatgccccagctgctcccaccacttcctccatggggagctccatccgccacagccccctgagctcagggatctccaccccagtgaccaacgtgagccccatgcacctgcagcacatccgcgagcagatggccattgctctgaaacgcctgaaggagctggaggagcaggtgcgaaccatccctgtgctccaggtaaagatctctgtcttgcaagaagagaaaaggcagttggtctcacagctgaaaaaccaaagggctgcatcccagatcaatgtctgtggtgtgaggaagcggtcctatagtgcggggaacgcctcccagctggaacagctctcccgggcccgaagaagtggcggggaattatacattgactatgaggaggaagaaatggagaccgtagaacagagcacgcagaggataaaggagttccggcaacttacagcagacatgcaagccctggagcagaagatccaggacagcagctgtgaggcctcctcagagctcagggagaatggagagtgccggtctgtggctgtgggtgccgaggagaacatgaacgacatcgtcgtgtaccacagaggctccaggtcctgtaaggatgcagctgtagggacacttgttgagatgagaaattgtggggtcagcgtgacagaggccatgcttggagtgatgactgaagctgacaaagaaattgagctgcaacagcagaccatagaatccttgaaggaaaagatctatcgcctagaagtacagcttagagaaaccacccatgaccgggagatgactaaactgaaacaagagctgcaggctgctggatcgaggaaaaaggttgacaaagccacgatggcccagccgcttgttttcagtaaggtggtggaggcagtggtgcagaccagagaccaaatggtcggcagtcacatggacctggtggacacgtgtgttgggacctccgtggaaacaaacagtgtaggcatctcctgccagcctgaatgtaagaataaagtcgtagggcctgagctgcctatgaattggtggattgttaaggagagggtggaaatgcatgaccgatgtgctgggaggtctgtggaaatgtgtgacaagagtgtgagtgtggaagtcagcgtctgcgaaacaggcagcaacacagaggagtctgtgaacgacctcacactcctcaagacaaacttgaatctcaaagaagtgcggtctatcggttgtggagattgttctgttgacgtgaccgtctgctctccaaaggagtgcgcctcccggggcgtgaacactgaggctgttagccaggtggaagctgccgtcatggcagtgcctcgtactgcagaccaggacactagcacagatttggaacaggtgcaccagttcaccaacaccgagacggccaccctcatagagtcctgcaccaacacttgtctaagcactttggacaagcagaccagcacccagactgtggagacgcggacagtagctgtaggagaaggccgtgtcaaggacatcaactcctccaccaagacgcggtccattggtgttggaacgttgctttctggccattctgggtttgacaggccatcagctgtgaagaccaaagagtcaggtgtggggcagataaatattaacgacaactatctggttggtctcaaaatgaggactatagcttgtgggccaccacagttgactgtggggctgacagccagcagaaggagcgtgggggttggggatgaccctgtaggggaatctctggagaacccccagcctcaagctccacttggaatgatgactggcctggatcactacattgagcgtatccagaagctgctggcagaacagcagacactgctggctgagaactacagtgaactggcagaagctttcggggaacctcactcacagatgggctccctcaactctcagctcatcagcaccctgtcgtctatcaactctgtcatgaaatctgcaagcactgaagagctgaggaaccctgacttccagaaaaccagtctgggtaaaatcacaggtaggtggtaccctgaggacctgggaatgaggaaggatgggggaaaatgtctttccagaagctaaggattatttttt

SEQ ID NO: 2574 - DNA, 6000 bp, Homo sapiens
ggattacaggtgtgagccactgcgcctggccagcgctgtattataatagtgatctctgcatgaatatccaaaacaggagctggcaatttgagtatttctttacatatacacacttctcaagaattttccaggaatcttccaaggaaggaatcaaattgcaattgcacagcttttaacaatcttgaagtcatttgggatgtggacccacacatgggttctgtttcacccaactttattagagtttatgagtcagactcatgtttctctttggcttgtgctttcatttactggcatttgtaggctcaatgcttacataatgatgcaacacaagtccttccacaagggctgcccttgggctttttggactacatagtctttccatttaaaagtaatttctactcagaaaaaaacctaatttgctcctttgagtttcagctggctagctctatgtccatgggagtaataggcaaattatgacccaaagcaatttccaaggaattttatttattatccaaaataagaaagtagaagtgtatgattaagttccaagacttgtttaaaaagtgtctactggagctgggcgtggtggtacatgcctgtaatcccagccacttgagaggccgaagcaggaggatctcttgagcccaggagtttgagaccgacctaggtaacatagcaagaactgtttccaaaaataagtgtttactatgccagggcacaggattcagatcctgaagtcagcaatggctcaagatgaggctacttctgatatcattatatccactccttatctcctaccaaaatatacttctttctattcctttttcaccaccttctgcctttatttaaccttttcttttatccttgtttccattcattcattctctatccatttattcagcccacatttattgagtgtctactgtaagccaggtattgttctgagccatgtaagtacaagagtgaataagaaacaatctgtgctctcatggagcttacattctattggggtaagaaacataataactaagtgaacataaaataatagtatgatgaatagtagaaaggaaatatacaaggtggtaaaatagaacaggttgaagaagaaacgagaacttcatttagactcactggccagattggcctaagagtatgagatttggtctaagatctaagaagaaaagcatgaccactagcaagcctttcaaagtaagagaaaaggcaaagggaatagcaactcgaaagggccatgagttaggaaaggaactgccatgtttgaggaactgaaaggagtccaagagagattttggggtgggagagggcaaggaaggtgttagggagagggtttaagaaacgacattcagggccgggtgcagtggtgcacaccggtagtctcagcactttgggaggccgaggcggacggatcacctgaggtcaggagttcgagaccagcctggccaacatagtaaaaccccgtctctactaaaaatacaaaaatcagctgggtgtggtggtgcacatctgtaatcccagctactcgggaggctgaggtaggagaatcgcttgaacccaggaggtggaggttgccgtgagctgagatggcgccactgcagtccatgcactccagcctgggagacagagcgagactccatctcaaaaaaaaaaaagaaaggaatgacactcaggaattagggtgccactaggtttcacaggaactttatcaattatggcagagaatgtgattgcctaccttactgccacaaactcttcctccttgctaacagaactccagttttgtttaggtagcaatgcatccagctccagacaacaaatcataatttatgtaagccagttctggccaataagatataaggatttcactagaaggtttcgagaaatatctttattcttcatatgagagccacaagtgaataaagctgttttgcctccttctctgtcttcctgctttagcttctgccatattttgatgtgatgtccagagctgtagcagccatcctgcaaccatgatgtaagaagcctgaagatgaaagtaaacagatttaggatgctggggaggagggatagggattgaaagaacctgaatcttcctttccttttcctttccttcccttcccttcccctcccctcccctcccctccttttcctttcccttcctttcctttctttcttttgcgacacagtctcgctctgtcacccaggtggagtacaatgctgtgatctcagctcactgcaacctccacctcccgggtagctgggattacaggcatgcaccaccaggtctgcctaatttttgtattttcagtagagacggggttttgccatgttggccaggctagtctcgaactcctggcctcaagtgatccacccgccttggcctcacaaagtgctgggattacaggtgtaggctaccacgcctggcctgaacctgaatatttaatgacatcttcaaactgctaagcctatcctgggatcattctttttgttacatacacaataaatgtccttatagtttaggtttcttttagctgaggtttcagttatttgcattgaaagcatataattgatatagcaggggtgagacatgatatgatttatgtattttttaaaaatctctctggcaacagtatgaagagattgtaaggagcaagaatggaacagaagcatggaagactactgcagtagttctgagaagcaatcatagtgttctggcctagggagtatgcagtaaagcaggaaagaacatagattcaagatgtatttgggggtaaaaacagtaggacttgctgttggtatgagaggtaaaggagagggaggaactaaggctgaactctaggttttggactggatggtgatgccattgattgacacggagaagacccaaagaagtttggggaaggcggtgagatcaagggtttggatgtgttaaatttaagatgtgtatgaaccattaaaatgagatgacaaatcagcgggtagacatgagtctggagcacaggggtaaggtcaggacttggatttcaatttgagaattatagatacacagatgttatttaaagccacaggaataaacaggattctcctcactggccaaaatatgaggaactctaaagttagaggtcagctagaagggaagaagactgaggagaagtagtgaaagaggtaggagaaaaactaacagcattagcgtttatatagggcttactttatgccaggcactattcaaagcactttgtggcttcatggaagcaaagagaaaaatgtttttcttttcttcctccctttccagtctctcctgtgactttcacccctaaattcaaaaggtttaggtgcaaaagtgattctcagcttttatttgtaattaattttatagtaatcttgtactgttataatcttgtactgttataatactataattatagtatacattcattggaaaaatattcaaacagcacagtacagggaagctaaatgtggaaagtaaagatcctcagaagctttccttcctaggctcacccaccagaggtaatcattaacagtttcttgcatatcctccaggaatgttctgcgcaaacacacacacacacacacacacacacacacacacacacggacgcaaacaaataccatccctctctcttctctctctgtatacgtacgcatatgtttaattctgcaagttgctttgtttaaaactcaataccttttggaggtatttatatatcagcatattcagatacaatttactttttttaaaaagggtaatatgccattgtattaatattccatactttaagttcctctatcgatggacaattagaatgcttttttttttcttgccacacacacacaaaaattgctgccagaaatctttgtagtaaatctttggatattggtgcaaaaataattgttgcatactttcttagtggtgaaattgctgaatcaatccgctcaagcctctcatattgtcaaattactcctcctaaaaggttatactaatgacattctcacatcatttccttacatcttggtacacatttggtattaagcgacttcacaagtttgccagtctaaacacatggaaaaaaatggcgtcatgttgtttttatttgggtctctttatgagtagggcagcaagacctgattgttaaacgttcaagttttgaagttaaactccctgggtctggatcctacttcttccttgtaaaatgtgtgatctcgggcatgctgggtctacttcctcgtctcaaaaaaagaggataaagagagtacatatctttaggcttaaacaagatacgcaggcatacaggaagcccttcttatgcgttcgctactagcggtactgatcctaatttttttgaagccgtgccggctccggtactttatttttggtgtgctcctccaaccaaccaagtttcgcagaattctgttgttgcctgtaattagaaatgagacgaaaattggctccgcttgttcaaaattctcctccctccgccccaactctgccttagaatcactggtttaaatgtcaatgtaaaggaatgagttgcaatttttaagcaacatgtaaagtgcacacctggtctgagtacctcccggcggccaggacccgccgttttcggtatagggaacaccagataacaatatataacgctacctaacaaacgtttctccacccacagcgccattagcggttaggtttgcagtgccgaagagctgcaagaaaacggggcttgaaacaggaatacaattgcagatccacccactacacgcaaagggcccgggacgcgcctccacagccccgccccaaccggaagtgacgcaccgcgccgactatttcttccgccgtccgccggtggcgaggcccaggctgtcgccgggtgtgcagcggcgtcgcggccagtagagggattctgggtaacggcccggacccccggctgggcttctggctcggcgcagcaggttccattcacgccaagtctgttggcagtggcagttgtagggccaagggcggttgtaggacccggagcagccggacatggaacaaccgtggccgcctccgggaccctggagcctccctcgggccgagggtgaggctgaggaagagagtgacttcgacgtgttccccagttctccccgctgcccgcagctgccaggcggcggcgcccaggtgagaaggggcctgcgttctgcggagggatggagtggtgctgtcgccaaacccctggaatgccgcgtctcccagaccctcttctacgcctttttctacgcccacctcactgccaggggccggggacctgggacctgacgcctgatgccatcccaccccttttatggcatcttcggagggcagacggggtggccatatattaccaacctccacctccacgcacatgttttctttcgccttggctgattcctgttcactcttggaataccttcctccatctccccttcctgacagcactcagatttggggcggctcatgctgtaacattgaccctttgtcctcttgtgagaggttttccccaagcactttattctgttaaaggctctagcatacttgtgcacagttgctaggaacagtgaatgattgtagttcagcatcacactgagtcctgacaaagatttcacatgcgattttcaccgatgttgacaactgagtaaattctttaaatctcgcttttgacgctggcgtacacctctcccattcgcgtgaccatctttgccttactgttttgttttttagttttgcttcacgtcattctccagtgaaaatatatacgcatatacttgtgttttccttcagacttctcttaggttcctggtattgtgttttcaatccagcattcctgccttcctgcgactgaaacgtatccaaatgtgatatactattaaggatttttcagggacctatcttaggggatacttacatactcgcatcaccttgtcctgtttttttctccgaatccgtgtgtgttt

SEQ ID NO: 2575 - DNA, 6000 bp, Homo sapiens
cagcttactatgatgtctcccttactcctggttatttcagttgtgagtacgctgacactactagatctaacttaagtcaaaaggagaaatttgtcataaggaagtattttcaagatagaaaatgcatgaagttttggtggaccttataagaaagagggaactgaaaagctatggggacacatactgcgcacattctctctctcttctcttctgtggcattcttctctcctatagcaaatcagctttctgtgcaagaatgaagatggtaacctcatagtggcagccttaactttagagcatgggtaacctcatttcaagtgaacagaaaagtctgatttgctgtttttgaatcccaactccaaattccccaggagtgagactctgatggctcagcttggtccaatcaaggggttgtgggaagcagggtgtcacaaactagaacgtaggtgccagaggctggctactctgggtgaagaggacagttctcagcaaagaggacagaatccttagtctaaattaggactcaggaattaagtctctgagtctctgtaaactaacaattatgctagggatttatttttattttttattttattttattttattttttgagatgggagtcttgctctgttgcccaggctggagtgcagtagcatgatctcggctcactgcaacctccacctcccaggttcaagtgaatctcctgccgcagcctcctgagtagctgggactataggcacatgccaccatgcctggctaattttttgtatttttagtagagacagggtttcaccatgttagccaggagatcttgatctcctgaccttgtgatccacccacgctggactcccaaagtgctgggattacaggtgtgagccactgcgcctggccgaaattttgtttttaagagtgaatgctggcatgaatcctttcacacacacaaaaaatgtttttcgtgaataggcaactatatgtctaacagttttaagttaaattttttaaaagtagcacatagttataatggtcattttacatattttgccaaataattatcctcacttgaaagaggttattaattcttggcttacaaagggaaaactgttttggttttcaagcaccaaagtttaatacatccagttatctcaagggaatgagggatctgttcactggcaatatcttttttgttttccttttctttttgtgattgaaagtaaggataagggaactgatgtagagacaaggacatgctgaagtaccgaggaggtattggaaaatttctttgccatagccaaccaaattttggaataaatggtactaaaatatctggatgatttgtagtaaaaaaaacattgcttgcttgtctgtctacttgattaataccccttgcctttgtcttttggcttataatcctacatttggaataaataagcctctttccatattttattcctttctgccttcaggaaagtacatcttccctgttttggaaagaaacaaactaactcctggacttctccccagcccttcgtttgagcctgtttccctttccaaggactttcctgcatctttttttgtgctcacatttatgtccctccttaagaatgatgttttcagtctcatcatttaatgatatagttctgttttttaaaattcaaatggagatcttcacatttatctctattacaactcagcccttatcctaccagcccacacagtcctgtgtagtgcaataaactgtgacaaatacttcaatcttcctaataaaattcaacaaatttcttatacctcccagcttggttatatctgtaaattggtcctgccacagatataatagacatttgataactgtgctaagggttttaaaatactttttcacctaatcttcaaaatctctctacaggggagattattatcctcattatactgatgaggaaacagaggcttagaaaatctaaataaactttcctggcaaaagctgtgattgaaagaaacctgggtggtctggactcttaaagcgtaagttcttaaacccttggccatggattttcaaccgtggctttatgtcaaaccacctaaaaatgttaaaaagttatagaagccaatgcgccatctcacacttactgaggcagtcttgttggggtggggggaaggtttgggcatagcagtcaagaatcactgctgccatgctggccaacactggaaggacaaaacctcaagacactacacacagccccacagtcaacaactagctgttaagttttcccattagatcttgccacaaagttttgaatctaaatgtgttaccttacagctcatatttcttgtttcttcatattgtatgaatgttttgaaagacttggtcaaattccttggaattcttttcatcattatcaaagaataagggaaatttcctgaaatgtttgccttgagtagcaaatttctagtgatgccactaccaggaatcacataaagagctcaaaagttctgttaatacagagtgaaaaaagctcaacattccaggttagcattgacttaaaatcatgtcttagtgatgagggaggctttcactttctgaatgacaggaggcaagttgcttcatctttctatgtggggagacagaagatttctcaattctataggcttatgaataatataccccttgtccaccttgtcttccatacccacatctctaatattaagaaaataacctgctcccccacaaaaatatcctcaatattcaccacttccaaatggcttctccctgcaattcaccaatttcaaatggcttctccctgcaaacaggctgtggacagtaagagataccatgcctagttacataagtatatcactgcaaaatatagaaacatcacttataatgaaagtaatactgtttcagagttctaaaacaagcattttcttcccctcacaaaatatcacatttccatttccacagttgtgatgcttttcatttacccatgacgttaagctcatctttagctcttcttcattatgtgggtctgtgttctagcttttacctcagtagcagtttttgtttgcaggaaaaaaggaactcttttggtagtcactgtttgtaattgcggccttgatattctaagccattgagtcacaattaataattagaaattcttactaactttgcccatatattacctatgaagcagtagccgtaggaatgcaattttcctgtaaatccctccctcttatacagctctagttcattatttaaaagattcagggtgaattcaagtaatttcctatgctgctatcatttgcttaaagaccttttgcaatgggtcttatgtaagaagaaatgcaggagttgctttggtgaggtttatttaaagaaaccattaagtgcaagacagacctgaagagcagcatcagttgtgtatggggaaacaggagctatgaatgcgtcacttcatttaggttgacagaaagagggctaatacttgaaaaaaatccctacacgatctggtgccaggctacttctttggcctcacctcttaccactgccccctccttccgtgtcctccagccacagtgacctctttcctgatccttgaacttgccaaacactttcccttctcaaggtctttgccttcaggagtccctctgcctgaaattcttttcccagatagtcatgggactggttcattctcatccttcagatctctgctcaaatgtcacttattctaggaaatcgttcctggccaccgtaaaatagcacaccccctcctcactttctactccttttctttgttattatgtatatggcagcagaaaactatgcattttcttagtggcaattacacaccccgcacattatgcatttaaagcgttgtttgttgttttgtcgcttccatcagaatacaatccagtagggcaaggagtgtgtggggtcgtgttcacctggtatctctggggacctacagcccggcacctagtagacactcagtaaatatttgaatgaatgaatgaggccctttggcagccgggaagcccgtcacagccgttgtctccaccctctcccgggctacaccaggccacgccggtaaagttgtttctcctctaggagaaacattcgctaggccttgttgccaacccgcaggcggctgggcgcttcatcccaccctcacccctttccagccaaggtggctgatgggagtcaggctctcgagggcgcattgccacgaaacagcgtgtgtgagcgcgttgtccccggcccccggcgccacttcccctcggcctagcagcctggactggggaaggacgggtctgctgtacccgggaggtggaaggaaaagccgaaagcggagaagtgtgcgggaggggagtctccgcgcggaggcagcccggcctcctccagtgcaggctgcgcgctggggagccagccagggtgagtcactcccggccgcttccctggagggcggcggccacacacacacccgcccatctagtgagggccgggcccagcgctggcgcctagctccagccgggcaccagcgtttcgcgaggcgccgccgccttaacttccttgcgcgctcacgcccaggggccgtcccaggaatctccacgcgcgctcgccggcttcccgagaggcagctgccctgcgtggcccgcgcctgccggtcccgcgaccagcaccgagcggcgcacgcgcactgcaggacgcgcgtccggctctcccccagcctctatccggcccggtctcctgccattcggggagactgcaggccaaccgggaggctgagttcgaagctagcagggcggcgaagccagtgtcgcccgcggcgttgagaagacggtgtggccccggagagggtggagacaactgtgacgggcttcccggctgcccgaagtgggagtggtgtggggctgcaggaaggagagaggaagaggagcagaagggggcagcagcggacgccgctaacggcctccctcggcgctgacaggctgggccggcgcccggctcgcttgggtgttcgcgtcgccacttcggcttctcggccggtcgggcccctcggcccgggcttgcggcgcgcgtcggggctgagggctgctgcggcgcagggagaggcctggtcctcgctgccgagggatgtgagtgggagctgagcccacactggagggcccccgagggcccagcctggaggtcgttcagagccgtgcccgtcccggggcttcgcagaccttgacccgccgggtaggagccgcccctgcgggctcgagggcgcgctctggtcgcccgatctgtgtagccggtgggtgttatctctgcctggcttctgggtggggggcagcagctgtctctccacccccttcctaccttttggtcccgcctgccccctgctagtggcagcaaacttctgagccagaaaaatcttcctctttaagacgacacctagaacgagtcttgctggtgatatttgcttccatttgtgtcttataattccctcgctcccgcctccttattcctttttaaaattttctagacacttaaacagcctagaaaaagcatttgtttcccctggatttatgtggtagtagttaactgctgcttctgtttttaggtttcagaagcaggcaacaggaacaagatgtgaactgtttctcttctgcagaaaaagaggctcttcctcctcctcccgcgacggtgggtgtgctgtcctttatcgctgcagtaaaggcgaaggtgtctggagctgggagtgcgtgcgtagggaaggttggaagcgtgtgaagagaggcagggctcattgttgcttactcttctgaaaatgtcagtgctaaacttttaatgttgatctgggagagtaattttggggtgttttgttgttcgtcttggatcctttaagaaacatttttttgttggctttacacataacgtgactttgcagagaaacgaaaaacgttgtccattaccctttcttcttaagcagccagagattcttaatcctttaaagaggagtatttcca

SEQ ID NO: 2576 - DNA, 6000 bp, Homo sapiens
tccagttaagagaatttaatggtttccccgccccatgggaccaatgataagagtatggaacacgatatagggaatggaaagaatatgcatgcatctaggactagcgactgcaaatatgtaacaacccctgaacccaaagcaacaggggagggaaagataggttaccagaacatggaagagcgagtcacgtggagcaggtcacctgaagaggacaagtgacatcatgcaaaggcaagagacagcctgacttggtcttgcagggagaaagccacgggaatatcctgatctcattctcttcgtatcatgcaggtttttgtctgtgctccctccccgttggtcaacctcagttggaagcttgagggtactgcctctatattcttcctactcttggactctaggactgcaaacaggtagagagtggccctggaggagaaaaaggaagacatccaacataaaagggcagatgaaaaggtattaatcatagcttcagaggataggttgtaattcattctttaaaaataagttactggctttgagacagtagttaagaaacaagacattctgaagtataagattctggaatttgttctacaatcaacctttttctgttttgcctcttgacttgaacaaatattggatcatgactgatggtacaaactttagtatttgcttttcatccatgtaaataatttctctttattttccctgttcatatccaaatggtttcagctacacacttggtagtaaggtatgatatgccaaaactgtcttggctgagcactgtggctcactcctgtagtcccaacactttgagaggctgaaccaagtggatccttgggggccaggagtttcagaccagcctggccaacatgttgaaaccctgtctctactaaaaatacaaaaatttgccaggcgtggtggtgcatgcttataatccagctacgtgggatactgatgcacaagaatcgcttgaacctgggaggcacaggttgcagtgagccgagattgcaccgctgcactccagcctggacaacagagtgagattccatctcaaaaccaaacaaacaaacaaaaaaaaacccaactgtctaatattgctgtttttgtcagagaactattttgtttttacaactgggcagatgcctaagcacacaacaacagtattgcaggcaaagagagaaaacagtacacagtactacatggagaaacacaggaagggtgtgttttgttacatatacaatcattacttgcagttatttgtttataccctaagtcgcctactgcatatgtaaatttatgtttccagatgtaattcatttggtctgcaggacaaatacatcatttttgagtcttacatctctaaactctgtgcttaacaatatagattgtttgggatctatacacaaatcctatacagtctcagtagatacctaattttgagacagtcatcttatcccctccccacccctgcagttctccattaaagccccatcacattaagaaagataaatctcataagagtgtgtacaggaggtcttaaaaagtccctctttaagaactttcctatttctcttcaatacgtcaaacttctatttccagtggtcagttagacatctccagctagacagatgctatattttggatgcatttcaaatgcaacacagctcatttggaactcattgtattttcccgacttgcctcctctacaagttcagagcatcaccatctgctcgagccatcaatttaaatctcctaagctagaaacttgggaactgttctcaacattccattttcctcatcctttatatccacaatcctacaagttttataggctcaattttctagaatactctggaatacatcctctcctctcctacttaccgccactaatttcaccaaaactgacacaattgcctcctctgtaaactttctgacaataagttctcccctcatgtccctcttccttactttttccctaaggcatctgtccagattccttttgctattatttcaaatgcatatttaattacatccatctactccttaaaaatcttagtttttccctggggcccacaaaaatcatctgctttgaatgttaattttcacacactgcccttttctatttagtcaaccattctctgatttgcagtctcttctgacctgtaaaaaatgcacacttttttgtctttgtttaagcactctttcctctttgggcatactctgtttatctaaatcttctccataacagcagtactaaaataatttattgtgtactactaagggatagtatgcaaaccactttacaatcattaggttatttcaagcaccattttacattgaggaaattgaggatgttatttgtacaagatcacatttttaagcaagcagtaaaactgggattataattccggtctatctcaatccatgaactgaacatttaaatgctgcctcctactacaatgtatcacataactcgtgtcaagttgtacagttatttttaagcttccagatcattctagttccccttttcttaatcattctagttctcctctcatctgtaatcatggtttgcgccaacatcagtgtttagtactaagttattctttaatattttatttttgttaaatcttatctcaactagattgtaatttgttttgtgagaggtaactaaaaaaaaaatcctaacgtaactccacaaagccatagtataacgttataatagtaaatagcataaccttataataaatagtttcgccttattgaggtaggtagtaagtgtgctttaggtagatttggttggtgcaaatgtaattgtggtttttgccaccgaaagaaatggcaaaaccccaatgacttttgcaccaacctaaatatcatctcatttacatatgtaataaatactcaatatttgctttaattaaaataggggtagacaagtgaattatatttagaggttctaggtgactgaaattttcacaggggcagaaacccaaaatatgtatgtgcagttaattttttctgtctcttctgtgttgggccatcttttttttctctttttttttgagatggagtctcactctatcgcccaggctgtagtgcagtggcgtgatctcagctcactgcagcctccgcctcccgggttcaagcaattctcctgcctcagcctcccgagtagctgggactacaggcaactgccaccatgctcagctagttttttaatatttttagtagagatggggtttcaccatgttggccaggctggtctggaactcctgacctcaagtgatccgcccacctcggcctcccaaagcgctgagattacaggcctgagccactgcgcccggcctttctcttctttttcatgatatactactggatttgtctgtgcttgtaattattttagctgtttattagtttattacaaaaaaatggtactgtacctttatgggaataattagcacctatgtgaatatttaagttaccgattttggcaaatgtgaagtccaagttgtcttgttttgtttacgtttatatcctctctcccttcttgagaagacatattttcatttaaaataaacccacttggccgggcgcggtggctcacgcctgtaatcccagcactttggaaggccgaggcgggtggatcacgaggtcaggagatcgagactattagccgggcgcggtggcgggcgcctgtagtcccagctaccccagggaggctgaggcaggagaatggcgtgaacccgggaggcggagcttgcagtgagccgagatcgcgccactgcactccagcctgggcgacagagagagattccgtctctaaatacatacatacatacatacatacatacataataaataaaataaaataaacccactcacccccaccccgactccccagctgtagcagggaaggattaagaaggcggggtggggggtgggggaagccctgttaggtagtgctgcgttgggcccacttctgagggtttaatcctagtagggtctttggagttctttcttcggaggcgcgtagctctgcattatttaaaactgtttcccgcaaacccgcaatcccttaggccaaaggcacccctaacgcggaaagtctacgaacggaaatgtccggagttagagagcggcctttcgggcagctgccccgacttctccaaggccggagggccggctgggagcgctgcaagccagagagggcgatcccagcgggacccgcggcctgaggataggcctggagctgccgcctccgccaggcgacgggaaaccctcggaagtgggtttccgcgcgaaagtagcattgcggccaggcgggaaacgtgttcgcgaagcaggagggcccccggggcctttcccgggcgacccgacccgccaggccgcgtggcgggagctttcctgttgagcgcggtggagcgcacacatttccttcagttctttctcggaagtttaggccgcacccacccgcgccccctttccaggattatacaagtgcacgccagggtttcttatttttggtgtgtttttgagaccaaagaaccatatccgctaagcctgaggaggcacccgccccctcagctctgaaacgaggcctcaaaacggcaaccgatgtggtagccgcgcaatcttccgaaacccaaaggctagagggcgtgcccagtggccaggtgcaggcggtggggcaagtaacggcttttggtagccccgcccctccgacccgccctctccgcgcctgcccattttcgttccctcgggtctgtaaccctctcccgggccgcttcctctttaaggcggagcccggcgtggatctcgcgagatccggcttggcgccgtgacctccatgtgggagctccagctctataagtaaacactctgcgcggcgcagacatggcctcttcctatctttgaggcggtgtctgcggcagcgcctcagagtggttccggtcgtctctcctcaagtcggctagtcgggcgcgcgcgctgagagtcgtcgccgcctgtcgggcccggcgtccggtcggtccggtgggcgcgctcgcccgcctgccgctgagggcccgagccgcagggaaagcggcgcgggccgggcggggcgcggcgcccagagctcagggggagacaaaggggaccggttcctctctaggcgccaagatgtggatacaggttcgcaccattgatggctccaagacgtgcaccattgaggacgtgtctcgcaaagccacgattgaggagctgcgcgagcgggtgtgggcgctgttcgacgtgcggcccgaatgccagcgcctcttctaccggggcaagcaggtgaggcgcgcccgccgcgcccctagcgaggctgggggccggaacagctgggctcctctggacgcaccggtccgagggctctgtgcgccgcgcgcgcagggctcacctggctccgctgcgggtgggcagcccccgcgaggcgcggggtgcggggcccagtcccgccgaatggtggggagtgggtccctgccagccccaactggaggtgcgccgcgcggggtcagaagtgagggcgtccggagcgcaaatatctcgccgtttgtatttggtaggacagcggccgtaggcactgggtgcccaggtccctcgcttcccgcgctcggcggggcctggggcccccagagggcggggagggcagagggctctggcggccatgccaccgcgcgggagacccggagagctggctaacccggctgagcgttcgcctggcttccgcggctcttccgcgtcttcggctctcaaacaggggaaactcgggcattgagctctcaagaataagaaccctaactctgcttcctgactgtggtaggattcgcgcaaactgaagattcgaagggtttccagaacttctggtccctctccctcgccgcctttcctaggtttggaatgtctcgagggaggttagagacctgggcatgaagaaactgtcggtttaaccgggggccgggtttacgaatgccctatataagc

SEQ ID NO: 2577 - DNA, 6000 bp, Homo sapiens
attgagatgtgaaaatctatacaaaaaagaaacgaaaacaaaggtttgatttttgaaagaataaataaggttgacatactgctagctaaattaatgaagagaaaaagagagaagatccaaataaacacagatatgacaaaagtgatgttacaccaacctcacagaaatacaaaaaacttcagagagtgttttgaacacttctatgaacacaaactagaaaacctagaataaatggatacattcctggaaacatttaacctccaaagattgaatcaagaagaaattgaatactcgaacatacccataataagtcgtgaaattgaatcaatactaaaaaacaaacaaacaaacaaagaaaaaacttaccaacaataaaaagccctgcatcagatggattcacagccaaattctactggacaaaaaaagaagaatggataccaatcctattgaaactattccaaaaaatgccttgatcattttatccattaatggtgattattattttattttactttgttttagagatagggtctcactctgtcacccatgctggaatgcagtgggaggatcatagctcactataatctccagcttctgggctcaagcgatcttcccacttcagccttcggagtagctggaactacaggtgcataccacaatgcccagctaattatttttgtatgtacaatgtcttgctatgttgctcaggctggtcttgaactcctgccttggcctcccaaagcactgagattatagggaagagccaccatatccagccaatggtgatttttttgacaagtttctttcaatcctgtcattgtattttaggattttttaaatatgatgaggttagaaaaataaagacatctatactaagtactgtggtggagtttggggttaaaacaagattatccctggtaagtatcccttcactgcttcatagaaagtacatatagtctgccctctggctcatacaataggttctttttggcactggacactcaaccattgtctggtaagattaggaggagaagaaattcctaattggaatctatcagtagacaaaataaagtctggcctggaggtgagttgtccctttcaggaataaaaacagcaggctgacctgaaggaagtgtcctggagaatcaatgacatcctcagggagaaactcagagcccatatggctgggctattgttagactaaaaattgttaggtgcttcctgtttattcttaaaatgacaaaagaaaatctcaagagtcaaatgtaaaaaggcttctaagtgtttgcagttgatgagtcaataaaggttttactgtatttcagtgaataaattactcattaaatcttggcccttttttacaattggcagaaaaatctactcacttttaactatttaaaaggtctacttttacttaggacttaaaattagttcaacttactcacaacatacccccgttgctctgtctacaaagtaatagatggcaacacattggcatgtgacgtggaactctgaatcccttgtcatctcacccgtcctgctcacctgacttcatgccctggcctctccttggtttataaattctctactcatatccaccctccacttccattgatagagtcttccagataagccactatattgactccccctaaaggtttgaccttaaatcactggtgttttcggaatagctcatctctccagatacatatttctctccagaaagttgtataaatgagtggaatctaaatatggttattgaaaagattgagttaatcttttcaaatatctttgaacagaggctggtcttagtcaacatgcaacaaattccaatgttatcatttttagtatcatcgtcatcatcattatccagataaagagcggaatctttgcgattatccagttctctttattttttacactgagtttctcaaagcactcttttccttgcctaggtagatttattaacttggtagagtgctcaggcaaggctaatatctattatcctgccagaggaggctgcttgttctagtaattggggactggttgacaatctcttgtgagccagttggcatcatgcttcccttccttcctcagaactgatcctatgtatattaaatgaaaaaagagcaaatgtctggtcttgcaaagctaagagcaattcattgacccaggacttggccttctctgtgcctctagcagaaacagccatttccctgcctttgtgtacctcaacattgggctcattcttcccctctgccagaacccctagtcatcgattttgctgcattttattttgctaacttatacttggccattttatgagcagaaagccacttcccttctttcactttcatgacattcagacttatattttctgttttctttcttgccccaaaacaactatcaagttttgctttctaagaaagctgaaatgaaaaagaaaaaaatctgaattcatgtaaattatagatcaaaatagcatggttcctttgcctttcttttacttcctttaatttgtgttattttgtcataaactggaatgtaatgcagaagcagcaagacaaaccttacccagtaaaccactatgtaaaaataaggtacaaaattttaaaataaaacaatcacaaataagtaaattaaggaaggctctttctccctgacagaaaagcaagggtctaacctccctgcactgtcagagtgagtcagagatagaggaggaaagaacccttagaattgcaatgactggatgagcagctgaagaccactagtttctgtaatataagcttctttttttattattattatacttgaagttttagggtacatgtgcacaacgtgcaggtttgttacatatgtatacatgtgccatgttggtgtgctgcacccattaactcgccatttaacattaggtacatctcctaatgctatccctcccccctccccccaccctacaacaggccctggtgtgcttccttacaccttatactaaaattaattcaagatggattaaagacttaaatgttagacctaaaaccataaaaaccctagaagaaaacctaggcaataccattcaggacataggcaggggcaaggacttcatgtctaaaacaccaaaagcaatggcaacaaaagccaaaattgacaaatgggatctaattaaactaaagagcttctgcacagcaaaagaaactaccatcagagtgaacaggcaacctacagaatgggagaaaatttttgcaatctactcatatgacaaagggctaatatccagaatctacaatgaactcaaacaaagttacaagaaaaaaacaaacaaccccatcaaaaagtgggcgaaggatatgaacagacacttctcaaaagaagacatttatgcagccaaaagacacatgaaaaaatgctcatcatcactggccatcagagaaatgcaaatcaaaaccacaatgagataccatctcacaccagttagaatggcgatcatcaacaagtcaggaaacaacaggtgctggagaggatgtggagaaacaggaacacttttacactgttggtgggactgtaaactagttcgaccattgtggaagtcagcgtggcgattcctcagggatctagaactagaaataccatttgacccagccatcccattactgggtatatacccaaaggattacaaatcatgctgctataaagacacatgcacacgtatgtttattgcgggactattcacaatagcaaagacttggaaccaacccaaatgtccaacaacgatagactggatctagaaaatttggcacatataagcttctaatgaaagacaacatcatcattgatcccctgtgcccacctgagaaacactgaggataacaaatgttcaatagcttacgtaaaagaattgaacaataaaaaccgtgtcaggattccgagctgggatactgacacagccagtggagcactattgacctcagtaagcaaatggtggaaaattatttgactaatgaaggtaaaatgattataattgggtaatccttccaccttccttagacaaaagaaacctttgctatcagtacctgagggctgtcgaaacttttgatacctggacacatgggtcaggaggaaaggaggtcgccactgagagccagggtcctccagacaaacactctaggggcaccggcaagggtcttggagggttagttgctttgctcacaaagtaaccactaccctctcaccaaaagagttctgaagttatcaggatgttgtgagactgctccctgggagcgagtctggaagagtttgggttgagagtatttgttactctagaggaaaaggtattactagatgtgataactaccttgtgtgtgaggagacgctgggaaagtaaaatatctgcgaattagaatctctacatccatatgcgcttgtaaagaatcaggattccagctgggatattgacagataggggagcactattgacctcagtaagcaaatgatggaaagaaaaagcagtgtctatattaatcttcaccttgtggtcccagtgaagcgtaaccacatggacctgcatgaatgttttctagaaggaagaaaaatgtcagagaagctcattcgctaatcatcatcatcctctgttgtgaataaaacagcaaacaaaactgcgtttttggctcatatctgtaattccaactacttgggaggctgaggcaggaggcctcagcttcaggccaggagtttgagaccagcctgaacaacatagtgggacctcatctctaacaacaacaacaacaaaaaaattagccaggcatgatggtgcacacctgttgtcccaggtactcagggggctgaggcacagagattgcttgagcccaggagttaaaggctgcagtgacctctgatcatgccaccacactccaacctgggtgacggattaagaccccatctctaaaaaacaaacaaacaacagcaaaatgctgttcttggttctaaagagcttatttgctgcagatgatctggtaaacctgaagcaaatatagaaacctatagggcctgacttcctacataaagtaaggagggtaaaaatggaggctagaataagggttaaaattttgcttctagaacagagaaaatgatttttttcatatatatatgaatatatattatatatacacatatatacatatattcactatagtgtgtatacataaatatataatatatatattgttagtgtagtgtgtgtctgattatttacatgcatatagtatatacacttatgactttagtacccagacgtttttcatttgattaagcattcatttgtattgacacagctgaagtttactggagtttagctgaagtctaatgcaaaattaatagattgttgtcatcctcttaaggtcatagggagaacacacaaatgaaaacagtaaaagaaactgaaagtacagagaaatgttcagaaaatgaaaaccatgtgtttcctattaaaagccatgcatacaagcaatgtcttcagaaaacctagggtccaaggttaagccatatcccagctcagtaaagccaggagcatcctcatttcccaatggccctcctgttccctctactggcagccctagtgatgaccagctatagccctgttggatctctgggctgtgatctgcctcagaaccatggcctacttagcaggaacaccttggtgcttctgcaccaaatgaggagaatctcccctttcttgtgtctcaaggacagaagagacttcaggttcccccaggagatggtaaaagggagccagttgcagaaggcccatgtcatgtctgtcctccatgagatgctgcagcagatcttcagcctcttccacacagagcgctcctctgctgcctggaacatgaccctcctagaccaactccacactggacttcatcagcaactgcaacacctggagacctgcttgctgcaggtagtgggagaaggagaatctgctggggcaattagcagccctgcactgac

SEQ ID NO: 2578 - DNA, 6000 bp, Homo sapiens
tctgtctgagtcttactcaacccatcctctctactcataagaggtattccaaacctttacgattctcaaacttcctaaccgaccatcttattttcactctgcaaacaagctaacctcctcattcatagaaggaagtgcctcaacttcctccccgttctgaccttttctccctcccaaatctatgtatctcttgtgacaaaatctataaccaccgctgtactttgagttctatttcttcattatttttgagggacctcaagtcctcaaaaatatcctatcttgcctgtgtacttaacttttcttttattcttttctaactttcccttctcttcacttggcacttgcccttccaggtatatgtgtgctcaggtctcctccaccttccatctgcctcacttcatggcatagggccttgaactatcacaaccaagctatgaaagagtagtcaacgcagtgtccccacttccttgccatcccattatcctagtttttcttttggctctctgaggagtccttcacaggctggttttcaggaataagtctaaatgaatcactttcagttttcctaaacttctatgcctttgcacatcctcttacctctgcctagaatatctttctccttcttttccatctttaaactctcacatcattcttcaagactgggatcagctctcagcatccggaagcctttgcctactagagacaaatgagaatgagtttggtcaccttttcattttcttgtatcattctgtgctttattttgctcttctaagagcgttacatgcttcatttaatccctaaacaactgtttgaggcaagtacagttattatcctaatcatgcaaatgagaaaacagaggcccagacatgttgagtaactttgataaaagttaaagaaccaataagtggaacagttgaggtttgaaccctggcagtctgactgtagagatactatgtttgacctactcccctctgcccccaccccatgtctgcccttagtttctgagcttgttgaatgaatgaacaggtggtagtctttttttgttataagactgatcagaattaagacaggtttaaatttcacgtgtagaattttcaaaactgcaaaggcagtgcaaatctaaaaaaagaatggcattctcaggaaagaggaaaagtaagtgtgagaataataataacaataaccaacaaactttagtaaatttagtaaatgtagtaaatttttacattaaaagcttttggacatacattatcatattttatggccacatgaaatatattataatcccattttgcacataggaaatctgagactggcataaggagcacagagatccaggactttatattttcattcttctaggattttgcacctcaggtcgatatgtatgagtaaactgggagtataatgggctctttaacagaaaaactaggaaagttttcccactattattaattatttacataatatttttttaattttattattatttatactttaagttttagagtacatgtgcacaatgtgcaggtttgttacatatgtatacatgtgccatgttggtgtgctgcacccatcaactcatcatttagcattaggtatatctcctaatgctatccctcccccctcccccctacataagatttataatggataatggacttcaatttctagagcaaaatggccccacccaaggatgccataatccttccagagctctactgcaagatatgagatatacatatctaaaacttgttcttggtatttccaaagcagtcaacttttacacctgtttataatgcatccaaatgttgtttttatatggttgcatctcccatcttcttcaccaatagctatatatatttttcacaagagctgaaagagttcttgatgtaggaatccatggtagagtttcagagaaatccctgaattcactgaaagttttatctagaaatacatgtgcaagtgaacacatcttttttaaaaaaaatcattacctactttcttttttgagaagaaggtatttatttcaacagactcttgaaggagcctactcttcccactctcccacccccattaagaaccactgtaggccgggcacgatggctcatgcctgtaatcccagcactttgggaggctaaggtgggtggatcacctgaggtcaggagttcgagacaagcctagccaacatagtgaaaccccgtctctactaataatacaaaaattagctgggtatggcagcatgtgcctgtaatcccagctactcgggaggctgaggcaggagaattgctcgaacccgggaggcggaggttgcagtgaaccgagagagatcgtgcggtgccatttcactccagcctgggcaacagagcgaaactccatctcaaaaaaacacacaaaacaaacaaacaaaaagaaagaaccattgtattagtgatggaaatgtgttccctccctcccatcctggcaaccactttcttcctcctccatcataaaatatcttaaactaaactaaaataattttatttatcgatagtttgaattttccctatcattgctacacagctaattgagaggtaccccgaggaaaatataaatggtacagtaatgcattgtagattttaataacatacttgacatcccaaattgttttcattggcttcattttaaaaactacatgttttaaaatcaagcagacactaaaagtacaagatatactgggtctacaaggtttaagtcaaccagggattgaaatataacttttaaacagagctggattatccagtaggcagattaagcatgtgcttaaggcatcagcaaagtctgagcaatccattttttaaaacgtagtacatgtttttgataagcttaaaaagtagtagtcacaggaaaaattagaacttttacctccttgcgcttgttatactctttagtgctgtttaacttttctttgtaagtgagggtggtggagggtgcccataatcttttcagggagtaagttcttcttggtctttctttctttctttctttctttttttcttgagaccaagtttcgctcttgtctcccaggctggagtgcaatggcgcgatctcggctcactgcaacctccgccttctcctgggttcaagcgattctcctacatcagcctccgagtagctgggattacaggcatgcgccaccaagccccgctaattttgtattttttagtagagacagggtttcgccatgttggtcaggcttgtctcgaactcctggcctcaggtgatccgcctgtctcggcctcccagaatgctgggattatagacgtgagccaccgcatccggactttccttttatgtaatagtgataattctatccaaagcatttttttttttttttttgagtcggagtctcattctgtcacccaggctggagggtggtggcgcgatctcggcttactgcaacctctgcctcccgggttcaagcgattctcctgcctcagcctcctgagtagctggaattacacacgtgcgccaccatggccagctaatttttgtatttttagtagagacggggtgtcaccattttggccaagctggcctcgaactcctgacctcaggtgatctgcccgcctcggcttcccaaagtgctgggattacaggtgtgagccaccgcgtcctgctccaaagcattttctttctatgcctcaaaacaagattgcaagccagtcctcaaagcggataattcaagagctaacaggtattagcttaggatgtgtggcactgttcttaaggcttatatgtattaatacatcatttaaactcacaacaacccctataaagcagggggcactcatattcccttccccctttataattacgaaaaatgcaaggtattttcagtaggaaagagaaatgtgagaagtgtgaaggagacaggacagtatttgaagctggtctttggatcactgtgcaactctgcttctagaacactgagcactttttctggtctaggaattatgactttgagaatggagtccgtccttccaatgactccctccccattttcctatctgcctacaggcagaattctcccccgtccgtattaaataaacctcatcttttcagagtctgctcttataccaggcaatgtacacgtctgagaaacccttgccccagacagccgttttacacgcaggaggggaaggggaggggaaggagagagcagtccgactctccaaaaggaatcctttgaactagggtttctgacttagtgaaccccgcgctcctgaaaatcaagggttgagggggtagggggacactttctagtcgtacaggtgatttcgattctcggtggggctctcacaactaggaaagaatagttttgctttttcttatgattaaaagaagaagccatactttccctatgacaccaaacaccccgattcaatttggcagttaggaaggttgtatcgcggaggaaggaaacggggcgggggcggatttctttttaacagagtgaacgcactcaaacacgcctttgctggcaggcgggggagcgcggctgggagcagggaggccggagggcggtgtggggggcaggtggggaggagcccagtcctccttccttgccaacgctggctctggcgagggctgcttccggctggtgcccccgggggagacccaacctggggcgacttcaggggtgccacattcgctaagtgctcggagttaatagcacctcctccgagcactcgctcacggcgtccccttgcctggaaagataccgcggtccctccagaggatttgagggacagggtcggagggggctcttccgccagcaccggaggaagaaagaggaggggctggctggtcaccagagggtggggcggaccgcgtgcgctcggcggctgcggagagggggagagcaggcagcgggcggcggggagcagcatggagccggcggcggggagcagcatggagccttcggctgactggctggccacggccgcggcccggggtcgggtagaggaggtgcgggcgctgctggaggcgggggcgctgcccaacgcaccgaatagttacggtcggaggccgatccaggtgggtagagggtctgcagcgggagcaggggatggcgggcgactctggaggacgaagtttgcaggggaattggaatcaggtagcgcttcgattctccggaaaaaggggaggcttcctggggagttttcagaaggggtttgtaatcacagacctcctcctggcgacgccctgggggcttgggaagccaaggaagaggaatgaggagccacgcgcgtacagatctctcgaatgctgagaagatctgaaggggggaacatatttgtattagatggaagtatgctctttatcagatacaaaatttacgaacgtttgggataaaaagggagtcttaaagaaatgtaagatgtgctgggactacttagcctccaattcacagatacctggatggagcttatctttcttactaggagggattatcagtggaaatctgtggtgtatgttggaataaatatcgaatataaattttgatcgaaattattcagaagcggccgggcgcggtgcctcacgccttgtaatcccttcactttgggagatcaaggcggggggaatcacctgaggtcgggagttcgagaccagcctggccaacaggtgaaacctcgcctctactaaaaatacaaaaagtagccgggggtggtggcaggcgcctgtaatcccagctactcgggaggttgaggcaggagaatcgcttgaacccgggaggctgaggttgtagtgaacagcgagatggagccacttcactccagcctgggtgacagagtgagactttgtcgaaagaaagaaagagagaaagagagagagaaaaattattcagaagcaactacatattgtgtttatttttaactgagtagggcaaataaatatatgtttgctgtaggaacttaggaaataatgagccacattcatgtgatcattccagaggta

SEQ ID NO: 2579 - DNA, 6000 bp, Homo sapiens
tacttaaaatagtggaatagctgagtcaaagggtacctatattctcatacagttttgactagatattgtaatgctgcctttcaaaacaattacaccaagttgtaatagtaagagtgattgtttcctgacaactttgtcaaagtagtcttttttctttttgccacacttgtggttatatgccattgtttctgtttacatttattaatgagtaagattatctttttattttttactatttgcacatattctactataaactattatatcctttgccttttttattggattgttgttttactggattatgtatttatttatatagtctagtaattaatcttttgacatatatgatcaaataattgttttttattcttgcttatgttatcttttttcttatgactttggggttttgagtttgagcatgtgcaatgttaggaaagtttctcatgaaatttggataatcaagagttacctaagggataaagctagtgtcataggacattaagtttggggaggaggagaacaagacaagggatattcagtaagatttttctcccctatccctgcctatggaatgaatttgctgatctaaaacagaaaattatttacccctgttaaaaaaaactcaattaactcaggtttttaggccagtggaagagaaccccaaaaacttccaatattcagtgattctgtctgcataagtgacccacagataactcactccctattgaccctggcctttgggacaacagaaaaggcacaaggcttgtaacccaaaggcctgcctgatgattccagccctggctcttgctggccatgaagtgttcaagatttgagcctttctaggcctcattctttccacctgtaaaacaggagtaataatcccaattttgaaaggccactgtgaggataaaataagtaatataagtgaaattacatgctcagttcttcattattaattttttgaagagcacatagccaatagtcactccgcattccaaaagtatttggaataccacatacccattgttatgctagaaagagtcatcttcaccattgtattttgctgagactaatattaaacttagaattcccctgcatactgcaactgaaagagaacaggtattgggcagcggcagtgggggaaaccaagatggaatttagatgttcaaactttaatatttacattttttgaacagagagcttactatataattatccttttattcagatggcattcctctgaaataagcaattacccttatccctaggtctagttcctgtggagagaaaatgattatactttgagctatatggctccaataaacaaagatagatccctcaatttaaatttgatcctcagaaaactgagggtcagagaacccctcaggcatgacgggataatgtgacagttaatttggtatgtcaacttggctaggctgtggtacccagtgtttgagtcaaacaccagtctaaatattgctgtggaggtattttttagatatgattaacatttaagtcagtagacttgaaaaagcagattatcctcaataatatgggtggtcctcatccaagcagttgaagagcttaagagaaatgactgaggtccctcaaggaagaagaaattctgcttccagattgcctttggattcaagtcttgcaacaacaactcttccctgggtctccaatttgtcaacccccaccattttctgagacaattccttaaaataagtattttctctctttctctttctctctctctctctctctctctccctccctctctttctctcccccacatatgtgtgtgtagacatataatgtacgtatatataaaattgtatacacacacagagtcatgtgctggataacgatgcttcagtcaaccacagtcacatattggtggtgtcccataagattataatggatgtgaaaaattcctatcccctagtgatgtcatagctgtcctaaagttgtagcacaacatactaccttttctatgtttagatgtgtttagatataaaactacattttgttacaattatctacagtattcagtatagtaacatgttgtaaaggtttgcagcctaggagcaatagcccataccatacagcctagatgtataatagactataccacctaggtttgtatatgatgtttgcacaacaatgaaatcgcctaaagatacatgtctgagaatgtatccctgttgttaagcaaccccatgacggtgtgtatatacatatacatatgtgtggtactggcacgcacacacacacaatgggttctgtttccctggagaactgactgatatagatagcgacttcaaaagatgtttaatacgtgccttttctcctttccccaccatgctttattgcaacaactagttacattgtctaggcccaagaaaccctcaccgctcccactccattcctccagtatctttaaatgacactatgctggcatccgacatcgtttttcttccaggatgaactaaccctttctaaagcgcccttcctctgtgggacagaaaacctaatgcccccctacagaggcggaggccggctgaaggtggtggtaggaggggaatgctgggggcgtggcataggtgcagaggaagacccataaaaggatctggttcccatagagctgacattctacacaacaaacaagtaaacaagtacataagtaaaataatctcttcgtcctaagtgctataaagaaaaaaatcacggtggtatgagggtgcctgaaaagggaagcatttctgaggaagggctacttacttcagaagagacctgaaggaaaaagagctatatttgcgaagagggagaaagagcagccatactagacagaaaggtggcatgtggccccagcacaaagcacggtgttgggtaaattctgagtgaaatctacctaccggggaggtgcatttgtaaatatctagatagatatttagagtggctacgtaagagtgatcgctaaatctcactttttccaaagggccccgttttgtcttgggtttgtaccgaggtccggcagcaacgtcaagtgatggggcgggggatggggaaagagaagtctgccgctcctctaggctaccgcaccgccttaagtgggtggctcggccagtgcaggcctcactttcctcccctgtaaggtctggggggcttgacgtctgatctgtaaggccctgtcggctcacgctgtggttccacttcttcaactaggccactaggcccaagcgcatgaacaggaagccactgagaagcgggccacatttccaggttcccggagctgggcctagtcccgaatcctctggcacacacccacccactcaggccgcgggtccagcccgcgaggtttaggacggatccaggcagaccgcaggctccgggtcggggcaccgggtcagcgcgccggcctgaaggcggcgtcctgggctcgacttcccgcgcgcggagagccggcgagcccgcgtccgagttcctggacgagagccgagcctcgcttagaccgcgctcaggacccggctcctccgcattctccggctgcccctgtgtcctcgactcacccctcctttctgccgctccttcctttccttgccctgcttttactgttcccaaacaggaccgcttttcctgtctcccagctggaaaggaggaagggagagagtccagaaaggatcggtgatgtggaagaaaaggggaggaggggacatggagggggagaccggagagagaacgtacgccgaggagtcaggcggcgggatcaaggggagtcggggtgtctgggcgcggggcagagcgtggaggcggcagcggccaacggtcgccaagacaaccattctacgcgaggacgcggcgacaggaggggagcggccagcaggggaggggagcgcgggggaagaggaaagaggaagaagcgctcagatgctccgcggctgtcgtgaaggttaaaaccgaaaataaaaatgggctagacacaaaggactcggtgcttgtcccagccaggcgccctcggcgacgcgggcagctgggaggggaatgggcgcccggacccagctgggacccccgggtgcgactccacctacctagtccggcgccaggccgggtcgacagctccggcagcgccagcgccgcgccgtgtccagatgtcgcgtcagaggcgtgcagcggtttagtttaatttcgcttgttttccaaatctagaagaggagcggagcggcttttagttcaaaactgacattcagcctcctgattggcggatagagcaatgagatgacctcgctttcctttcttcctttttcatttttaaataatctagtttgaagaatggaagactttcgacgaggggagccaggaataaaataaggggaataggggagcggggacgcgagcagcaccagaatccgcgggagcgcggctgttcctggtagggccgtgtcaggtgacggatgtagctagggggcgagctgcctggagttgcgttccaggcgtccggcccctgggccgtcaccgcggggcgcccgcgctgagggtgggaagatggtggtgggggtgggggcgcacacagggcgggaaagtggcggtaggcgggagggagaggaacgcgggccctgagccgcccgcgcgcgcgcctccctacgggcgcctccggcagcccttcccgcgtgcgcagggctcagagccgttccgagatcttggaggtccgggtgggagtgggggtggggtgggggtgggggtgaaggtggggggcgggcgcgctcagggaaggcgggtgcgcgcctgcggggcggagatgggcagggggcggtgcgtgggtcccagtctgcagttaagggggcaggagtggcgctgctcacctctggtgccaaagggcggcgcagcggctgccgagctcggccctggaggcggcgagaacatggtgcgcaggttcttggtgaccctccggattcggcgcgcgtgcggcccgccgcgagtgagggttttcgtggttcacatcccgcggctcacgggggagtgggcagcgccaggggcgcccgccgctgtggccctcgtgctgatgctactgaggagccagcgtctagggcagcagccgcttcctagaagaccaggtaggaaaggccctcgaaaagtccggggcgcattcggcacttgttttgtttggtgtgatttcgtaaacagataattcgtctctagcccaggctaggaggaggaggagataaccgccggtggaggcttccccattcgggttacaacgacttagacatgtggttctcgcagtaccattgaacctggacctcccttcacacagcccctcaatcgtgggaaactgaggcgaacagagcttctaaacccacctcagaagtcagtgagtcccgaatatcctgggtgggaatgactaagacacacacacacacacacacacacacacacacacacacacacacacagtaggaaaggtgtatttcaagcacactttctttctccttggggagaattattgctaaccatctaagttttctggaggcggccttttttctccccagcctcccggcggggtcaccctctcccaccttccaggagagtggaggacccgtgagatacggggcacgcaggcagcgacttcctgaaatgctaacaaggatcgtaggatcagttactgctgcgaggagcaagcacttgcttcttgggggagttttgcagccaacagggaaatgggctttctttgtgagttagaggtagaggtccggcggcctgagtgattgaaactgctcgggacaatgctcgtatgtttagcaaacgacagaactgtagaactgttcctgagaaatcccaactgatagtattttagtcatctcagacgacagttagcacagtttaaaaatgaggcctacttcttgaaaaacagaatccaaggtagttttgtcctcacattgacaaatgttgacacagccagtgtaatttcctataaccaggaaaactgaaagaatatat

SEQ ID NO: 2580 - DNA, 6000 bp, Homo sapiens
ctgggagttgcaggttgcagtgagctatgatcacaccactgcactccagcctgggtgacagtgcaagactctgtctcaaataataaataaataaataaataatttaaaaagacattccagctagtaaatgaaggaatagtaaaattagaatatcaccattttgccatccccaagaaaataataatctatgaaataattatccatggctgctagaatcacagaaagagacaaccatattatgtgtctcttggtgaaagtacgtaatcccacttattaaatacttttgcccaaatatcaaacctgaatcacatacagactctaggcctaaataataagttatgagaaatacaaatgacaaagaaaaatgttaagtgtcattataaagaagcattcagcaaaatccaagctttagaaaactacagataaagccaatttctgcaatagataaattgaaagaaaaaaaaagaaggcaaaagggggaaactgtagattaagaggaaacaagacgccaggtgcagtggttcacacttgcaatccagcactttggggggccgaggtgaaagaattgtgtgagcccaggagttcgggaccagcctgggccagatggcaagacttcatctcttcaaaaaagtaaaaatattagccagtcatggtggccaacacctgtagtcccatctactctggaggatgaggcaggagcatcccttaagcccaggaattcgaggcagcagtgacccttgctcacagtattgcactccagcctggtcgacaaggtgaatgaaacctgtcccttataagaaaaaaaagagagagagagagatacaagagactgtagcaatttcaaccaatttcaatatcctagccttattttaatccttattcaaatgaataaattattaataacagtttaaaaagaaatgaaaagtaaaatgtgtaaaaattaagatgctgttgttatgggttaaattctgtcacctctaaatttttatattaaagtcctaagcccaatacctcacaatttgaccgtatttggaaatagagcccttaaagaagtgactaagttaaaataaggccattggggtgggccctaatccaatctgactggtgtcctcaaaagaggaggaaatttggacacacacaagagatccaggggcacgtgtgcacagagggatgactatgtgaagaggcagcagtaggatggccatgtgcaagtcaagaagagaagcctcaggagaagttaaaactctgagaaaataaatatttgttgtttaagctactcagtctgtggtattctgttatggcagccctagcaaactaatacggatactaaaatgatgaacaagtccaccatttaattaatcttgaaaaatacatgggaatatagaagtggatatactgtggatcacggagcaataaacccaactcataaaatggagaaaatcaaacctcttggtgggaaggtgtgttcataaaaaatttgaaaaagccccaaaagtgattatgaatttccttctcttctcacttataaacactatcttagtcctaatcatatgcaaaagtgtgcataaatgagggcaaggttaggtcgctgtttctcttggccagtcaaccagttctattcatactttttttttttccagtcaatgaaagggacactttattgaggctccagggccatggggcctgggcaggaggctgccctccgaggaaggaagagccttatttgaccttcttggggtgcaggttgttggtgtggccacacttcttcttgcggcaattgacagcataggggtgcaggagagcatagcgcttatggcagatcatcttgtttcagctgtatttctaggtgagctggaagagtgaaggctcaataatgccacctcgcaggtgcagcaccaggtgcggggtgggctgtttctggacgttgtagtctgagagagtgcggccatcctccagctgtttgctggcaaatatcagacgctgcttgtcaggggggataccctccttgtcttgaattttcgcactgacattctcaatggtgtcactgggctcgacctcaagggtgatggtcttgcccgtgagggtcttcacaaagatctgcatctctgtgtctgcagctcggctgcctcgctgaagaaaaagaggatggcagatctgttcatacttctatatcaaggtcatatacagacaatttcaccaactagaatataaaaatattattactagtgatctgagttatgtgcaacattggaatggatgccactcattcccttctactgacctccaaaattctatgccaatttaccattaactttctctttctttcttctcaattataaattctccaccttattaaaagacatggctctgacaattccaagtttcagctgcccactatgttcccatccacttcatcttttaaatgtgtttaaagcattaacaacagattgtgtttcaccctagagacagctgggtttcaaggagaggtaaaatgtttcataatctcactctattgtccaagacaaatgtgctattgtattacatgtgaaatgtcatctttgaagtctggtaagggtgtgctgtgaggtgagccatctggaaaacacagtgtagactgaaaaataattataagccagtttattacttttttccagttaagcctaccatgacagctgctaaaaaaaacactatgtagtataaagggtaaaaagactctgaagtcgcaaaagttatacccacctccaacaatgattagctagtatacaagtcactcaaattctctgatccttttggcttgtctgtaaaattgaaatatggacacatgccacagaggagttttatgagtattaaatgaaacaacagctgtaaagcacttcgtacagagtacacaataagtttgatttctcttctcgtcttctaaatatagactatataatattctttatacagagaatattagataaaatccaatcatatttgaaaaccaggttgagcaggttggtttttcaaagaaattcattgagcttccataatgtcctttctatttgacgggagaaaaggggctttggaagatcaagtgtgaagctttagaattctgtctggagctggttaggaccacccaggcctgagtataagcaaagcgctgtccgtggtgctagtaagcgcgaatgcccccggcaacgttttccctacccaaagttgtttttcattcagtcaacttgcttcgcgaagctcacacatctgcctcgtgcaagattctcagtcattttacttagtcattggttctttccctatcaccattctttatgtccccctcaaagaaaaacattatcttccatttccttatcaactccaaacagctttcatttttctgacatatttactacctaagaaaatggctcaagaattgggtcagactatcttgtcctaacttttctgataagtttcagagaaactcaaaggtcaaaacaagagcataagagtaaaaggtagagaaattaagaaactgaagactaggaaatgggggttggatgggaaagaaaaagaaattgttattaatgctacccggttcccttccctgtccaggtggatttcagctctgttgaggctctgtcagtagattttcagccctaaccagcacttccatggtggtggcacttccactgcctttaaaagaaagagctttttttaattctacagggatttgggggatgaggagtcagagctaaggtatcctaaaaaaaacatgtgaagactctcattttgcaatacacaagcaattgccctcctgttaagactttgtcttcctcagcactccgaaccaaaatgattctgtaaacaaaaattgttcacttttaggagaggtccacttatgcagttcctcaccaaagtttttaggcaacaaatccataacttgcggttctcttcctatccaatgtagcatccgctgaaatgttttaaatattttaagtaataaatgttgattcaaactcacctaggaagattaggaaggggaaaaaaagcacttggcatttaaatcttcagaagagaatttaatgacaggttcagcctgtttaatgacaagcccagcaccacacccctctcttatgatgtttcattattactgcataaatttcctttattactcatgataaataaaaataagatacctgacaaagtgggtttaaataggtaagagtgcaaacaaagatttactgtacaaatatgatgaaactgggatctcagattcttaaagtataatttttttttgtcttatgtgtgccaggttgccactctcaatctcgaactagtttttttctcttttaagggttgtatccataatgcaaaaatggaaagaattaaaaagcacacgcaaaacatgattctcgggatttttctctatttttatggttgactaattcaaacagaaagacacatccaagagaaaattgctaagtttgatacaagttatgaaacttgtgaagcccaagtactgcctggggatgaatttaacttgtatgacaggtgcagagctgtcgctttcagacatcttaagaaacacggagttattttgaatgactttctctcggtcacaagggagccaccaacgtctccacagtgaaaccaactggctggctgaaggaacagaaatcctctgctccgcctactggggattaggagctgagggcagtggtgaacattcccaaaatattagccttggctttactggacatccagcgagcagtgcagccagcattcctggcggctccctggcccagtctctggcgcatgcgtcctagcatctttgggcaggcttccccgccctcgtgacgcgtcggcccgggcctggcctcccggcgatcacagcggacagggggcggagcctaagggggtggggagacgccggccccttggcccagctgaaaacggaattctttgccggctggctccccactctgccagagcgaggcggggcagtgaggactccgcgacgcgtccgcaccctgcggccagagcggctttgagctcggctgcgtccgcgctaggcgctttttcccagaagcaatccaggcgcgcccgctggttcttgagcgccaggaaaagcccggagctaacgaccggccgctcggccactgcacggggccccaagccgcagaaggacgacgggagggtaatgaagctgagcccaggtctcctaggaaggagagagtgcgccggagcagcgtgggaaagaagggaagagtgtcgttaagtttacggccaacggtggattatccgggccgctgcgcgtctgggggctgcggaatgcgcgaggagaacaagggcatgcccagtgggggcggcagcgatgagggtctggccagcgccgcggcgcggggactagtggagaaggtgcgacagctcctggaagccggcgcggatcccaacggagtcaaccgtttcgggaggcgcgcgatccaggtagctggggccccagggcctcgccggcagggggcgcgcgaacgcggggcgcggcctcggcggatcggggctggaacctagatcgccgatgtagatttgtacaggagtctccgttggccggaggtgtgcattccacgcgtaaaacaggcttttacccagcaaaaatcctaaagagagacattgaaaaacccactgtttaagctttttttagtggtttttgttctgccatctcatgatcagagatgcaaggaatagactgaattggggagaaaaggagaaaaggaaagcttatttagggaagaagattatcttgtctgtctgctttcaacgataaagataagtaaagtataagttacgcattctagattggatttaaggaattctacaaaatcatagtacatggaaaaaatcaatgtaaacttctaagctactatatgaaatctgttgtattgttttctcatagaggttaattgagaatgagacgggattcctcaaccacagtacttagttccttttatgttagcagtgtcttatgagtga

SEQ ID NO: 2581 - DNA, 6000 bp, Homo sapiens
cttcccagctggacccacttcttcttttacctcattacaatcagttttcaacatagaggccagagttatctatttcaaatgcaggtaagatcaagtcattcttttgctcaaaacttttaatggctccttctttcactcacagtaaaattctgaaacagtaatgacctgcaaggccctatataattttgccctcagctaccccctcacctcatcattttatctcttgccacctaccctcttgcacacacactgcccccaaagttacatagaacaattacctctctcacttttcatagctattcactcaaatgtcataatttcagaaggatcttccctgacaactttttccctcacccatggcattcctatctcccttattctgccttagttttcgcaatagcacttatcaccacctgacataatatgtatttacttgtttatttatttttggtctcccccattaagatattagcccatattccagattccagggctagcagagcagatgatttcaatcaaatctcccacttgaagacaattttaaaagtggaacaaaacacacacacagacacacactttcttacaaacattagaatctaacaagatagtaaggaattaagacaacaattagagctcaaagaggtgaaacaacatctctttggaaaggaggatttgctgatagttaaaaggaagctgaggcagagcttcactgagatcttgggaaatcacccactgtgtatcctggaaccacaaggcctgccattttggctttgaggctttttggcaatggactggaagcagcagacacagagctaagcttttgattactcagatgcatgcaagtttaggaactggtgttcatctccctcaaagacagaggccctaatatagtatcttttgctctggcttgagacaaagactgcaacctggaagcatggtttatggattttactctagcctgccaaaccctcaaatattggttccagactgctaatatactcaggtgtcttaaaggtgaaaaaaagtaaaatcctttgtgaaggaaaataacaccatcctgggtctcaaactatcaataaatataattttaatttttttaccaagctatgaaagactataatgcaaaatgagactcaagacaaatcaagccagaactaaggaaaacagtggacaacaaaaacaagagctacaagagtccaaataccagaattatcagacggatgttgtaaaacaacagtactaatatgctcatggatataaatgctttgtttaaaaatatcagtgcagtcatagaaaccataagaggtgaccttgtaaaactaaaaaagaaccaactagaaattataaaattgaaaaatacaataggtaaaatgaagagctgaatggatgggtttaacagaggattacataaaattgaagaaaaaaattgtaaactggaagctgggtcagagaaaaatatacagaatgaaacctaaagaaaatttttaaaagggaaagtacagaatattgactaagaaacatagaggataaagtaaggtctaacattcacataactggagtataaaaaagaaaaagataaaatggagcaggggcaatattttaagagataatgtcaaagaatttcagagaactaatgaaagacattcaattttactatttaataagcctaaagggtcaaatgaagctaaaagaataaaaagagaaatttgcctccaggccaggcacagtggctcatgcctgtaatccctgcactttgggaggccgaggtggacagagtacttgaggtcaggaattcgagaccagcctggcatggtggcacatgcctgtggtcccagctactagggaggctgaggcaggagaactgcttgaaccccgtgggtgaaggttgcagtgagccaagattgtaccactgcactccagcctgggtgacagagtgagactctgtctaaaaacaaaaaaagaaaagaaagaaagaaaaaaaagaaaataaatctgcctccagaaacatgtagtgaaactgtagaaaatgaaatgcaaggagaaaatcttaaatataacaaaaggaaaaggacagattaccaacaaaaaagcaccaatctgatcaacagctgatgcgaaaagccagtacaagtgaaaaccagaggtcaatggaaagataacttcatgatattgaaagaaataaaaaactaccaacatagacttctttgtccagagaacaaatattttaataagaaaggtaaaatatacagtgatatgaaaaaataagtgatgaactggcaaaatactttcaatttatattacagaaagggtaaatatccctaacatattaaaatcttatttaaaaagaggagaaaggactaacaaccttagaaaaatgaataagagatatgaacaaatacacaggaaaaataaatgcaaattccccttggttgaaaagatactccatgtcatccatgataagataaatgaaattaaaactacagcgagatactgtcttatacctatgagatcagcaaaaattcaaaaatttgacagcatgctatgttgttgaggcttggggaaactgtccctctcattcattgctgttaggaatgaaaaatggttcaacaactaaggaatagaacttggcaaataccgatgaaataatatctgcatttactctttgacccactagtccctcttgcaggaatctatcccaaagatgtgctgaccaaaaaaaaaaaaaaaaaaaaaaaaaggatgcatacataagacttttcactgcagcactgtgtgaaatagcaaagcctggaaacaactcaaatacctgtcaatgggtggctggtatactcacccaagtgataactctacagttatcaaaaataagaaggaatctctttataaactactacagagtaatctccaagatatatttttaagcaagaaaagcaaggtggaaaagtaaatactattggttatctaaaaggaagagataaaaacatgcatacacaattgatagtatttaaaaatagaatgataaataataacactttaaatatgattacttatagaggattacataaacaaccacccaagataatctgcaatcaaattgtgaaaatcattaagacagttgactagactagtcccagctacttggggaggctgaggcagaagaatcacttgaacctggagacagaggttgcagtgagccaagatcgcgccactgcactccagcctgggcaacagagcaagactgtctcaaaaaaaaaaaaaaagcataaaggaaaaatttgataagattgaaattttaaaatatatattaaagacaccattaaaatagattaaaagacatgtcacagactggggaagttatttgcaagcaaatccataatatatgaagaactgttatacattaaagaaaagacagataacctaaagatactataaaaattagataaaaatatatgaaaaggcaattgacagaagaggaaaaacagttggtcaataagtgtatgaaaagttagccttcagtagcaatcagaaaaatacaaattaaaaccacattatcattatacatttattagaaatgaacaaaaattaacaaatgacaatgctaagtgttagaatggatgtggagaggtgagaacttttatacactgctgttaggtatgtaaaatggtacaactactttggagaacaatttagtaatagcaagtgtagttgaaaaagcatatattgtaaaatctagtaattccactcctagatgtataccctggagaatgtgtcctacatatgctcaaggaatcatatacattatttataagaggaacaatttgggaacaatttaaatgaacaaacataggaacatagataaattgtagcataaccatactgtagaacactatagagctataaaaatagaattgaatgcatcaacatagttgaatatcataaacataaattttatccagaaaacattctggctaagagtacatacagtaaggtcgggtttggtggctcttgcctgtaatctcagcactttgggaggccaaagtgggaggattgcttgaggccaggaggagtttaagaccagcttggctaacatagtgagatcccatctcttaaaaaaaaggaagggggaaaaaaaaaacgagtacacacagtaagatgccttttatacaaaattgtaaagcatgacaatgctatagattatttggagaagcatacatatgcagttcatgtataaagagatttacagaggctgggtgcagtggctcacgcctgtaatcccagcactttcggagacagagacgggctgaccatctgaggtcaggagtttaagactagcctggccaatatggtgaaatcttgtctccactaaaaatacaaaaaattagccaggcatggtggctcatgcctgtaatcccagctactgtggaggctgaggcaggaatctcttgaactcctgaggtggaggtttcagtgagccgagattgtgccactgcacgccagcctggggcgacagagcaagactttgtctcaaaaaccagcaaacaggctgggcgcggtggcttacgcctgtaatcccagcactttgggaggccgaggcaggcggttcacgaggtcaggagatcgagaggctaacatggtgaaaccccgtctctactgaaaatacaaaaaaaaaaaaattagccaggcgtggtggcgagcgcctgtagtcccagctactcaggaggctgaggcaggagaatggcgtgaacccagaaggcagagcttgcagtgagccaagatcgcgccactgcactccagcctgggcgacgttgcgagactccgtctcaaaaaaaaaaaaaaaaaaaagttttgcgggtttttccccccgcccctttgccccctccccccgcctttattcagcttccggtagacgctggtagggtaagggagctaagtagatcacttccgggcgactgttgttttatttccggtttatgcgacccggctgcgatttgctgctgagggcagcagctaccgtcactgccgccatcatgtcagactcggacagcgaggaagattcatctggaggtggcccatttactttagcgggtatccttttcggcaacatcagtggagcggggcagctggagggggaaagcgtcttggatgatgagtgtaagaagcacttggcaggcttgggggctttggggctgggcagcctaatcactgaactcacggcaaatgaagaattgactgggactggcggtgccttggtaaatgatgaagggtggattaggagtacagaagatgctgtagactattcagacatcaatgaggtggcagaagatgaaagccaaagacaccagcagacgatggggagcttgcagcccctttaccactcggattatgatgaagatgactatgatgctgattgtgaagacattgattgcaagttgatgcctcctccacctccacccccgggaccaatgaagaaggataaggaccaagatgctattacctgtgtgtctgaaagtggagaagacatcatcttgccctccatcattgccccttcctttttggcctcagagaaagtggatttcagtagttactctgattcagaatctgagatgggacctcaggaagcaacacaggcagaatctgaggatggaaagctgacccttccattggctgggattatgcagcatgatgccaccaagctgttgccaagtgtcaccgaactttttccagaatttcgacctggaaaagtgttacgcttcctacatctttttggaccagggaagaatgtcccatctgtttggcggagtgctcggagaaagaggaagaagcatcgtgagctgatacaggaagagcagatccaggaggtggaatgctcagtagaatcagaagtcagccagaagtctttgtggaactatgactatgctccaccaccacccccagagcagtgtctcgctgatgatgaaatcacgatgatggttcctgtggagtccaaattttcccaatcaactg

SEQ ID NO: 2582 - DNA, 6000 bp, Homo sapiens
cattctttccaagtcagatagtcttctgctgctggtacctgggtgggcaatggccaccatgtctgcacacaccagaaatggacattttcatatgcaatggaaaacagccacaaaaaaacctaccttatatggaagttgtagccctctgcagctcagccctgtacatatacctgtccctctctggcttggtccccttcctccctactttctgtaaatatctgtatctaaaccagaatattttggtcaaatataaaacaataataaaaaaagttctgatgtcatagtgtgggataggggcaatcccaaggaaaggttatggggtatgcacacagtgactcacagaatcactaaattagcagtcttgggatgagagagaaccctttatgtaaagcctcttcaagtacagtgagaattaacttcctcccgacctctctagtgcagacagaaatagattccatattccataccccacttccctcctcacccctcagaaaggagtcattctcccccctccaccacccagccttcctccgggacagggaagggaagatatttctcccaattggtaggggtaattctcaggttcatagggcaaaagtttccccagagacaagggtactggtgttgagaagctgcagttcttccggaatggtgtgtccaatgtcctgatgttactgacaccctggaggagtgccaggatgaggatggatcccactctccccaagccagaacaaaacaactctgccctacctttcctgccccgctctgcccccaacacctagtcaccctcacacaccggcagctgtggtgccctctgtatccagaaggtctcaggttgctcctggcggtagtcgtgaggctgtgagggagggtactgagtaactcctggccttcagccctctctctcaacctctgggcttggtacttggccacagcctgtcagagcccagctggtgcaagtggcgggggatggggggtgggttctcacctttgttggggcaggagtccctgcttgtgccagctccattcggtagtcatggtgtgtcacagactcaacctcgaagagcttccttgtgggttcctgttctgcctgcacctctttactatgtagcccgaggggtgtcaaggccattctcacccaatttttctcctccccatccctcttcccctttacccaatcccttaccagatctgatgctgcaggagcatctccagcatggcttcacgcttccctgtgagagagttggggggtgggcaaggtggggtctggttaagaaggaggcccagaagaaactaacttgagaaaaggaagaagaaccttggggttccgcccttatatccactggagaatccacagccccaccagaaattccttcctcttcttccctctgagtaatgggctcgttctggcctaccctctcacatttcacacctcgaagtggccaatagacgtttcctggtggctggtacgagtctttctgggtggtgctggagggcatgggtgactttagttgcatagtcagcagtccccggtgtccgtgtcggaagaaaaaactctcagagccatcctgcatgcttgggacttgatccaggtggttggtggctctctgtggatcccaagttgaatgactataatatcccttctggtacccaccctcatgtaaactactgcctcccctaagaaactgagggcagccttcaagaaaagggagcaggccaaaactttaatacctcttcctcccagttgtagaggaggcactggccccgcggcaaagtttcatagcaaaccataagcttccctttaatgtctgggggtttccatagtcctcgggcacccggttctaagacttgcaaaaattcccaaggtggttgtttctggggctcccaggggcagtgctgactccaggaggtatagttagggacccgatctgccaccaggtttctgaaccctggaggaatacaggggctgagctcagagtcagggccagtgtctggaccaggcccagaggcaggaccaggatgagagccagagccatgaccaggaccagagccaggaccagagccaggaccaggaccagagccagagccagggacagagccacagccaggaccagagccagagccagagccatggccagcacctgagctggaaccaagaacaggcccagagctagagcctggaacagggccaggattagaactatggtcagttgtagtgcaagtgtcctgagcaatacaggaaacatagacgggctcaaagccaagactcccatgggctatattgtgggtaaagccgggtcccgcacagggctccccaagaaggctggggtcagaggacggctccatgaactcagaacagggcgctggggtctttgtagataatgcagctgctttggcagtggtgaaggctgcagtagctgcagcagctgatgcagccgctgcagctgctgcggttgcagctgccagggccgacctgggactgtcatctgaagaaggaaacggttccgaagtgggccccagtccttcggagctgggctgtatgtctaaagatctgaaagaaagcaaacacgacatggctgtcaaaagcgcagcagaggaagtcagctgaccttcctcgtccccttatgcctgcagccagagctgcggctctcaccgcgaccgcgaccgcgatccctccgtagactcgttggtctccatcttcagactccagctactgggttgccatagagacagcaaacaactcctggagcctgcgcagaagtacagctgggcggacttgcaggtggcggtggaggcaagtcctctgcggggcggaagtcttcagcctagtgctgttagggaggtccgctttccggtcccggcggcattccgcctcagacggggttttagggttccgctggcttaagacctcgccctccacgtccaaacagtctttgcgtgcggttttctaagatgatgctttatggggatatgttggaaacaggcacagggttgtggcattagattacagcctacttggtgtttgctgagaggcaagtagcttccccttagtttgcttagttcattctcaaaagtgagtggggtctttaacaaatgttaaggatgaaaataaacaaactagcttgagcaaaatggtgagacgtagaatagtgaaaaggcagccgcttttgtttgggtgtgattactcctcctctaataaaagaccctcatattgaccaccctcctcctaagcgcccttagaacctggtttgacctctgaagaagggccaggattggctttcagtttcttcctactcatttaggctcattcctactgttacttttctagaagcttgacctagggtggaccacttgtcaagaagacttacatatctgcaggcaacatttaaccacaggttggacctcctcagtgtctttcactcagaccagtcaaggggcatcatagccctgaatcagttttctttcccctttgtggtataaaattttatattaaagacaggagagcataattaagggagaacagttttattagcatcacagggtccatttttccctttccatccaagcatccagagtctggtgtcctttaatcagttggcaggttcaacctggaggccactggagctgccggcccccaagtacatgaatgtgcagatgatacacagattgtgcacccagcttcccatcgttgatcactgaaattgagcttggggttagggagtcaggatcatggcagaggtcgaagaatgaagatcatattgagaagtaggaatgagaattcataggtgagggaccaagggccaaaagtcactcaccaagtcggtatccatctcccaggccctcagcctttgctgtctgcttggccacaaggagtaggtgtcctagaagctatagagagagcggagggacataggtggcttcattcatagggagcaagacctctagctgggtccaggggctcctcccagccaaaccctggccctgttcttcccacctgctggtcttcttcttcagcctggctaatccgaggaatgggcttcttaggaatgaccaggaagtgcacaggagcctgaggggccacatcacggaacacaagacactgggggaagtgacaggccagaggccacgttacttcaacaggttggatggtatctacaacattcctaaggggataggtcctaagagcaccccacctgctggtcctcatagagaatgtcagctgggaggctcttgtccaggatccgggagaagatggttggggctgctcccccaggagttgcctgctgggccttggccacttcattcccatcagtcacacctgcagctcctcggacctgaaggtggatcgaccatattcaaaggagggagctggcagaagctgggctctgatagttgttaatttcgtccttctaataacctattcatcgttcccacccaggaggaaagttcctgaatttcagagcaccagcagcaaagggtagggccagaaggtgctggacctggttagataacaggcggtattattatcaggattcagcagtgcaattgattcctgctcatgtgtccacgaaatatagcactgtttagggaaaggatctagaatgagagactggggattttggtctcagttcctaccttaccataccactgaattacctcagataaattccttctctcagcttctaatataaaataaagggatggtttccataatctcttgcgatggcttgaatctctttccactctcaccttgttagtacatttccacttatttccgttacttgttttctgatctttaagccttgtcgcctgttttatttaagttttaatgcaatcgccctgtttgacactagttgacccctcatctgggtgtcacatgtgactctgtgaattttaactcttgtcccttgaatgagtggaggtaagagttcagctaagtgacctctgctcccctagccccagggaacttcgggtaagggattcagagaaggctgatgtcattgcatcacgttgggggagaacgggacggaatgaattctctgacctccgagccgcttctggcaagtgcagaagagaggttaacactagtgctcattaggaggccagaagcctgaggagggcagagcactggctccaagaagagaaagctcatttcctgcagggggcatcgggccagctgggctgcaggcagtggaaagaaggcggcagccgctgcactgaccctgtcccgacctcggcgccccggcctgcgcagggcgggaatcagcaccagctcgttctccggagccaccagttcgacctcaccacacagccccggagcttgtgcctcggaggggcagaggccacaggcaggagctctgcgcggctctgcgcgccttcgggaccccctggccccggatggcttcggagcccgcaggaccccctactcgctcccgcgccacttctcacctgccccccgcgcacccccgtggccgccacggctctgcgcgccgcgcgcaacccagcagccagcaccacggctgccgccatcttccctgagccgcgggaacctctcacccgggtcagcactcggctccgcggccggccgtgggtggggactccgggcgcggggaagcggggtagtggcggccgggcgagccctgctaccccattggagcgcgcctctgagcacgattcaccccattgcctctgcagccactttggaggcgggctcttttcatctcattggctgcttctaccaacgcgaggacaattttccattccattggtttcgtcttctagtccgtgtgaacgttcttttcccattggatccccttactagtttctctgtgagagaaacttccactccattggaaggattaatggagcctggaggtgggattttctcctagttgaatctgatacacaactctggcttctaggttgcggctcccgagtgggtggttcttttcgttcttggttcgtcctcttcaggtctggttcctattggtgcgcggggag

SEQ ID NO: 2583 - DNA, 6000 bp, Homo sapiens
ggtctctacattggctggcgctgcccccattacctatgggactgtttccggattggggatgagtccagatgcttttgtggacacttgttgagagagcaccggatcatctcaggtaggggagaactgaccagcccctctcgagtgtggaggaataactgtactctgtcatgtcttgggaagtatgagagagagcatgtggctgggcacggtggctcacccctgtaatcccagcactttgggaggcggaggcgggtggatcaaaggtcaggagatcgagaccatcctggctaacacagtgaaacaccgtctctactaaaaaataaataaataaatacaaaaaatttagccaggcatggtggcacgcacctgtagtcccagctactcaggaggctgaggcaggagagtcacttgaagccaggaggcggaagttgcagtgaactgagatcatgccactgcactccagcctgggcgacagagcaaaactccatctcaaaaaaaaaaaaagcatgtctgcgtgcatagggggtggtggggatggaggatggggttggcatgagaaggcaaggtcctatcagattaaccctaccatccatccccaatcccacagacatatcggtgccctgcaaggtaagccagtgccgctgcttcatgttctgctttatcccatcacgcccagaggaggtgggtgagttctggctcaagagacgggccacctttgaccccaaggcctggagggcccaatgtcgctgcaaacacagccacgaagaacatgcagccactgggccccatccctgcaggcatcatggtaacttctagggcaagaggtgtattgggagcagggtaggtggggataggatgcaatctggggataatgatggagagcaggtatgagagccttgggcatgcggtcactgaggaagagatgagaatgtggtcagctcctggggataccaccatttcctaaactcttcttggctgcacttttgccccaggctgttgctgcggctgttttgagtctaatttcctctgtgcggcctgtgaccggcgctgggaggaacacgagactttctttgacacccagaagacccggcaacgaggaggaaggcctcgcggtgaggcagaaacctgggacagggggccattccagggtctgtagtcagaaggccaggcaggaaggcactcccatcctcaaccatcccttccaggactagcgcgctccctcagcccacctccccaccacccacctacctgcatcccacatctgcactggttttcacccccaggagcagactatgtaccttttgcagagatggctgtgctccgagaagccatcctcagcaactctgacttctaggccctgcagatacaggggccctctggccttcccagctcccaccctagtcccccggggctccctggttcacacggtctccagcctggcctcccttctgacccccatacctgaccctttcacctctgctctttcttcctccagggacagacactgtcagcaactggcacaggcctttgtgagtctggcccagatcagcaataaaagaggagtcattggaacctgacttggctctatatggggcaggtagatcccagcccagggagagactgcctaataacttagagttgacacctattagacacaggagaaagcctggatctggccatctgcctccatcacactcacattcaagctgcctgttgaaggaaagtggcttcaaggaagtcaagaagggaggaagtttcaagaaggatagagtgggaagtgatgttagatgcagttggggcaccaataagataaagactgaaaagtgtccattgggttttgcaattagaagatctttgggaacatcggagagtgcagtttcacactggtgcagtggaggcaggagtcaaacagcagtgagtttcaaggagtctcttaaagaagcttggatgaaaagtacaaaagtaaagtcagacaatatccagagggagttgtggagtcaaggaagtacttttgtaggaaggaaaaggggaagaggccagtagactaaaggaccttgaaggacccagaagagagagaagagatgcctggtgagacaagatcccagagatggaggaaagggatgaggtcaaagcagaggtgaagggattttctctggacaggagaaacaccacttcctatgaccaagacgaaggaagaggatggagccttcctagagtttcagggaacaagaacctgtggaagttcccctctgatggcttctatatgccctgtgaagtaggagataaggccaatggctggggtccaggggaagagggataagagtagggagcaggagacaagaagagaaaggggaaggtttgggaaggctaatgtagggaactggagaaaaacctcatcagtgggtagttcaggattcgggcacagttggaagtgagaacctagttagagaagcagagaatccaaatatttaatgggttgatgatgtgagggtgtcagggaggaagatcaggaaaactaagcaaaagaaggcatgaggatgtgaagggagcatacagcaccaatagggaaagaaagtgatgccaggaggcaaatgacagattgaaaaagggagcagtcaaaggaagagaagtctctaatgaggtacagtagcagacgtaggggcaggggttggagtacaagagacagtgttcagaggctgcagagcataacatctttcagatgagggcaagtgaaggtgataagtgcttgaagtagagaaaactgtgggccaaggatcaaaatcagtgaatgtgggaagtcacaagggagtccataggttcttatgggagtaggagattccagcactaatgggctctgtgaacccaggcaagtcactgtccctctttaggctgagtttctggacctgtaaaacaggaataacctctgtgttgcctactttctatgagaaccaaagaaataactaatttcaaagtgctttgtatccacctatcctccagactggcttccttcctcttcctagatcccagatccacttatctctcgcccttctccagggcaactctagggtctcccagtgtcccagaggcaccacagagaactgcagcctctggggcccagagaagaggccattctacatttcctcacaattaggggggccatctgttcctccaagggaaggaatgcaatctggactgctaggatccctggggaaaatcacagaatcaaatgtctgccctttagaggagaaaggattttctaacaataatatagctatacaaaagagattgttatatctctagaagcaaagttccccaacagtggttatatgccccatgataaccattcacctaaaactaattcaactaatagtcaacaatagagttaggattactatgataaactcattgaaggaaataataagcagccaatacaaactatatttacgtagactgtaaaaatatgaaaaattgattacacatgggttagtatcatatgcaatacatattacatattatgaaaaaaagacaggaaacaccaaatgttattcattcaacaattactgaccacctatatgtatcaggtcatgtgtttaaaaaaaaaaaaaagaaaaaaagaaaaaccaaagaaacagtggtaacttgtcctatgtgatatcagactaaaacttacctagcgtctgagaatattagtattttgtgaccccacgtttcttatgtcaaaaatatatattccagcagtgcaaacctgacttattggtgcctcatacctgtaatcccagcaccttgggaggccgaggcaggaggatcacgaggtcaggagatcgagaccatcctggctaacacggtgaaaccccgtctctaataaaaatacaaaaaattagccgggcgtggtggcgggtgcctgtagtcccagctactcgggaggctgaggcaggagaatggcgtgaactcgggaggcggagcttgcagtgagccgagatcgcgccactgcactccagcctgggcgacagagcgagactccgtctcaaaaaaaaaaaaaaagaaaaaagaaaaaaagaaaaaaaaagaaaacaccaggcaccgagctaactgtatcacacaccttttccgattagaaaagaacaatgaatacatactcctttgcttattataattcttgtgcggcaaatataggacactcttatctcctcctgctcaaaaaaaaaaaatgcaaaaaccacagactttttaatctatggagtgaatgcgttaacaagaacatagaattaaggaagaatttcccttagataagtacattaaaatctccaaaatgctcaagggactgaaactgcccttgtggagaaaatgctgcgcatcagccccgccagttaaaacaaacaaacaaacacaaaaaaacacacctcatccccgttcacctttagccccaccccgggtggttcttggagccaataagcgccggatgccctcagagccccgccctcctcctggccaaagcggtgagagggtctaaaacagccctttctgcagcaggtggcggagccccgcccccttctccccgcgcaccaataggaaccagacctgaagaggacgaaccaagaacgaaaagaaccacccactcgggagccgcaacctagaagccagagttgtgtatcagattcaactaggagaaaatcccacctccaggctccattaatccttccaatggagtggaagtttctctcacagagaaactagtaaggggatccaatgggaaaagaacgttcacacggactagaagacgaaaccaatggaatggaaaattgtcctcgcgttggtagaagcagccaatgagatgaaaagagcccgcctccaaagtggctgcagaggcaatggggtgaatcgtgctcagaggcgcgctccaatggggtagcagggctcgcccggccgccactaccccgcttccccgcgcccggagtccccacccacggccggccgcggagccgagtgctgacccgggtgagaggttcccgcggctcagggaagatggcggcagccgtggtgctggctgctgggttgcgcgcggcgcgcagagccgtggcggccacgggggtgcgcggggggcaggtgagaagtggcgcgggagcgagtagggggtcctgcgggctccgaagccatccggggccagggggtcccgaaggcgcgcagagccgcgcagagctcctgcctgtggcctctgcccctccgaggcacaagctccggggctgtgtggtgaggtcgaactggtggctccggagaacgagctggtgctgattcccgccctgcgcaggccggggcgccgaggtcgggacagggtcagtgcagcggctgccgccttctttccactgcctgcagcccagctggcccgatgccccctgcaggaaatgagctttctcttcttggagccagtgctctgccctcctcaggcttctggcctcctaatgagcactagtgttaacctctcttctgcacttgccagaagcggctcggaggtcagagaattcattccgtcccgttctcccccaacgtgatgcaatgacatcagccttctctgaatcccttacccgaagttccctggggctaggggagcagaggtcacttagctgaactcttacctccactcattcaagggacaagagttaaaattcacagagtcacatgtgacacccagatgaggggtcaactagtgtcaaacagggcgattgcattaaaacttaaataaaacaggcgacaaggcttaaagatcagaaaacaagtaacggaaataagtggaaatgtactaacaaggtgagagtggaaagagattcaagccatcgcaagagattatggaaaccatccctttattttatattagaagctgagagaaggaatttatctgaggtaattcagtggtatggtaaggtaggaactgagaccaaaatccccagtctctcattctagatcctttccctaaacagtgctatatttcgtggacacatgagcagg

SEQ ID NO: 2584 - DNA, 6000 bp, Homo sapiens
gagtcatcaggcctcccaggtcagaatgcacagctagtaggtgggggccgggggaatgttcccccaaagggaagcccagtgaggcagtgagttagtgacccagtggatttcaagccccttgggaatattcagagcaggccgagttgggaggtggggaggaagtggtcatccctcattaaaatgccaagatacctgatcatgattgtcaggagcagagccaaggtgagcagaagttgtgtcagcagctagccaggcaagggactagaatagctgtcacagtggaggcaaccagtagcagacaggggaagagggtcccaaatggcaggcaaggtctctcaaagtaaacctctagggaatctgactgctctggagacttcggaccagccagaaaagaagcccaagatgacacctccaggacaggtgagaaggtggggaactcagcagcttcaggacagacccggggctggaataaggactactctggaggggcattttcagccaagcaggaaataccctcagggctaacctagtccaatcatctccctctctggagatgggagagattaactccaaaaatgaggtgtttttgaaataacaaagaaagggaaggggaggctgctgaaggacgaacactgaaccagagcaaccccaggagtcaccccagagagctgccctacataggtgggggccattggaggccacggttacactcaaggactagtctgtccagttcagaccacatgatcagtctcaactgtcaggaaggaaaacctgtcaccttgcaagctgagcactgcctaggaacccagagaggctaccagtgcagcattcagagagtgatagagatgcagccgagagggataaagggaaatgggaccgactgatggaagagacgggtttcctaggaaccctagctgtgctaagtaggaggcagaaggctaagaggtgaacagcctggatactattgttagaagaaatcagaactctagcgcaccttctgctggggttagggaagggctgatcctcctcaaagctggtaccagggatgggtcatctgatcaaccattgctaccgttaggagaaatgttggtcagtccctcggtgcagaccctcagatgagggctagtggtgaaaagcagtttaatgacctttgggaaacatggacagacaagcacaaagatccttgtaattcaaaggatcacagtatggcctggggaactggggaactagctaagccatccccacagtggccaggggctacagaggtcacagaataggccagtgagataaaggagtgagcagcagctgggaatgctaggaggaacttggaagaagttctgagggcagatgcttgagaaagggtccacagccccattcactccaaactttggtttgcggtttgaacagggcctaccagagctgtgtccagaagaagcatgagtaaggcccttaccgagttcagatgaacttattccaggttccccaatatttctatgatgaagctagggtaattccgaccatcacccaccccatacacacatacacatacacacacacacacacacacacacacacacacccctacacctacacacataggctgaggctggccctgctagtaatagcactaggtagaataaaagcccatttttttttgaatagcaaggcacgtgtgagtcctcaactaagcccaaggaaaagatccaaggatcaggagtgggaccactagacccaagagataacttccattcctgaaatgaaaccgaagcaaccaataagcactgtgcagccctgtgccatgatggtcctatgacactgccagcctctcctcagacaaaacccatcaccaccattaggtcacagagcaccctgtactttggtccaaaattgccaaggcattcattattaacagcactaaaggcagccctgcctccatttgggtgtattggtactcttttccaacttcattacaattctccccaaagcacctgaacctgcttctgggcaacagtgtttttatccacaactttcagctgtatatgctctgtggctgtcggtcaccctgctcccctcaccagcccaatgcttgctcaatgggcacatgaagaagccatgatggcagaggatggaagctaggaacttggcccaacagcataaacttccccttaccaaaactgaaaacctgactggctactgcctctgcccagtgtccaatttgccagcagcagtaatcaacacagagtgcctccacagctccttccttcaaaggcactggctggggatggatggataacttatattcgttatgggaggcatgcaacactgccctcacccttggaactgctgagaaagggtctccagccccattcacagcttcagtgatctgtccatatgaggaggaggcagagctgaagaggaatgtacatgggccacaacatgtcccctccccttcataccataacacaggcgctcagaagatacactggctcacatgcaccccacacacatgcacgtgtctacacttaacaacacacaagcatgtacacatgctgccagcctccccacaatccctcagttacacacatacacataagtgaccagacatctctgcaggggttgtgacctttcacgtgcattcgtctccttaagtttgtacactgaaccaggcccccagagctcactgatacccattctccaccccccagctgttctgttggctgttatttccaaagactccatcaggcacatctccatcctatctagagtgacacccaccagaggtggctacagacttgggccatgaagactacagtcactccatgatggagccatcttcatggcacatcccctagaccaggacaccccctcctcctcccacattccaaccattaaaaaattggacctctctctcttctgtccaagtcacttccccaccggagggtggcccttggctgacgcctggcaaataaggaacagtttgtggataaagcacccttgtgggcagaccggggagaagggaggttatgctttgagcctttccccacttgggtctatttttctattaagtatacattgcagtggataaaaaaaaacacactagtatgaaataggaattaggaaaccttttttctagccccagcacactgccattcacaagctctctgactttggacaaattgctccctccctgagcctcagtttccccatctgtaaaatagcctccgagtttcagccctgctctaaaagtatcaggaattattcctaggcaaatcaatcttctttggaacaagaatcattacaagaagaaaactcattataatggcaactaatccatattcatctatttgctacatattatctttaaaactcttcttcatgccgtttgaatgcatgcccaatatctcaaaggtttgggctatatattcccacactacactaggggcttctggtgtgggactgtctctcccccatcaaactttgtgagcaggagcaaagcccacaacatttccctggaaaagcaagagtcaaagtggggtcaggacagacaccagaaaaaatcttggagtctctgtgctagaaactgtaagccacctgctgagcctcaaacccaattaattaccactcttttgaccctgccaatccctgttgtgtaagacctctctactctctatttctcccacttgctccccaatgatctagttccccaggtcccacctctcctgaatctctccagcccacccctccctgccggaaccccattcctgcctcaatcttccctgcttctgcactcaccagcccctgggccaaggacagagaacagcaacagcagcaatagggctggcggcagctgaaacccagacttgagtctaggctgggagaggggcagagtatgagagataggggggactagagggagagacttgggtaaacacagagatgagggcaaaggctgagataatgggttgggctgggctggacactggggcttgaacaagggcagggagtgggatggaaggaagggctgtgatggggactgcagcaagggacggggttgagccagggccttaagcaaacactgggaatggggctgggacagggcctgggctgggatttgtgacagggggtggaacgagggccgaggccgggatgggggccaggccaggggcagagactggaagggggtcctggatggggacccaggcaggggctggggccgatgtgggaagcggggcgagggcggggctgggggccaaggcggggattgggataggacgaggggccgggacaagggctgggccatggcccggggcgggggcggggccggacaggccagcgcggggcgctcgcagagctggcccgcggctccgctccccacccccggggggtggcctccggtgtcctcgcgggcccggggcgggggccggggacctgggtaggagttcaggcctgggcgactccgggctgcgctgaaccggcgataaccaggccccgcggcggcggcctcgacttgacgtcggcgtgacgccccgccccccggccggctcgattggtccctgtcagtaaagcccgcccccgccctactctattggtccccaacttagtcctgctgggcttcgaggacacacagactccgcccccgcctcagctacccgagaccctgcctttctcaccccaagcacagagcccgaggtcccctcagatcctcacagcccccaacgaccgccccacagatgtctcaaaggaaccctatcctcacaatcccagactcccccggacgtacgcacagatctccgcagatcctacccaaacactcgctcacagagatcccgcaacacacaccccacttttcagaagtaaaccctctgggctcgccccctcgaggcccaatgcaagcccctcaggagaccttacccaccggggaggtgaccagaccgccgttgccacggagactactaggcgttccggttgccctggtgaccggcgcctactctcctggcccgggttccggaggcttcagtcaagaccctccctcattggccctagaccccttgtccctacccacttccccaggtcatgccagagctcctttgcgaagttctgcagatatccaagtccccttcccagatagcagactttcaggcaaggcatttcaacactcagcacctgcagctgaggcacatccacaaccaagagcctttcctccctgaggatcaacacctccccctgccatcctaagtcaaggtcttgacctaaggacttgtaacaaccaagccaaagcccagagggtaggtggtttctccaacggcccttgccctcttccctcaaagacatctgtctttctcccacccctcagtcccttcacattgttgtagtagtagtagtagtagtagtagtagtagtagtagtagtagtagttgttgttgttgttgttgttgttgttgttgttgttgttgtttgagacagagtctcgctctgtcccccaggctggagtgcagtggtgcgatctgggctcactgcaacctccgcctcccaggttcaagtgatttgcttgcttcagcctccccagtagctgggactacaggcgcctgccaccatgcccagctaatttttgtatttttagtagagactgggtttcaccatgttggccaggctggtctcgaactcctgacctcaagtgatccacccgccttggcctcccaaattctgggattactggcatgagccaccatgcctggcccacattctgtacttttcatccttactctcctcctccacccaatttcctcctccccttctctttccccttcctcacctcccatcttctggttctccactcttaggccccttttctctctagctgactctggtcatcttcctccctgtaatcctacctctgcccctaattcccttcccaaacatccccttcaaaaaggctctgatgcatttaaggagtgatatatctagcgtctctggaacatgggggtaaagtagggagcacgg

SEQ ID NO: 2585 - DNA, 6000 bp, Homo sapiens
gtcatgtcagaacagcaagtctcctggggactgtccagggtcctgggccatctctgctttagggtctgtaggctctctgggccctatatctggggtgggccatgacccttctgtttttttttgttttttgttttttggtttttttttttttttgagacggagtctcgctctgttgcccaggctggagtgcagtggcgcaatctcggctcactgcaagctccacctcccgggttcacgccattctcctgcctcagcctcccgagtagctgggactacaggcacctgccaccacgcccggctaattttttgtattttcagtagagacggggtttcatcgtgttacccaggacagtctcgatctcctgacctcgtgatccgcccatctcggcctcccaaagtgctgggattacaggcgtgagccaccgcgcccagccgacccttctgtgtttaataattttagttcagctacctgtctctacctgggctttatatgaatctccccactttttgtctgcatccacccttgtattccttggcccacttgcctgctccttttccaggcaggtggtatagccatttccaaaaggggaagctatctgctgaatgttcaggttcccagatcttttggattagaggatgcccatgggcctgtcacaggcctctgaaaggccacatgggctcacctgtctggatggcattcagggctgcatccttctcccactggaaaagattgttcacttgagcaccaaactcctctctatgcattgccttagccacttccaccagctctgtctgcctagcagggaacactgggcgggctgtgttacctaggatgggagaggatgagtaaccagggggaagtgagaaggccctaaaactaagagaaggggccatgtccaagagtaacccagtctcctcctcctggggcaagtcaaggacagtgaatagtagtgagaacaggacaggggagaggacaggtacaattacagctaactcctttcttcttcttcttcttgcctagttggtgtccaggttgggctgtgtgagcagtgctgtcactggcatctactcccttttcaacctctcctgcttcttcctcctgcttttcggttgtgtccacttggacctgggatgaagggcctgaaagacagtgttctggaaggctctcagattcagagagatgggtagacctccttgtccatgggacctcattggaagaagactcagaggagaggtcttccttcagagtatcagaagaagacagacagacatagtctcgtgattggggaggaagagtaaggtgtttctctggcaccactgagatgggactatccaatgaagcctcataggtaggggtctctgaaggagtctcagagatggaaggctcctgatgggtttcaggggaatgggcctctaaggggatctgggaaggggatggcaccaaaggggattcagaggtatggggctctaacggggtctcagaggtggaaggcttcaagaagctttcagagatatggttctcctgtaagtcctcagcagaggggtcctttgaaggggggtgcttctctgcatccatggtgatatgaggctcttctatgatctcatgtgcttccatctagtggtagaacagggtacaggcttcattaggttggaaatagagggccggcaagtcagggcagagcccagggttcgcagtgcattatggaatttggataaggatatcagtgcagctgagatataagagggaaacaacatgaactctgggtcctagagtgtgatgccaaaaggttcacccatgtgtccagacctcatatggcatgctgctgtggcttgttagggagctggaacttaaagattgaaagactgaagtagttcgaatcccatcagtagatggtagcagagaaccatgtcccaggagggagtctgaacaacaccacttgggcagtccaagagcagggtccttggcatatcttaaaaccctggaggtcagaccatggagttctagagactggcaataccaagccaaagttggggttggctcctgagagtgcaggggaatgctgtcacataaggcaagacactgcacgcagcctggttttgtctaggcaccacacacatcctcctcccttaatgatgtcattcatgttcaaagctttaactacttccagttgtgtaccaatgactcctaaattcacatttctagctcagacctttttcaacctctgtacttcacactcatacccacctgcctgctggccttctcttctcttctctttttgtgatggagtctcgctctgttgcccagactggagtgcagtggcgcaatctcggttcactgcaacctccgcctcccgggttcaagtgattctcctgcctcagcctcccaagtagctggaattacaggcgtgtgccaccatgcccggctaagttttatatttttagtagagacggggtttcaccatgttggtcaggctggtcttgaactcctgacctcaggtgatctgccctgcttggcctcccaaagtgctgagattacaggagtgagccaccgtgcttggcccctgctggtcatttctaactgagtgtttccacagacagcaaaactgaactttgggaattatcctagtcttttccttttcccttagactccatcttcaaataggcaccaataactctatttcctatcttctaaatattccccaaatgcattctctcctctcccttccaattttattcaagttctcatcatcttcagcctttgtgtaataactttgcccctctacttccatccacagcattttaatccattcacccattctttcatggatttatgtaacttatacttttacaatgagcctaatctgatgcttttactgacccgctgtgctaagctctagattgagttgagtctaggagagagaccgattaaccaacaatggcaatacaaataaattgatgttgttctggggtgagtctaggatacggtggggagggggatatacctaatttatcctgcaaggatgtagtcctccttcctgacccaatcaggatctttctaaagtgcaagcccaacaactggcactttgtggcttaaaaacattccatgactcagtctaaaggattaagtccaaatttcttggccctggcattcaaggcctgtcatcattttcaacacagcctgaggattcctgccttaactttccgtgctccctactttacccccatgttccagagacgctagatatatcactccttaaatgcatcagagcctttttgaaggggatgtttgggaagggaattaggggcagaggtaggattacagggaggaagatgaccagagtcagctagagagaaaaggggcctaagagtggagaaccagaagatgggaggtgaggaaggggaaagagaaggggaggaggaaattgggtggaggaggagagtaaggatgaaaagtacagaatgtgggccaggcatggtggctcatgccagtaatcccagaatttgggaggccaaggcgggtggatcacttgaggtcaggagttcgagaccagcctggccaacatggtgaaacccagtctctactaaaaatacaaaaattagctgggcatggtggcaggcgcctgtagtcccagctactggggaggctgaagcaagcaaatcacttgaacctgggaggcggaggttgcagtgagcccagatcgcaccactgcactccagcctgggggacagagcgagactctgtctcaaacaacaacaacaacaacaacaacaacaacaacaacaacaactactactactactactactactactactactactactactactacaacaatgtgaagggactgaggggtgggagaaagacagatgtctttgagggaagagggcaagggccgttggagaaaccacctaccctctgggctttggcttggttgttacaagtccttaggtcaagaccttgacttaggatggcagggggaggtgttgatcctcagggaggaaaggctcttggttgtggatgtgcctcagctgcaggtgctgagtgttgaaatgccttgcctgaaagtctgctatctgggaaggggacttggatatctgcagaacttcgcaaaggagctctggcatgacctggggaagtgggtagggacaaggggtctagggccaatgagggagggtcttgactgaagcctccggaacccgggccaggagagtaggcgccggtcaccagggcaaccggaacgcctagtagtctccgtggcaacggcggtctggtcacctccccggtgggtaaggtctcctgaggggcttgcattgggcctcgagggggcgagcccagagggtttacttctgaaaagtggggtgtgtgttgcgggatctctgtgagcgagtgtttgggtaggatctgcggagatctgtgcgtacgtccgggggagtctgggattgtgaggatagggttcctttgagacatctgtggggcggtcgttgggggctgtgaggatctgaggggacctcgggctctgtgcttggggtgagaaaggcagggtctcgggtagctgaggcgggggcggagtctgtgtgtcctcgaagcccagcaggactaagttggggaccaatagagtagggcgggggcgggctttactgacagggaccaatcgagccggccggggggcggggcgtcacgccgacgtcaagtcgaggccgccgccgcggggcctggttatcgccggttcagcgcagcccggagtcgcccaggcctgaactcctacccaggtccccggcccccgccccgggcccgcgaggacaccggaggccaccccccgggggtggggagcggagccgcgggccagctctgcgagcgccccgcgctggcctgtccggccccgcccccgccccgggccatggcccagcccttgtcccggcccctcgtcctatcccaatccccgccttggcccccagccccgccctcgccccgcttcccacatcggccccagcccctgcctgggtccccatccaggacccccttccagtctctgcccctggcctggcccccatcccggcctcggccctcgttccaccccctgtcacaaatcccagcccaggccctgtcccagccccattcccagtgtttgcttaaggccctggctcaaccccgtcccttgctgcagtccccatcacagcccttccttccatcccactccctgcccttgttcaagccccagtgtccagcccagcccaacccattatctcagcctttgccctcatctctgtgtttacccaagtctctccctctagtcccccctatctctcatactctgcccctctcccagcctagactcaagtctgggtttcagctgccgccagccctattgctgctgttgctgttctctgtccttggcccaggggctggtgagtgcagaagcagggaagattgaggcaggaatggggttccggcagggaggggtgggctggagagattcaggagaggtgggacctggggaactagatcattggggagcaagtgggagaaatagagagtagagaggtcttacacaacagggattggcagggtcaaaagagtggtaattaattgggtttgaggctcagcaggtggcttacagtttctagcacagagactccaagattttttctggtgtctgtcctgaccccactttgactcttgcttttccagggaaatgttgtgggctttgctcctgctcacaaagtttgatgggggagagacagtcccacaccagaagcccctagtgtagtgtgggaatatatagcccaaacctttgagatattgggcatgcattcaaacggcatgaagaagagttttaaagataatatgtagcaaatagatgaatatggattagttgccattataatgagttttcttcttgtaatgattcttgttccaaagaagattgatttgcctaggaataattcctgatacttttagagcagggctgaaactcggaggctattttacagatgggg

SEQ ID NO: 2586 - DNA, 6000 bp, Homo sapiens
aggtgggacctggggaactagatcattggggagcaagtgggagaaatagagagtagagaggtcttacacaacagggattggcagggtcaaaagagtggtaattaattgggtttgaggctcagcaggtggcttacagtttctagcacagagactccaagattttttctggtgtctgtcctgaccccactttgactcttgcttttccagggaaatgttgtgggctttgctcctgctcacaaagtttgatgggggagagacagtcccacaccagaagcccctagtgtagtgtgggaatatatagcccaaacctttgagatattgggcatgcattcaaacggcatgaagaagagttttaaagataatatgtagcaaatagatgaatatggattagttgccattataatgagttttcttcttgtaatgattcttgttccaaagaagattgatttgcctaggaataattcctgatacttttagagcagggctgaaactcggaggctattttacagatggggaaactgaggctcagggagggagcaatttgtccaaagtcagagagcttgtgaatggcagtgtgctggggctagaaaaaaggtttcctaattcctatttcatactagtgtgtttttttttatccactgcaatgtatacttaatagaaaaatagacccaagtggggaaaggctcaaagcataacctcccttctccccggtctgcccacaagggtgctttatccacaaactgttccttatttgccaggcgtcagccaagggccaccctccggtggggaagtgacttggacagaagagagagaggtccaattttttaatggttggaatgtgggaggaggagggggtgtcctggtctaggggatgtgccatgaagatggctccatcatggagtgactgtagtcttcatggcccaagtctgtagccacctctggtgggtgtcactctagataggatggagatgtgcctgatggagtctttggaaataacagccaacagaacagctggggggtggagaatgggtatcagtgagctctgggggcctggttcagtgtacaaacttaaggagacgaatgcacgtgaaaggtcacaacccctgcagagatgtctggtcacttatgtgtatgtgtgtaactgagggattgtggggaggctggcagcatgtgtacatgcttgtgtgttgttaagtgtagacacgtgcatgtgtgtggggtgcatgtgagccagtgtatcttctgagcgcctgtgttatggtatgaaggggaggggacatgttgtggcccatgtacattcctcttcagctctgcctcctcctcatatggacagatcactgaagctgtgaatggggctggagaccctttctcagcagttccaagggtgagggcagtgttgcatgcctcccataacgaatataagttatccatccatccccagccagtgcctttgaaggaaggagctgtggaggcactctgtgttgattactgctgctggcaaattggacactgggcagaggcagtagccagtcaggttttcagttttggtaaggggaagtttatgctgttgggccaagttcctagcttccatcctctgccatcatggcttcttcatgtgcccattgagcaagcattgggctggtgaggggagcagggtgaccgacagccacagagcatatacagctgaaagttgtggataaaaacactgttgcccagaagcaggttcaggtgctttggggagaattgtaatgaagttggaaaagagtaccaatacacccaaatggaggcagggctgcctttagtgctgttaataatgaatgccttggcaattttggaccaaagtacagggtgctctgtgacctaatggtggtgatgggttttgtctgaggagaggctggcagtgtcataggaccatcatggcacagggctgcacagtgcttattggttgcttcggtttcatttcaggaatggaagttatctcttgggtctagtggtcccactcctgatccttggatcttttccttgggcttagttgaggactcacacgtgccttgctattcaaaaaaaaatgggcttttattctacctagtgctattactagcagggccagcctcagcctatgtgtgtaggtgtaggggtgtgtgtgtgtgtgtgtgtgtgtgtgtgtgtatgtgtatgtgtgtatggggtgggtgatggtcggaattaccctagcttcatcatagaaatattggggaacctggaataagttcatctgaactcggtaagggccttactcatgcttcttctggacacagctctggtaggccctgttcaaaccgcaaaccaaagtttggagtgaatggggctgtggaccctttctcaagcatctgccctcagaacttcttccaagttcctcctagcattcccagctgctgctcactcctttatctcactggcctattctgtgacctctgtagcccctggccactgtggggatggcttagctagttccccagttccccaggccatactgtgatcctttgaattacaaggatctttgtgcttgtctgtccatgtttcccaaaggtcattaaactgcttttcaccactagccctcatctgagggtctgcaccgagggactgaccaacatttctcctaacggtagcaatggttgatcagatgacccatccctggtaccagctttgaggaggatcagcccttccctaaccccagcagaaggtgcgctagagttctgatttcttctaacaatagtatccaggctgttcacctcttagccttctgcctcctacttagcacagctagggttcctaggaaacccgtctcttccatcagtcggtcccatttccctttatccctctcggctgcatctctatcactctctgaatgctgcactggtagcctctctgggttcctaggcagtgctcagcttgcaaggtgacaggttttccttcctgacagttgagactgatcatgtggtctgaactggacagactagtccttgagtgtaaccgtggcctccaatggcccccacctatgtagggcagctctctggggtgactcctggggttgctctggttcagtgttcgtccttcagcagcctccccttccctttctttgttatttcaaaaacacctcatttttggagttaatctctcccatctccagagagggagatgattggactaggttagccctgagggtatttcctgcttggctgaaaatgcccctccagagtagtccttattccagccccgggtctgtcctgaagctgctgagttccccaccttctcacctgtcctggaggtgtcatcttgggcttcttttctggctggtccgaagtctccagagcagtcagattccctagaggtttactttgagagaccttgcctgccatttgggaccctcttcccctgtctgctactggttgcctccactgtgacagctattctagtcccttgcctggctagctgctgacacaacttctgctcaccttggctctgctcctgacaatcatgatcaggtatcttggcattttaatgagggatgaccacttcctccccacctcccaactcggcctgctctgaatattcccaaggggcttgaaatccactgggtcactaactcactgcctcactgggcttccctttgggggaacattcccccggcccccacctactagctgtgcattctgacctgggaggcctgatgactctcctttcctggggactctcatggtggcctgccagctcctgtccttgcttttgccacccaagcaggcccctggcagccgtaccacactttcccctcccctctcctgccctgagccagtatacaggcagcgcttgtgaggctgctgagggtttttactgctcctaaccacaggggaacagaaaggggaagaaaatcaacaaggaagttacacagttccatgctgactcccaagccccacaggtggagtttcagcctgctcagtggcttaagacgccatgccaaaatacacacacacacacacacacacacacacacacacacacaccttccacacatctgttttttttaggtttggtaagtggagaaaatggctcctaagtgaggaggcagctgtgaagtcaaagggtcttagttttggatttagagagagctaggtttgcatcctcagtttggtctaggtttgagcctcagtttccttatctgtaaaaggagggtttttttgtttttgtttttgtttttttttaaataagattaacgtaaggattaaaccagatgatggctaggtttcagatctgcagcctgaaacccagttcctggctcagaggagagcatttgtggagttgatgctattggtgaggaagactggcatgcctgttgcttaatggaaatgccctctgtcctgccctgctcctttctctctctcctgcttcccaggaggccttttcctgactgattactccacctgctcaccccgcaagctgagtcctttccgctcctttgccagcaccgagctcttccacttccatgttcctgaggacacattcctggctgtttggaacctcatcatcttcaaggagcaagggggaacttttggggaccactgcccagaccaaagtgtgactgtgtgagtgtctgagttaatttcccaaccccacttccaatccctgaccactttccagactaaagtgtgactttaactgacctcccgaccctgaccccaacccgcgtccagattgaagtgtgactgagtgagggccatgacctctgtcacatgaccacttccggactactgtatgactgtgcaagtgcttgagctgatctctcacctgtggcccctgacctggaaccactttgttgaatgtgtcagtatagggaatctatttgttttatcggtgaagagtgacagttcttttctttctttctttcatttcctgcctcccaccccattgtctgctttcctcctctcctaattctggtcccccaggtatttccggtccggggcaccccctgtcatcaatcccctgcatacacacttcccaggggacacagctgtgcctggggttttctcactgaccctcagctggacactgcccaaccgcacctcaggcatctttaacgtcagcagccccttacctggggactggttcttggctgcccaccttccccaggcccacggccacatctctgtcaaggtgggttgatgttgcccaggctcgggggtccagaactgcccttccatctctgctgaattccccccacaggctctctggcacaccagccttgtgtcagggtgggcagcagcacaagggtggctggggcggggcatggctaaaggccagcaggtcacccagtgggtcagaggccatgatctggaggaggcaacttggcagccccaggaggacatgctgggtccaggtaagctgaagggaaagttgagaatctggagtcagaggctctggcacaggggagtagtgccgcctcctagtggaaggcacaaatgttaatcaaggtgaacagaagccagctatgggctggtccaatctgctgcacacacccaggactggttttattttacatcttgattgacaatagccctgaagactctcttaggccacggcccagtatttagtccatctgggagaatgtattcctcttgcatcataatttcagacagcttcctacacctttcagaagaccacaagagaagctctttcctgctaaaaggaggctttgggcagctagtgtccatcctggcctttgcctcacttttctccaaatatcagccaccccaagcacttatttcacagaggttgttaaagactgaagggcaggttcaaaggtcagatgtctctctggtttggagtggaaggaaatgctgcaatgttttcctgccactctcatggattaggccagacaggtctcctattcctgttcactggaggagaagcagggggtgtgctgagctggctgttgtcagagtgggatggccacgtgcatggggcctg

SEQ ID NO: 2587 - DNA, 6000 bp, Homo sapiens
atcatcaatccctgttgacatctgcattctcatctggtatccatttgtacagatgattcaaataacagatacagcctcctcattccaatcttgaggtcgcttcaggctctcagctgtctcctaccttgcatctcttgaggggcaaaaaaacatttggctgctcttctgtgtggagcatgaaacaggacacatttgcagccatttctactctatacctacatcgtgttaagtgcagatgaattttatgaggtctgtcatttcctgagctccacacagcaaggagaatcagatcccctcttatctcgtagtctcaagcctttctggggattctatgtcccaccccactgcatcagaagaaggagaccagagacgccttcttttcctccagtggctctcctccttccacatcagagtgaatcaaattgctggggactgagggggtaggagggactgtgtctgactaatcatagtattcttccatgtctgttcttcatacaaatattttatgctctcagctataaaatagaccacgttctgatatttcaaaggctttttctctttaaagccattgtctctgcctgaaattttaagtgtatgttttttaaaaccaaaagctaggagttgtcctctttgactatttttctactctaatgatcatctctgaagatgtgaatgccttgccctcatgttttagttctaatgaaggaattactgggaacagaaaatacattaatatttcacaaaattgtcctactgtacacatatgaaatcagatgccataaagtcttagttaactaactcaaaatggacctcttccttattaagctaggtcaattaatcatgatcaaatatgttcaggctaaacaaagtcagaaaaagtatttccattaaagattggctttagaaatttactatgcaaaagttctaaaaaacaatactcctatttaattaaaactacttaaacatctgccatattcttaattttaaaagtttctctttctgaaacagattcaggctctgctgcaggaagcaattaagaaatgaggatatttggccaggaatggtggctcacagctacaatcccagcactttggaaggccgagacagaaagatcacttgagcccaggagttcgagaccagcctgggcaacatagtgagacctcgtctctacaaaaaatcaaaaaaattagctgggcatggtggcacacacctgttgtcccagctactcaagaggctgaggcgagaggatcacttaaacctgggaggttgaggcttcagtgaactgtgatcatgccactgcactccagcctgggtgacagagcaagaccctgtctcatttaaaaaaaaaaaaaagtttgtgtgtgtgtgtgtgtgtgtatgtataaaagaaataaggatagtctgtagtctcagacaaaaatatctgccctcatgaagtaaggaaacaaataataaacaagcaacactttgggaaagtaagtagtatattttataatattatatattagaacctattaatatggtagaaggtaatcatggcttttgaaaatataaagtgtgaaaggggagaagaagttcagaggtggggttgagttttaattttaagaagggcaattaaggaaggccgtttgagttaagacctaaaaaagaaaagggagagtgtacaactatctgggagaaattaattccaagcagaaagaactccaagcacagaggtcctgaggcaggagttacatggagcagttagggaaaggccctgagcaagattggctggaggtgatggctggacacgacagaaacagtaggaactgaagtcagagatagaagaagaggaggaaaggtgcaagaccttgagaaccatggttttttggctcaaaacaaaatcattggtgagtaacattctttaaaatatcgtactcatctctaagcattaacctttttttagaatgaaagataattacactactcttacagtgcttaaaattgcatattggggctgggcatggtggctcatgcctgtagtctcaacagcttgagaggccgaggcgggagcattgcttgagtccaggagtttgagaacagaatgggaaacatagcaagaccacatctctacaaaaaataaaataaaataattagctgggcatgatggcatgcacctgtagttccagctattcaggcagctgaggtgggaggatcactgcaggccaggagttcaaggctgcagtgccccaggactgtgccactgctctccatcctgggcaacagaaggacaccctgtctcaggaaaaacataattacatttgtggttcactttgggctcacacgtgtaattttaagttttctgatagctacatcttaaaaaataaaaaaaataagagtagatacatgttattacaccttcgtctaaacccacagaatgtacaacaccaagagtgaatcctaatgtgaactatggactttggttgatgatgtgtcaatgtaggctcatcaattgtaacaaatgtaccattctggtgcaggatgctgacagtggggggaggtttacatatgtgggggcagggactgtctaccttctgtactttccactcagttttgctgtcaacttaaaacggctctaaaaaataaggtctactttgcctcaacctcctgcctcaacctcctgagtagctgggactataggcacgcgccaccacacctggctaatttttgtatttttagtagatacagggtttcaccatgttggccaggctagtcttgaactcctgacctcatgatccacccaccttggccttccaaagtgctgggattacaggcatgagccaccgcgcccagcccctgtcaagagttttaatgctttccagcagccacacatcaaatgattgccatcaggattagacaacttgaagaacttaccccaactgccaaagcctacatgtgattctacatcccaatgtaactacttatttttttttttcttttaattgagatgggggtctgacaacgttgcctgggctggcctcaaactcctgggctgaagttatcctcccaccttggcctcccaaagtgctggaattacaggcatgagcaactgcgcccagccgcaactgttaataatgatagcatcatgactctttggcccagtgactgtgtcaatagtggtactattactctcagaggggaattgttaaaataaattaaaatgaagaccaggtctgcagaattcctgagcagatagtcaatttagtcctcataagtgaccttaaacttacttgagttaatctgagctatttcttgtaaatgcatatattaaagaaaaacagaacaagctcaaccaatcagaagtagtccacaaacttgtataactagaggctttttagtgggatagaccaaataaggcaactttataactgtaaccaatcaaatattttctttttattactttcccattcactctgtaaaaatctgcttcttcgacagagctgagccccagaaccacttctggtttgcagcttctcaattcatgaatcaccgcgtgctgaagtaaactttaaaattttattgtgcctcagtttaccttgtacacagaagcaacagagtcatcagaggagatgttttagatattttaacttattcatgttttccttttgtaaactcgaaagagaggataaatgtaagagcccaaaaacataaaaaccaactttaatatatggattttgtttagaacttgaaaaattgtaaaaagaaatcatgagacaataagaaaaatgtaaataatgactggatatttaataatattaaggaattttaaaaatgttttaagtaatttagccccaggtgtcttcatgagaatttaaaacggtggtcatgctttttcaaaaaaggaggaaaaagggtttaattcaggaacacacagagaaaaaaagagacaatgaattagctttgctagccagtggcttaaacattctccacgtagctgctgggctgatgggtggggtgggacccacttccaacttgtctcttggacaaagtctatacttctcagccggatattcaaggctttccacatctaggtatacaagcgttctcctatcctcttttcctatcaggaataggtgcttaatagtaacatcaaggccaggcacagtggctcacgcctgcaatccccgtactttgggaggaggaggctgggggattgcttgaggcgaggagttcgagaccagcttgagaaatatggtgaaaccccttctctgcaaaaaaaatataaaaattagccaggcgtggtcacctgcgcccgtggtcccagctattcaggaggctgaggtgggaggatcgcttgagcccgggaggcggaggttgcagtgagccgagatcgcgccactgcaccccagcttgggcgacagagcgactcttgcctaaataaataaataaataatttttaaagtacaacaaagacacattgaggctatagtgccaaagagctctagtgatgaacccttgtcagggggccgtgtctgcgggaggccgaaggatcccgggtgacatgctttctttgggtgcgaggcagcgtctcggcagaaagaatattgcgagtattactgagggtacatgaaggagagaagcccctttggttcggccttggactaagcccttgttctcaggtgaacttgcagtgtgatcttgagtaaggtcagtctcctctctcacctcagtggcccgaaacctcaggaggtggcagaggttttctaatgactctcccagctctgacatcctctgacttcactctgggagaacgtgggctggtggactcctggcagaagccgacacacagttgggccataacaaagagccctggtacggggcacgttcccgcccccgggaggttttggaaacactgtgaggcagggggcggggcttgagcgggccgcagccagtcaccaaagggccgggcgctgggggcggggcctcgcgcgagcggcggcggtagcggcggcagcggctgcggccaagctgggtccgagcatcccgcggctctggagccgcccggcccggacatggcgaccgtccgggcctctctgcgaggtgcgctgctccttctgctggccgtggcgggggtcgcggaggtggcagggggcctggctccgggcagtgcgggtgagtaacctccagagcaacggttcgaagctgtcgggagcggccgccacagcgctccaagatggcgcggggcagggggcgggggtgcgcgcgacccccagaccctgcccacgtccggcgaccccgggaccccaggtctcagcgctccagaggctggtgccgaggcggggcgagtgaggaactctctccgccccaagatcttctgggcggtgactcgggtttgaggccttggtctgtcacccaccgacacgggccccctcttcggcactgaccccttcgcttgcctctgctgcttgtcagaaaagggtgcgatgcccccgcccaggatcgtcgcgaggtttagatgggatttcggatacgcagccgccctaccgcggccctagttagttattgttacttgttacttgacccgcacttggttcataacgaccttggtggcggtgagcactgacggtccccacagcccgcgtggtgggtcctggactcgggcaggagacattaaaaatcagtaaaccctgtcccccgggggctggcaggcttgaggagagaaattcttgctctacaagaactaaaccaaggatggataggaaactgttaagtgcttattgattgcttcccgcttgctggccttttgagtgcacgccgactccttccgtccaaaagctctctcggtaggagatggggtacagcaggagattgaagtaactcgaattcaaggcagaaatgtccagaggaaatgaagggccatgtatgagtgcacagagggagagaggacatcgacctaggatgagtggaaagtggagtgattccccctagctgtactagacattgaaagatggctaggacgtg

SEQ ID NO: 2588 - DNA, 6000 bp, Homo sapiens
gtgacatattgttgagtcctctgagggcagaagtctatctcctcctactttatctgggttatgttgctaaagcaccaaaaggtaattggtatttgttgattgaggtttttgttctttcactgaaccagtcaacccttttggaaatataattttatattttaaaacttcagaactattctgtattctttaatctctcagggtctttattactgttctttgtagtagaaatgatttggactagttctgagttggctgatttagaagacaagaagtgctgattcttcattcattcaacttatcaaatattttattgacacctatgatgagccattaattgaatgtagaatgtgaagaaaaggaaagaattcaggcagatactagcatctttcacctaagcaattggacaggaagaaaagttctaatgctctattgttgcataacaaaccatctcaaaactgagtggcttaaaagaatatttttttgttatttctcaggattctttgggttgactgagctaagctctgctcttcttgcttgaggcaagaccagaactagagaaaggtgagtgtagtgtctaaagtacaaaatttaaggaggcactcactcttggagtcttggagcccaattatgaaggtcaatgcctccttacattttgcaccaaaatgcctcacttgcttcacgctgatcttgaccctggcttggggtctctctcatgtgtcttcagtaggatggcagctagagctggagtcacctgaaggttcagctgggctggacatccaagttagtgtctccactcacaagtctggtgccttcttcactcacatggctgaaacagcagggagctggccaggcatctctttccttctccatgtatcctctacacatagtaagcatgggcttcctcacagcatgcgagtctgaaggtggtccagatgtcttacgtggtgactggcttctgcagagcaagtattccaagaggcctgataaggtttggctctgtgttcccacccaaatctcatcttgtagctcccataattcccacatattgtgggagggacccagtgggagatgactgaatcatgggggtgtatctttcccatgctgttttcatgacagtgaatgggtctcatgagatatgatggttttaaaaacaggagtttctctgcacaagccctctcgttgcctgctgccatccatgtaagatgtgatttgctcctccttgccttccaccataattgtgaggcctccccagccatgtggaaccctaagtccagtaaacctctttcttttgtaaattgcccaatcttgggtatatctttatcagcagtgtgaaaacggactaatacaaggcccgagtagaagctgcaaggcttcttgtgatctagccttggaggccccagaatgtcagtcactttcactatgtcctattggtcaaagtcagtaaggcctacccaagactcaaggggaaggggattatactctgccttttgatctgagtagtaaggatgtaaaggtagggagaaaagtgatggagaccaattttggagggtatctaccacagtaagcccagtaaacaaataggttttggggatggaaatttagaagtgctcttggggaagcttaagtttgagatgtccttggaaccaagtgaatatatacatatggagatcagagaaagactgagattgaaaacatcaaattaggagatgcaatttaaaatcaaggcactagatgtggttacctaaggagttgagagacagaaggagccaccaggcagtaaaatgagagaacaggggagtatggagtttcggaagccaaaattttagaaagcgctttgaaaaggaggtgatcagtcatggccaatgctgctgaaacgtcatataagctgaggactgagaagtgacaatcaggtagagcaaggttttggtcactagcgactctacataatcgaatggaactcgattatgtagagtgaatcgagtggggaaagtgagtaaaagcaagattttcaagttttcatgaaaatgggatagtgactgaatagggacgtggagtctagaaggttttactattatgtttttttaagatagaagacagtatagcctattgtggtgaatggaaatgacacagtaaaaagtgggctgagaacccctcaggcttgcaatgctaatgctatgtgactgggatgcagaagtccccaaagcatgcagagctcttgggcctcccttaaaccccactgagagctgtatcaaggccaaggtggggcaagtgttaccaaaaacacagcaacaacacagaaaagaaacatgttaactttgagagcagtgattctcaaagtttgagagcagcattccctgagaacttgttagaaatgcatattcttgggacccaccagtccaactaaatcagaaactccaaaaactagggatctgagttttaggatacgtgctaaggtttgggtcccactattctaaaggaactcaacaaaaattcaagtaaagatgaaaccgagtgctgactttgttccttatgggcctaaaataacaaagctttaaagacaagaggggatttttcaattgtctaattggcttcgaaccttacctgtggagggatcccagacacagagaaggtgtctgagttgtccaagtcctccaggccggactgagaggacaactccaaataatagagaaaaaaaaagagacagagagccagggatatggttgttttgatgtgccatgaagttgcagcctttctggatttttttagtatcgatttatattgctgtttgtctaccaatactcaaatcagagcaagacggtccgccttacctcagtctggctcttttaaggtttgattttggttttggggactgcagaggtgcagcttcccacggcagaccaagcgcctctgaggaacgcagcagcttcagcaggtacaggaagatttcccgcagccggaggaatctcctagtgctgggcctccggctgtgacttttgccatttcaaattcacttggcctctagggagaggcagacagcccgacgctgagcgcgtcggagccccggctccctctgcttctggagaggagatttagccttaatttttgtgacagatggagttgatagtctctccacggaaaggggaggaaaaaagcgccagtttttgacaggccgcagacgcccgctgcctctggtggcggaaggctgcgttgcgccccagttaaggtagctcggaaactccctcgccgagaaggcagaggtttcctctgcagagcagcctcccttaaatatactgaggggctgaaacttacactttaatataaacctttggtgcgtgcccatttattccgtcttctgtcctgtgactgcggccaggtggtaattgctcgacattcctgaatatttttaatgctagttaaattttttcattattgcacgtgttgcaagcttatcttcctaagaaattatttcggttgattggatttcggtcttgcaatttgaaaacgatgcctggcgcacgggcggtacctgccagatggcctagctggggctggggggtggcgggcgggttgtaagcatctcatcaacatctccctaataaagtgtgtgcttctttcttgtatgcttctttaaaacagtttcagtctcacattttatctctggattctccccttcccctctgtggtgatcaagacccaaagacagggagcctggaagataaactgagttctgaatccagtcgaaagcacagatgggggccagcgagaattaataaaactacaaaaaaaaaaaaaaagaaaaaaaaaacaaacaaaaaaggcccgtggctgagccggatgcaaacagctgcccctaagccctgcccgctggttctgtgcgcgagctggggctgcatatccgagcctccttaagagtaggaggagctccgggcctccgtcaggctccctaagccgttcctttcaagccctgaatgcctgaatgtgagctgcccaccaccctcccgccctcccccactccgcaaccccactccagcggctcgtaaaaaaaaaaaaaaaaactttcaacaacaacaggcaggaccaatagcatctcgaaaagccgggaaagggggccgagcaaagggcgaaagagagtggagaaaggagaaagcgggcaggctcggagcgcgcggggccggggctcggcgagccggaggagcgttgctaatgtttttgtttgtttgcttttccatgcatgcataatgagggggcaccgcggcaccacgcgggggctcccggcccacttttgtatttaaagcctcgctgctaacgagtctgcagccgggctcagcggatccgctccccgggctcttggtcacccgagaagctgccgccgagtgaagccagggagccgctctccggcagcgccgactttcttgttctccccgcgcttcccggaaagagctccccggagctctgcggaggccggggttgccgcgggcggagggggaggggacgcggggcggccgggccgcgggaaggcgggcagcgcgcggacgccgggccaggaagcggcgcgatgcgagagaccgcggcggcggtggcggcggcgaggcactgagcccaggaggaaggagccgccgcggccgcagcgcgagcagccggcacggggacagccggccgcacaacggatctgcaggcgcggagcaaaatgcacccgccgcgccgcgcggtcctgcagccccgccacggccccgcggcccgcacccccccggggcgacagtgagcctctcccgccaccaccgggggccgagcggagggctctcgggtgggagagcgggaccagatctcgacagctgttcatttccaggaagccaccgcagccagagcgaaaggggaccttctgccaccagcggggcatcagccagcggcgcgcatggatttatgaagacactcatgcaagaagtgggcaggacttggacaaacttttccaccggctccgcgtccgccgctccccgcgcctcgtctcctttcccctcctctcccggcggccgccgctgcccgcgatggtggccgcgctgctgggcggcggcggcgaggcccgcggggggacagtgccgggcgcctggctgtgcctgatggcgctgctgcagctgctgggctcggcgccgcggggatcggggctggcgcacggccgccgcctcatctgctggcaggcgctgctgcagtgccagggggagccggagtgcagctacgcctacaaccagtacgccgaggcgtgcgcgccggtgctggcgcagcacggcgggggcgacgcgcccggggccgccgccgccgctttcccggcctcggccgcctctttctcgtcgcgctggcgctgcccgagtcactgcatctcggccctcattcagctcaaccacacgcgccgcgggcccgccctggaggactgtgactgcgcgcaggacgagaactgcaagtccaccaagcgcgccattgagccgtgcctgccccggacgagcggcggcggcgcgggcggccccggcgcgggcggggtcatgggctgcaccgaggcccggcggcgctgcgaccgcgacagccgctgcaacctggcgctgagccgctacctgacctactgcggcaaagtcttcaacgggctgcgctgcacggacgaatgccgcaccgtcattgaggacatgctggctatgcccaaggcggcgctgctcaacgactgcgtgtgcgacggcctcgagcggcccatctgcgagtcggtcaaggagaacatggcccgcctgtgcttcggcgccgagctgggcaacggccccggcagcagcggctcggacgggggcctggacgactactacgatgaggactacgatgacgagcagcgcaccgggggcgcgggtggtgagcagccgctggacgacgacgacggcgtcccgcacccaccgcgcccgggcagcggcgctgctgcatcgggcggccgcggggacctgccctatgggcctgggcgcaggagcagcggcg

SEQ ID NO: 2589 - DNA, 6000 bp, Homo sapiens
aggaggaggctccagatcattagctgggagaatgaccctgctttactgtgcatgaaagggatttccttctacatgaggttcccatccttctatcttgttcccaagaattaattcttcttaagaaggcaacagacaaagggaagacttttgtgaagaatgaggtaaaccttcaggatacaaagtctaatgtagaattctagagtagatggtgcttggtttccatgcagtatctgccacaaactgaagtattaatattttctggttttaagaatgcaagtaaataaagaaaacaagagagtgaatgtgatatggtttggctctgtgtccccacctaaatctcatgttgaattataatctccagtgttggaggagggacctggtgggaggtgattggatcatggggaagggatggagggagttcccccatactgttcttgtgagagtgagttctcaaaagatctggctgtttgaaaatgtgtagcacccctctcctttgctctctctctcctgccagccatgtgaagaagtgcttgcttccacttgccttcagccatgattgtaagcttcctgaggcctccccagaggcagaagcctataaagccttctgaaccatgagcagattaaacctattttttaaataaattacccagtctttatagtagtgtgagaacacactaatacagggtgtctgtgacttaagacttctgctaagtggttagagcctctgacaactccaaatggccaagtgacatattgttgagtcctctgagggcagaagtctatctcctcctactttatctgggttatgttgctaaagcaccaaaaggtaattggtatttgttgattgaggtttttgttctttcactgaaccagtcaacccttttggaaatataattttatattttaaaacttcagaactattctgtattctttaatctctcagggtctttattactgttctttgtagtagaaatgatttggactagttctgagttggctgatttagaagacaagaagtgctgattcttcattcattcaacttatcaaatattttattgacacctatgatgagccattaattgaatgtagaatgtgaagaaaaggaaagaattcaggcagatactagcatctttcacctaagcaattggacaggaagaaaagttctaatgctctattgttgcataacaaaccatctcaaaactgagtggcttaaaagaatatttttttgttatttctcaggattctttgggttgactgagctaagctctgctcttcttgcttgaggcaagaccagaactagagaaaggtgagtgtagtgtctaaagtacaaaatttaaggaggcactcactcttggagtcttggagcccaattatgaaggtcaatgcctccttacattttgcaccaaaatgcctcacttgcttcacgctgatcttgaccctggcttggggtctctctcatgtgtcttcagtaggatggcagctagagctggagtcacctgaaggttcagctgggctggacatccaagttagtgtctccactcacaagtctggtgccttcttcactcacatggctgaaacagcagggagctggccaggcatctctttccttctccatgtatcctctacacatagtaagcatgggcttcctcacagcatgcgagtctgaaggtggtccagatgtcttacgtggtgactggcttctgcagagcaagtattccaagaggcctgataaggtttggctctgtgttcccacccaaatctcatcttgtagctcccataattcccacatattgtgggagggacccagtgggagatgactgaatcatgggggtgtatctttcccatgctgttttcatgacagtgaatgggtctcatgagatatgatggttttaaaaacaggagtttctctgcacaagccctctcgttgcctgctgccatccatgtaagatgtgatttgctcctccttgccttccaccataattgtgaggcctccccagccatgtggaaccctaagtccagtaaacctctttcttttgtaaattgcccaatcttgggtatatctttatcagcagtgtgaaaacggactaatacaaggcccgagtagaagctgcaaggcttcttgtgatctagccttggaggccccagaatgtcagtcactttcactatgtcctattggtcaaagtcagtaaggcctacccaagactcaaggggaaggggattatactctgccttttgatctgagtagtaaggatgtaaaggtagggagaaaagtgatggagaccaattttggagggtatctaccacagtaagcccagtaaacaaataggttttggggatggaaatttagaagtgctcttggggaagcttaagtttgagatgtccttggaaccaagtgaatatatacatatggagatcagagaaagactgagattgaaaacatcaaattaggagatgcaatttaaaatcaaggcactagatgtggttacctaaggagttgagagacagaaggagccaccaggcagtaaaatgagagaacaggggagtatggagtttcggaagccaaaattttagaaagcgctttgaaaaggaggtgatcagtcatggccaatgctgctgaaacgtcatataagctgaggactgagaagtgacaatcaggtagagcaaggttttggtcactagcgactctacataatcgaatggaactcgattatgtagagtgaatcgagtggggaaagtgagtaaaagcaagattttcaagttttcatgaaaatgggatagtgactgaatagggacgtggagtctagaaggttttactattatgtttttttaagatagaagacagtatagcctattgtggtgaatggaaatgacacagtaaaaagtgggctgagaacccctcaggcttgcaatgctaatgctatgtgactgggatgcagaagtccccaaagcatgcagagctcttgggcctcccttaaaccccactgagagctgtatcaaggccaaggtggggcaagtgttaccaaaaacacagcaacaacacagaaaagaaacatgttaactttgagagcagtgattctcaaagtttgagagcagcattccctgagaacttgttagaaatgcatattcttgggacccaccagtccaactaaatcagaaactccaaaaactagggatctgagttttaggatacgtgctaaggtttgggtcccactattctaaaggaactcaacaaaaattcaagtaaagatgaaaccgagtgctgactttgttccttatgggcctaaaataacaaagctttaaagacaagaggggatttttcaattgtctaattggcttcgaaccttacctgtggagggatcccagacacagagaaggtgtctgagttgtccaagtcctccaggccggactgagaggacaactccaaataatagagaaaaaaaaagagacagagagccagggatatggttgttttgatgtgccatgaagttgcagcctttctggatttttttagtatcgatttatattgctgtttgtctaccaatactcaaatcagagcaagacggtccgccttacctcagtctggctcttttaaggtttgattttggttttggggactgcagaggtgcagcttcccacggcagaccaagcgcctctgaggaacgcagcagcttcagcaggtacaggaagatttcccgcagccggaggaatctcctagtgctgggcctccggctgtgacttttgccatttcaaattcacttggcctctagggagaggcagacagcccgacgctgagcgcgtcggagccccggctccctctgcttctggagaggagatttagccttaatttttgtgacagatggagttgatagtctctccacggaaaggggaggaaaaaagcgccagtttttgacaggccgcagacgcccgctgcctctggtggcggaaggctgcgttgcgccccagttaaggtagctcggaaactccctcgccgagaaggcagaggtttcctctgcagagcagcctcccttaaatatactgaggggctgaaacttacactttaatataaacctttggtgcgtgcccatttattccgtcttctgtcctgtgactgcggccaggtggtaattgctcgacattcctgaatatttttaatgctagttaaattttttcattattgcacgtgttgcaagcttatcttcctaagaaattatttcggttgattggatttcggtcttgcaatttgaaaacgatgcctggcgcacgggcggtacctgccagatggcctagctggggctggggggtggcgggcgggttgtaagcatctcatcaacatctccctaataaagtgtgtgcttctttcttgtatgcttctttaaaacagtttcagtctcacattttatctctggattctccccttcccctctgtggtgatcaagacccaaagacagggagcctggaagataaactgagttctgaatccagtcgaaagcacagatgggggccagcgagaattaataaaactacaaaaaaaaaaaaaaagaaaaaaaaaacaaacaaaaaaggcccgtggctgagccggatgcaaacagctgcccctaagccctgcccgctggttctgtgcgcgagctggggctgcatatccgagcctccttaagagtaggaggagctccgggcctccgtcaggctccctaagccgttcctttcaagccctgaatgcctgaatgtgagctgcccaccaccctcccgccctcccccactccgcaaccccactccagcggctcgtaaaaaaaaaaaaaaaaactttcaacaacaacaggcaggaccaatagcatctcgaaaagccgggaaagggggccgagcaaagggcgaaagagagtggagaaaggagaaagcgggcaggctcggagcgcgcggggccggggctcggcgagccggaggagcgttgctaatgtttttgtttgtttgcttttccatgcatgcataatgagggggcaccgcggcaccacgcgggggctcccggcccacttttgtatttaaagcctcgctgctaacgagtctgcagccgggctcagcggatccgctccccgggctcttggtcacccgagaagctgccgccgagtgaagccagggagccgctctccggcagcgccgactttcttgttctccccgcgcttcccggaaagagctccccggagctctgcggaggccggggttgccgcgggcggagggggaggggacgcggggcggccgggccgcgggaaggcgggcagcgcgcggacgccgggccaggaagcggcgcgatgcgagagaccgcggcggcggtggcggcggcgaggcactgagcccaggaggaaggagccgccgcggccgcagcgcgagcagccggcacggggacagccggccgcacaacggatctgcaggcgcggagcaaaatgcacccgccgcgccgcgcggtcctgcagccccgccacggccccgcggcccgcacccccccggggcgacagtgagcctctcccgccaccaccgggggccgagcggagggctctcgggtgggagagcgggaccagatctcgacagctgttcatttccaggaagccaccgcagccagagcgaaaggggaccttctgccaccagcggggcatcagccagcggcgcgcatggatttatgaagacactcatgcaagaagtgggcaggacttggacaaacttttccaccggctccgcgtccgccgctccccgcgcctcgtctcctttcccctcctctcccggcggccgccgctgcccgcgatggtggccgcgctgctgggcggcggcggcgaggcccgcggggggacagtgccgggcgcctggctgtgcctgatggcgctgctgcagctgctgggctcggcgccgcggggatcggggctggcgcacggccgccgcctcatctgctggcaggcgctgctgcagtgccagggggagccggagtgcagctacgcctacaaccagtacgccgaggcg

SEQ ID NO: 2590 - DNA, 6000 bp, Homo sapiens
ctcagctttgttttaacaatatgtttactcaaccattcaggtgactggagattccaaccacacaccactctcctgggcttaagtctgacactacagctatcttagactttctaatactatacatatagaaatcgtggttttaggtgcaccaagaagtgtcttgaatacctccataaaagctgggaaaagagcgagttagaagcacaagaaaccttgaaaagtaggggggtgggagtgggtatgaggaagtcagaatgggggcatagcttcgttaattactttaggcagcagagaaatctggttatgttttttcagcacatgttaatatcaaataaagagacaccagatcttgctaatctgtcgacccctcagacaaagtttatttgtggtgacttttaaactcccgacttgccttccaatcaccgcgtttaaaatgaaaagctttaaacaaacaccaggaatagaagataaataaactttttttcccccttgcaagtgcctagcttggcgaggttcaggctcaaatccctagaggacagagcgctctcttttgtgttaatgtttaaaagattttccaatgccggagtttattcctactgcaaacatttctatttacaaggtcaagtgtatcagcactcgacacagcttaagagtgtaattatttatctaagggcgtttgagtgtagatcagtagctctggcaggaacccagccttcagccactgctaaacaactcctcacaacaatattacaagttctggtgattgttcctttcccctgtgtgtttacttttgctggtctgaatgttttgcaacaaaattttgtactttttcaccaaaagtgtgaaaatgactttgaagtattgagcttgcaagcttcctaaaacctattggtaacagatgttattggcatgtttgattgagaatggctagtagccagagaggatactcttgggggtaaggggtgatgggaagggggatacaaagaggggaggtctcaggggaaaagggggaggcggggcaacatgtctgagttatcctcaaattatgtacaggagacactattttgtgaattctctccacaaatgcaaacaccaatagaagccagtcaattacatatttttggctgcctcatttacagatgtctaattgttcattaaattaaaggcagaaataatttcttgtcttgtactgtattttcatttcagttgatggttgatagattctcagtgccccctcaacccccctcctcacccattattgggttaaccacaatgtaactctggaaagtaactacaccatattcattgtttaaaactctttactgatgtacatgttttaataaaacaaataaccaaaaaaaatacacaaatccatagttatttaaaaacttaggatttttaaaaaacatgtctataaaaatacaacgtttaaggcagtttggaaatgcatttgtacatttctacaacgtccataaattctcttgaaaataagaatgttaacttcaattctataaaatacactgtacattttaagactgttctaaatatagcacacttcacaatggactgtgggttttgattcctgatgacaaatggattctatacatttcaggggggaaaggtgtaatatggatgtgagtttaaaacttttaatttctttttaaaaataaattatttctgaagcatacaatttataaaaattctatatacaaagtacagcaactggtaacaaaccccagttttaatacattttatatacgatgtaccagggtttagcaaccctgataggagcagaggcaatatacattctccgcatatttaaacataaaatttcttgatgtaaagaacaaaaatgacaaaaaaacaaacatcataaagagactttcatacatggcagtgcagagcttttttaaataaaaagttgcattgttcaacaccatggcaaccccttagatcagcatttttggacccttaatcctaagaaatgtgctaagagatcagagtggtagcaatgaaattaaggtcaagggctcaaacttatccaaaaccaatttaggggttccctctaaggcaatcgccacccaccctcacccccacgtcactgagaattctgggcgcagatacaaacagtgaaagaatgaatcggtaagtgggacttttctgtttacataggattataatatcctcactggccacaatctgtaaaagtcgatactggcacttttttttgccccctcaaaggaaatatgctaatagacagcccctttgcaaatataattcctccttcccaacccttcaaattgctaaggccccactggtcagcaccttccctttcgagtccaggactactgttctgtcccccacatgcttgcttcctcccggacgtcctgaacactgcagctagctttctggacggcagacgagttgggagtttctggagcttggaattggggcgggggaggaggtccaagaagtcaagctccggagaggagcttcaggggaagtgcccagagtcgtggccggggaaccggctacaccaagttgacttggaaaaagttttgggaagtatccccaaccatcccttctatctgtcccaagccacaggtgcccggcgcggggtcgaggcgagcacgggagtgggacgcgggctctcccgcagccaacggcggggggcgcgagggctaaaagagcggcccaagcagcagcagcaagatggaggcgagtggggtccaggcgccccggggcgccaagcggccgccgccgccgctgctcctgcgcccaggcccatagggcaggtccccgcggccgcccgatgcagcagcgccgctgcccgggcgcggtgggtgcgggacgccgtcgtcgtcgtccagcggctgctcaccacccgcgcccccggtgcgctgctcgtcatcgtagtcctcatcgtagtagtcgtccaggcccccgtccgagccgctgctgccggggccgttgcccagctcggcgccgaagcacaggcgggccatgttctccttgaccgactcgcagatgggccgctcgaggccgtcgcacacgcagtcgttgagcagcgccgccttgggcatagccagcatgtcctcaatgacggtgcggcattcgtccgtgcagcgcagcccgttgaagactttgccgcagtaggtcaggtagcggctcagcgccaggttgcagcggctgtcgcggtcgcagcgccgccgggcctcggtgcagcccatgaccccgcccgcgccggggccgcccgcgccgccgccgctcgtccggggcaggcacggctcaatggcgcgcttggtggacttgcagttctcgtcctgcgcgcagtcacagtcctccagggcgggcccgcggcgcgtgtggttgagctgaatgagggccgagatgcagtgactcgggcagcgccagcgcgacgagaaagaggcggccgaggccgggaaagcggcggcggcggccccgggcgcgtcgcccccgccgtgctgcgccagcaccggcgcgcacgcctcggcgtactggttgtaggcgtagctgcactccggctccccctggcactgcagcagcgcctgccagcagatgaggcggcggccgtgcgccagccccgatccccgcggcgccgagcccagcagctgcagcagcgccatcaggcacagccaggcgcccggcactgtccccccgcgggcctcgccgccgccgcccagcagcgcggccaccatcgcgggcagcggcggccgccgggagaggaggggaaaggagacgaggcgcggggagcggcggacgcggagccggtggaaaagtttgtccaagtcctgcccacttcttgcatgagtgtcttcataaatccatgcgcgccgctggctgatgccccgctggtggcagaaggtcccctttcgctctggctgcggtggcttcctggaaatgaacagctgtcgagatctggtcccgctctcccacccgagagccctccgctcggcccccggtggtggcgggagaggctcactgtcgccccgggggggtgcgggccgcggggccgtggcggggctgcaggaccgcgcggcgcggcgggtgcattttgctccgcgcctgcagatccgttgtgcggccggctgtccccgtgccggctgctcgcgctgcggccgcggcggctccttcctcctgggctcagtgcctcgccgccgccaccgccgccgcggtctctcgcatcgcgccgcttcctggcccggcgtccgcgcgctgcccgccttcccgcggcccggccgccccgcgtcccctccccctccgcccgcggcaaccccggcctccgcagagctccggggagctctttccgggaagcgcggggagaacaagaaagtcggcgctgccggagagcggctccctggcttcactcggcggcagcttctcgggtgaccaagagcccggggagcggatccgctgagcccggctgcagactcgttagcagcgaggctttaaatacaaaagtgggccgggagcccccgcgtggtgccgcggtgccccctcattatgcatgcatggaaaagcaaacaaacaaaaacattagcaacgctcctccggctcgccgagccccggccccgcgcgctccgagcctgcccgctttctcctttctccactctctttcgccctttgctcggccccctttcccggcttttcgagatgctattggtcctgcctgttgttgttgaaagtttttttttttttttttacgagccgctggagtggggttgcggagtgggggagggcgggagggtggtgggcagctcacattcaggcattcagggcttgaaaggaacggcttagggagcctgacggaggcccggagctcctcctactcttaaggaggctcggatatgcagccccagctcgcgcacagaaccagcgggcagggcttaggggcagctgtttgcatccggctcagccacgggccttttttgtttgttttttttttctttttttttttttttgtagttttattaattctcgctggcccccatctgtgctttcgactggattcagaactcagtttatcttccaggctccctgtctttgggtcttgatcaccacagaggggaaggggagaatccagagataaaatgtgagactgaaactgttttaaagaagcatacaagaaagaagcacacactttattagggagatgttgatgagatgcttacaacccgcccgccaccccccagccccagctaggccatctggcaggtaccgcccgtgcgccaggcatcgttttcaaattgcaagaccgaaatccaatcaaccgaaataatttcttaggaagataagcttgcaacacgtgcaataatgaaaaaatttaactagcattaaaaatattcaggaatgtcgagcaattaccacctggccgcagtcacaggacagaagacggaataaatgggcacgcaccaaaggtttatattaaagtgtaagtttcagcccctcagtatatttaagggaggctgctctgcagaggaaacctctgccttctcggcgagggagtttccgagctaccttaactggggcgcaacgcagccttccgccaccagaggcagcgggcgtctgcggcctgtcaaaaactggcgcttttttcctcccctttccgtggagagactatcaactccatctgtcacaaaaattaaggctaaatctcctctccagaagcagagggagccggggctccgacgcgctcagcgtcgggctgtctgcctctccctagaggccaagtgaatttgaaatggcaaaagtcacagccggaggcccagcactaggagattcctccggctgcgggaaatcttcctgtacctgctgaagctgctgcgttcctcagaggcgcttggtctgccgtgggaagctgcacctctgcagtccccaaaaccaaaatcaaaccttaaaagagccagactgaggtaaggcggaccgtcttgctctgatttgagtattggtagacaaacagcaatataaatcgatactaaa

SEQ ID NO: 2591 - DNA, 6000 bp, Homo sapiens
tgctgagattacaggtgtaagccagtgcacctggtgtaaatttgggtctttaatccattttgagttagtttttccatatgatataaggggtcaattttttcattttcttgcatgtagagctctagctttctcaccatcattagttaaagagactgtcctttccccattgaatggtcttcataatttttttaaaaatcatttgatcaggtatgtgaagatttacttctaggctctccattctattccattgggctgtctgcctttatgtcagtaccacacttttttgattactatagcttgtggtaagctttaaaatctggacgagtaagacctcctccttttttaagattggttttggctatttagggcctcttgagaatccacattggtttctgaataatttttttttctaattctgcaaaaaagaaatcccatggagattccattaaacctttaaattgttttcagtagtattgacatattcaaaatattaagtccttcagtccatgaacacaagatgtctatttatttgtgtctttctttcagcaacattttttagttttcaacctatgagtcttttgcttccttatttactcctaagtattttattctttttgatattattgtaaatggaattattttcttaatttctgtttcagagtgctcattgttagtatatagaaactattgatttttgcatattgattttgaatcttgctactctgtttatcttgtttattagttttaacagttttttgtggcatatttaggattttctacatatattatcatgttgtctctagacagagatagttttttctttccaatttggatgctatttatttatttacctacattcatttatttatttattagacggagtctcactctgtcacccaggctggagtgcagtggtgcgatctcggctcactgcaacctccgcctcccgggttcaagcgattctcttgcctcagcctcccaagtagctgggactacaggtgcgtgccaccatgcccggctaatttttgtattttcagtagaaatggggtttcgccatgttggccaggctggtcttgaactcctgacctcaggtaatccacctgcctcagcctcccaaagtgctgggattacaggcatgagccgctgtgcccggcctatttatgtatttatttatttatttttctaattgctttggctaggacttccagtattatataaaataaaagcggcaaaagtgaggatccttgacttgttcttgatcttagagggaaagctttcaatctttcaccattgaatgtaatgttaactgtgggcttttcctgcatggcctgtattatgttgaggtggttttcttgtatttatagtttgttgagtgctttcttcattaaagagtgttgaattttgtcaaatgctttttctgcatcaattgagattatcgtctccttttaccatttcttgaagagaatagtgaaataactcccattaccataatcatactagtctttgtgctgtgatgttatgcacaaaatggtgcttcataaagcatttgataattgtacgacagtcttatgtgtgggaagataagtaaaatttagtcatgtaaaagtcattatgcagttattgatttggcaaaaaaaaaaaaaaaaagaaaaaaaagaaaaaagtcactagtccaataaaaaggcatttgctttgaaacttttcttgaacctcaaactagctagtaaaacttgacaaagtggagccgtgtgtggtggctcaggcctgtaagtccagtactctgggaggccaaagtgggaggatccctcaagcccaggatcagcctgggcaacatagagagaccctgcctctacaggcgtggtggtacgtgcctgtggaaaaaagtgccagtttttccaaggggttgtatgaacttgcactcttagcagcagtgtatgagagttcaagttgctctttgctagcatttggtattatctatctttttcatttaaactattctagtgattacaataacactctgttgtggttttaatatgaaattcccttctagtcagggaagttaaacacacatattgcaaaatttattggctgttcaggaatcaccttttgcgaagtgtctattccaggtttttctaattttttttttgtaagattgtctgcttcttcttcagtgttataataaaagttctctataaattctacatgtgagtcctttgtcagatatatgtattacagttctcttttgcctttctgtggctttcttgttcactctctaatggtatctttttttttttttttttaatttgagatggagtctcactctgtcacccaggcttgagtgcagtggcgtgatcttggttcacggcaacctccacctcctggattcaaacaactctcctgcctcagcctcctgagtagctgggatgacaggtgcatgccaccatgcctggctaatttttgtatttttagcagagacagggtttcaccatgttggccgggctggtcacgaactcctgacctcaactgattctcccatgttggcctcctaaagcgttgggattacaggtgtgagccactgtgcctggtctctaatggtatcttttgatgaatagatattcttagcattgatgaaggccaatttctcatttttgtttttcttttagtgtattctgtaacctaaggatcttgaattaatccaaagccattaagatataattttcttctaaaagcttcattatttaccttttatatttagattgcagtccatctggaatcaattttgtgaatggtgtgagactggggtcaatatacattattttccccttatgacttctcaaatgacccagcactatttgtgaagaccatcctttccctactgtatctttttttttttgtttgttttttttgagaccaagttttgctctgtcgcccagggtggagtgccttggcacaatctcggctcactgcaacctccgcctcctccattcaaacgattctcccgcgtcggcctcctgagtagctgggactacaggccgagtgccaccatgcccggctaatttttgtatttttcgtacaggcagggagtttcgccatgttggccaggctggtctcaaactcctgatctcaagtgatccgtaggactcggcctcccaaagtgctgggattacaggcctgagccaccatgcccagcctatcttcgccagttttaatgctaaaaactattccattctatggcactcccttaacttaacttagccatttttccatctgggtatttgggttgttttcagatctctgctatcatcaaacaggaggaatactttgtatggacatcaagtcattcttctgcaattattaacccagaagtgaaatttctaagctagaaaatatttgcttttttggaaaattaataaattatattcaaaactcaaataatgtaaagagacccagtgaaaagtctgcctcctattctgtccccctgtcctcccagtccctcttccaccaggtaaccacactcaggaaatcttgtgtatctttccagatatcttgtaatggatgtacaagcattatttatattcttttctccttttgtttacacagccagtggtactctatgcattctgtcctgcatcttgcctttttcatttaacaacctattttagaaatcttcccattgctgtacataaaaagatttaatacctcatttgaaggaggcaccacaatgatggacatctgtgttgtttccaatagtttgccgttgaaacaacgttgcaatggaataactttgtacatgtcatttcacatgtgtaaaaggtgtctattggggaaattgctagaagtggctttgctgagtctgagggtctgtgcatttgtgatttgatcaacatcgtcaaattatactgccaccagcaatgtatgaaagtgcttgttttcccgtagcttggtcaatgaactattagacctgagatctttagccatccaatatgtgaaaaactgtaactttagtttgcatttgtttattgtatgtgaagttgagcatcctttcagaagtttaaggcctactctgtcctgtctgggtcagagtatgcccttttattttatttttagttttagtttttgagacagagtctcgctctgtcacccaggctggagtacggtggcgcaatctcggctcactgtaacctctgcctcccgggttcaagcgattcttctgcctcagcctcctgagtagctgggattacaggagcacgccaccacgcccggctaattttttttgtattttcaatagagacggggtttcaccatgttggtcaggctggtctcgaactcctgacctgatgatccgcccgcctcagcctcccaaagcgctgggattacaggcgtgagccaccgtgcccggccctcagagtatgcccttttaaaaatctgtgggtacacgtagccaactgacattttaagacaagaggacccacagaccctctttccacaacgcagcccgggacctgtctgtctgcatcaatagtgcctggctttcggagctagaaaacagcacctgcgcgtggtcgaagcctgaacctctacttacaggtgcggagcttccggcttgccaggggaaggagcccgcccctcccggctgcgtgcaccagcgcagctagtcacgtgacgccgggggcgggggcagataggaggtgcctgctgtcatcgttccgtgggccctgctgcgggcacgctctcggcgcatgcgttttttatgcgggattaagcttgctgctgcgtgacagcggagggctaggaaaaggcgcagtggggcccggagctgtcacccctgactcgacgcagcttccgttctcctggtgacgtcgcctacaggaaccgccccagtggtcagctgccgcgctgttgctaggcaacagcgtgcgagctcagatcagcgtggggtggaggagaagtggagtttggaagttcaggggcacaggggcacaggcccacgactgcagcgggatggaccagtactgcatcctgggccgcatcggggagggcgcccacggcatcgtcttcaaggccaagcacgtggaggtgaggctggaccgcggccggcagcctggcgggggtgtgcccccgccaccctccggctaacgctctaaactgtttcggttccctttttacatccagtacagtttttaaaacctactcatattctaaacctactttgggccgttgcgcttccctccgcacagctggcttggtcccctaccccagcggctgggtcccaggctagtcctagacccccgaggagggcctctggccgagccgggggcgcgtgtctctctctcaaccaccttcccctcacccaccttcatctctctttcccagccgagggtgggctggcagtgtctgccttctatcctgcagactggcgagatagttgccctcaagaaggtggccctaaggcggttggaggacggcttccctaaccaggccctgcgggagattaaggctctgcaggagatggaggacaatcagtatgtgagtaggggagggggggcatggtattctcaccctcagtcgctcgttcccacttctttgtgccttcattttcccagctacgccttcaccagctttcagggatttcctcccgctgtcactcacacacactgctcattcatctgcctccttacccccttttgcccttttttgtccacttgttcacctttatttacctatttctttcatttctcacacattcactctcatttgcctacttatttcttaatgtattcattcattcaccgactttttttctcaaaacatgtagtgatttataatgtaactagcacctattgagctcccgatgtgttctgcaggcattatatacattgtcattttgagacctctttactactgtacaaggcaggtttccagatctctgtttctcaggtgagaggaggaggttatgtcaccagctcttgggccctccgttagtcagtagagggtttggcc

SEQ ID NO: 2592 - DNA, 6000 bp, Homo sapiens
cctgaaaaacttttggttaataccacataatagcataaggtacccataagcacagttgagttcatatgctattacctcatttaaacttcatgtggtatatatcctttcagagggctgaagaatcactttaaattaaatcaatttccacacatagataagaacacttgtcttaggatatacttatgataaaatgctttgggatactgttaacaatgatacagattttaaaatacatttttttttttttttttttacttcttacattattttccaagtagaataatgtgttactttcactgctgtggtattttatttaccataaaattggaactctctccagagtcaagaaattagtcattaaaaaaaaaaacttatcagaacagttactttcagatatcatttgatgtcaatgatatttttaaaattttgacaaccataaccaccaatatttcaacaattactgctttactataacatagcatagcttacctggctcatgaatcatgtaatgaacccagcctagactctgttggacaccaagtctcctccactcctcttcagacatcagatgagttttaggtacttgtttggaaagttctctgggtaacataacatgcctgttacaagatacagccaagtgttagtccagtgccttttctacaactgtcgctttatacatgtaccttaaggaactctgttgctttaatattgagaactgcaatctactacctttaattctgatatgatggcctatgttcaaattagggagctaagagtgcacaatccaaaagcagaaagcattttccataggattaatctttttctcttatcacagaatgcttaccagttgccttaatcttcttcaggaagagaaccccaaaatataagttgaacatatggttaccagcctccaaatcataagccaacaagatataagaaaatgtgtaacttattatgaaaagtgttctcaaagggaaagaacatgctgaactctttttctccttcttgttgaatgcacattaatatgatcagggagccagagcaggaatctaggaccatagaagcaactgtaaattgagaacggtaaagcaacaagaggtaaggacccagcctagtccttgactgtaaagctgttatccctgccccagattattagacttttatgtaacgaaaaaatctaagttacagttaatttgggtttcctcttactcaacactagctttgtagtagctactagtccttgtatgctccagaagttgctttatacttcaagtactttgttcaaaattaaaaacagaaaaccactaactgtacatacacattgtgtgcaacctcaccgttttccagttaatttactgacctatatccaaaacttacattgttcagtttcttaggcaagcatggaataaccttcaaagttaaaccatcaatatgtataattgtagccttacgagattctcaaaaacaaatctgtatcattaacagtatcccaaagcattctatcaaagatttgcctaacaaatctctttccccaaattgagtaagaatttttactcaattaccataaaaaggactttatgaaagtcacaattctcagctccatgtttaccacctgcagtagtagcaacagttttatactgaaccatccataaccaccaacccaaatttttaaccagtataagatatctgtctgtgagtcagctggctggggatgaatgaggtgcaatctggtcactttctgagacacagtaaactgaatccctaacccgctataagcacccagctgtcatcaacttaaattttagtctgtggttaagtaccaatttatttgcagggcaaagtgagcctcagaaaaattctactgtgttgttagattgccttaaggccaccaagtcatagcttactaccataatttgtagagttttcatcaattccagtgaactatatagtgattctttgtaattcttaccagttatcacccacattcttgaaatgctgctttaacatctaacttcaaataatctgttatcttatttctacgttctatcttgttgattattctcaaagagaaatgtagtgcttttgtaccttttctatcaaacttacagagtacataaatctaccaacaagttatttagatagaagttaccacccttctccataaacacggaaacaggctctcctccatcagggtttctttataaaggaaaaatgtttaagtagcatcaaccccatatgaggattctacctgtattttgccacacagagatttcaaactaactacatgtaaggaaaattatttccaaaatctaacgtttatttcagttgaaatgcaaaatagtgcaagtattactaatttgtaaggctgcccagaaaaattaacagtttttctcttgtgaaaacagacttccatgatgtgggggtgggggcacccactgttatgcccttagaaacattaagaccctcacgtaaaaggactaggaaattaagtttgtaattaagaaaaatcaaagaaagatagagataactgcacactgggaaaaataaatactagcctttgaaatttacattgcatgctgcaccattacatattaatacaaaccaccctagactcatgccttagtgctatattattactagtttcccctttaaaattatgtgtggaaattactatcctgtttcataaaggttactggcttggccaattaataccagctctaatttttattggattaaaatacatcacttcagatatgtaaactttcttctatacattaccacacacaaatcatttgagtatattaaaactaaaaaatcgacctactgccatcagaaagaagtctgagaaatagcttcatttattttcaatattataccctaaaagaaacttgtaccgacccttaaatccttatcctaaacacttggcaccagatgtgtttcagaataattttctaggttttagtaagattattacggtttacattgtgttcattattggatatcctcaatagggctcttgattaacatcgcataattgaacactgccagcatattacacgagtatagtttattattactataaggttaacacaatctacttgaaatttacctacagccagaaaaacatgctatttttctagctaggaatacaaaagggtgcaattactactacccatagaaatattcagtagtcctcatgtgaaaacagacttccatgctactagggagggggagaaaaagagaaaccacccactgttttgttctttcttccttaaatagcattcggagaaatctaacctacaaaggcagcagacagaaaacaaggtcacaatttggccaacgatggcatgggctttatctcccctaaatcttggtagtatcccagaacgcagcgttctagtcgctacctagttaagaaaaaggggttgactgttttctgaagccacgccctaaatgaagtgtcccgcatacagtaaggacaacaaattttaaatgtccctactcgctttcccccaatctactttaattggggggaaggggacagggacatttaaaatttgtctaattttactgatcgattacagccaccatgttctagtacggtgcttcaggactcaaacgcaaaagtttctcaaagcccaaaatttggccagtgtatactagcagaaaatgatgcccaaagtccactcaagttcttaatcggccttaaaatgaaactcctttaataataccctcaattgtatgactgcggctaacctataatggcccaaatcaccatacccagtaaacattttcgaatccccatcaagctcatttttcggggggtcgcctccaaagcttattcttataccactcacttcaaaaacaagaaaaagaaaagtgttcctctgtgttaacagatgaaaatgaccatttgaccattctaaaccacaaactagtaaaagctgcatcaccccgtcagcgacagggaaagtgtgtcacggttgctaaaggaaaaaggacggcaccaggtgggttttcctggactggttcaaagaactggaactgagaccagctactgaacggcctaattacttcggccacggccgagaaaaaagtgacgggatggtcactccgcgtcgccgaggaccccatgacccccaagttgcgccggttcctacccaggtactaaatgcggcccggtgggcactcttccctcaccctccgcgcacaccgaacaaaggcccaaccggcccggcgcggccaggcacccaaccatgtccgactgcgcggggcgccaggtggccgcgaccccaaaccccggccctcgccctccggccccgggctccgccccccaggccccggcccccacccccgaccctactatgcctgggtcgccccgcccgcgggggccccggctgagggagccggctcggggtctaagaaaggcgcccaccggtactcgtagtgttcgtcgaagtacttgtccgagtagtagatctgcttgtgggccatcctgctggcgcgctgcagaaaatgaaacgagagcgcgaagagcgggcgcagcagacaaaaccacgtccagcccaggcaacaactcgccggagactaacgaccgcagtcccaacgatccggatttgaatccgacagcccgccgccgattggacagcagcgccgaccaatcaccttctgcggaagtcggccggctgccagcctatcgtcgccgccgcctcgcaaagtccgcttcctgggtcagccaatcagagatctgttgcgaggttgcccgagggaagataggtacgtcacgggggtggcagggcccttaacgggcaggggcgtggccagaggagggcgaagtcgggacgttaagggccgcagagcgcgtgcgcaggaacgtggaaagttccaggacacggaaccgttgggacggaggacctgaaggtggagtgaggtatcacggggtttggtgatgacgtagtcggtcgaggccggaagcgtgggccacagggctttgagcggaagctgtcgaccttgcacggtgatggcgctcctcgtgatcccttgtatcccctcaggctcgagccaggagcctaggtccactttgaaaagtagtaaaaggcagaaaggttctgcggtgtgagggggagggcggcttcgtggtcggctgggtcgggggagcgccgggcggccgcggcgtggctgtgtccggggctgccctgcgcagccggccgtttcgccgcctggtgcacttgctgagcttccggcctggcccgtcgcggggctcctggcgcccccctagacgactgtgtggagaatggagcctgcggagccacgcgtagagagaggcccggagccggcgcggtggcggcgggcgccagtggtcccagccactcgggaggccgaggtggagtgtcgcttgagcccaggagttccagacaggcctgagcaacagagccagaccccgtctccacaaagaaagaaacaaatgggccagagacccagaatgctttctgtagcctaacctaatgttcaaaaccagggcagacccaagccatggaaagcttgagggaataaaataatattctgctgcggccaagaataacaatgctaattcctggataaggggatttaaaatgatgtttaacaacttctggtcttttaatattgacccaagtttaaaaacatgttcatataaaaaagttactggaagaaatttataaatgtaactggtggttatttttagatgacagaattaaaagtgatctttttggtattttttccacaacgagcacgtgtcatttttatgttaatttcattttatgcgaaatgctccagcgcagtacaggctagtgggttcagggtggctgtgactaagtaatgtagatggggtaccttagacaaagtttccagactagaggctggaagtaagaggtccgggtgcccttttccacactgcagaccacggacttttccggtttctgaacaagtgagacaggccggctaaggacatttataatctcc

SEQ ID NO: 2593 - DNA, 6000 bp, Homo sapiens
ataatccaagataatctccctatcttaaaatccttaatttaatcacatttgtaaagtctcttttgctgtgtaaggtaacattcacagataccaaagattaggatatgagcattgctgtggtttgaatgtgtcccccaaatttcacgtgttggaaacttaatccccaaatttatatgtttatggtatttggaggtggggcctttgggaggtaattaagattaaagtcatcagggtggggctcccatgacgggactgtggctttataagaagaggaagagacacctgagccggctggcccttgccctccctccatgggatgccctccaccatgttatgatgcagtagaaggccttcaccagatgttgcccctctacctttgacttcccagcctccaaaatggtaagaaataaatttcttttctttataaattacccaggctgtggtagtcctttataccaacataaaattgactaagacagacatctttgggggccatttttctaccacattcatcctcctacattcacttcccacaactttcctttccatgacttttacaatctaagccaaacctattcagcattttctgtgtgtaccacacttcctcacacctttacaactaccaatccttcctttggaaaggtgcttggccctcctggctttctacctgtggaactctaagagacagaacagaatagtgggtaagaggcctaactctggagtcagacagtttgggctcaaatatgagtctgccacttactaggaatttttggtaaatggttttgttttgttttaacctagatctaaatgccagattgtaacaaatacaagaaatagaaaaaccagggaaactgcaccacaaggaaacaattacacagatccagaatgtgtaacgttccacaggcaaaaatgacctggtttgatgaacagatgttaaaaaaggtggcaggggtgtgtgtggggagggtgtctatgtaggtagaggttggggggttgtttaaagaagactaaaagagacaataacaaaatgtggtcgggtgcgggggctcacgcctgtaatcccagcacttcgggaggctgaggcagccggatcatctgaggccgtgagttcaagaccagcctgaccaatatggagaaaccccatctctactaaaaatacaaaattagctgggcatggtggagggcacctgtaatcccagctacttgggaagctaaggcaggagaattgcttgaacacaggaggcagaggctgcagtgggcagatatcgcgccattgcactccagcctgggcaacaagagtgaaactccatctcaaaaaaaaaaaaaaaaagagagacaataacaaaatgcaagatgtaggcccaagtttgaaagcagggttaaacaaactataaaaagctttggtgaggcagtcagggaaatgtgagtctaaaacagctatcaaagagtattaaggacgtctaagcgtaagtatgatgtggttatgcattttttaaaaaattttcctgagatgcacaccataaacacagagatacactgaaaagttttatttaggagtgaactgacatatctgagatctcttcagtaatattctagaaaaaaaaagttagagaggaacagatgaaacatgattggcaaacggtaattgctgaagctaaatgactggaacaagttgagtatcccttacccaaaacacttgggaccagaagtgtttcagggttttttggaatctggaatatgggcattttgttaaccagttcagtatctctaataggaaaatctgaaatctgaagtgctccaatgagcatatcctttgagctcatgtcagtgttgttcaacgttttggacttttggagcatttcagattttcagattaaagatgcacaacctgtacatgggagttgattctattattccatgtgtttgaacttttcacagtgcagatggtccttgacttacaatggttcaacttaaaatttttttgactagtcaggatgtaatcccattgtaaattaaggagcatctatacatttatttaaaaatatatctcccaggaagtttttttcccccaggttctgccagaaagtaatttccttgtccattttccttaacagtttattcacatttttgccatcatagtaattatacctaattatttactcttattatactgtgcctaaaatttacttcttattgtgtgcttatgtgcaaggaactctgctatgtgctaggcactccgtggtgaacaagacagacatggcctctacactagcttcacagagttgttttttttttttttgagacggagtctcgctctgtcgcccaggctggagtgcagtggcacagtcttggctcactaacagagagtattttatagcgcagatagggagacaaccaccacctaagcaaacatgcaattgcgacagtgggagggaagcccactggagtcggtggcaagggcataatggggaaattgaagaactttctgtagagaagttgattaaggaaggcctttcagaagatgaaatgcttaatctgagacctgaaggattctatcatgtatgaacgaatgtttgtgtctgctcccagccaccaaatcatgcgtggaaattccaggccgggtgttgtggctcatacctgtaattctgttacaggaaaggggtccagtccagatcccaagggagaattcttggatctcgtgcaagaaagaattcagggtgagtccactgtgcaaaatgaaagtaagtttattaagaaagtaaaggaataaaaggatggctactccatagacagaacagccgagggctgctggttgcccatttttatagttattttttgcttatatgctaaacgaggggtgtattattcatgcctcccctttttagaccatgtagggtaacttcctgatgttgccatggcatttctaaactgtcatggcactggtgggagtgtaacagtgaggaccaaagtcactctcttcgccattttggttttggtgggttttggctggctcctttgctgcaacctgtttcatcaacaaggtctttatgacctgtattttgtgctgacctcccatttcatcctgtgacttagaatgccttaactgtctgggaatgcagcccagtaggttttaggctcatcttacccagctcctgtttaagatgaaggtgctctggttcacttgcctctgacgatcccagcactttgcgaggccaaggcgggcagttcacttgaggtcaggagttcgagaccagcctggccaaaatgatgaaaacccgtttctactaaaaatacaaaaactagctgggcctgtaatcccagctgctctggaggctgaggcagaatggcttgaacctgggagggggaggtcgcagtgagccaagatcacaccactgcactccagcctgagcagcagagtgagactgtctccaaaaaaaaaaaagggcggggggtggaattccaaacaccctcttcccccaagaagtgattgtattaggaagttaggaggtggggccttcgggaggtaatcaagattagatggtcatgagggtggggccctcacccatggagattataaatgtccttagccggcctgtctcacttgttcagaaaccggaaaagtccgtggtctgcagtgtggaaaagggcacccggacctcttacttccagcctctagtctggaaactttgtctaaggtaccccatctacattacttagtcacagccaccctgaacccactagcctgtactgcgctggagcatttcgcataaaatgaaattaacataaaaatgacacgtgctcgttgtggaaaaaataccaaaaagatcacttttaattctgtcatctaaaaataaccaccagttacatttataaatttcttccagtaacttttttatatgaacatgtttttaaacttgggtcaatattaaaagaccagaagttgttaaacatcattttaaatccccttatccaggaattagcattgttattcttggccgcagcagaatattattttattccctcaagctttccatggcttgggtctgccctggttttgaacattaggttaggctacagaaagcattctgggtctctggcccatttgtttctttctttgtggagacggggtctggctctgttgctcaggcctgtctggaactcctgggctcaagcgacactccacctcggcctcccgagtggctgggaccactggcgcccgccgccaccgcgccggctccgggcctctctctacgcgtggctccgcaggctccattctccacacagtcgtctaggggggcgccaggagccccgcgacgggccaggccggaagctcagcaagtgcaccaggcggcgaaacggccggctgcgcagggcagccccggacacagccacgccgcggccgcccggcgctcccccgacccagccgaccacgaagccgccctccccctcacaccgcagaacctttctgccttttactacttttcaaagtggacctaggctcctggctcgagcctgaggggatacaagggatcacgaggagcgccatcaccgtgcaaggtcgacagcttccgctcaaagccctgtggcccacgcttccggcctcgaccgactacgtcatcaccaaaccccgtgatacctcactccaccttcaggtcctccgtcccaacggttccgtgtcctggaactttccacgttcctgcgcacgcgctctgcggcccttaacgtcccgacttcgccctcctctggccacgcccctgcccgttaagggccctgccacccccgtgacgtacctatcttccctcgggcaacctcgcaacagatctctgattggctgacccaggaagcggactttgcgaggcggcggcgacgataggctggcagccggccgacttccgcagaaggtgattggtcggcgctgctgtccaatcggcggcgggctgtcggattcaaatccggatcgttgggactgcggtcgttagtctccggcgagttgttgcctgggctggacgtggttttgtctgctgcgcccgctcttcgcgctctcgtttcattttctgcagcgcgccagcaggatggcccacaagcagatctactactcggacaagtacttcgacgaacactacgagtaccggtgggcgcctttcttagaccccgagccggctccctcagccggggcccccgcgggcggggcgacccaggcatagtagggtcgggggtgggggccggggcctggggggcggagcccggggccggagggcgagggccggggtttggggtcgcggccacctggcgccccgcgcagtcggacatggttgggtgcctggccgcgccgggccggttgggcctttgttcggtgtgcgcggagggtgagggaagagtgcccaccgggccgcatttagtacctgggtaggaaccggcgcaacttgggggtcatggggtcctcggcgacgcggagtgaccatcccgtcacttttttctcggccgtggccgaagtaattaggccgttcagtagctggtctcagttccagttctttgaaccagtccaggaaaacccacctggtgccgtcctttttcctttagcaaccgtgacacactttccctgtcgctgacggggtgatgcagcttttactagtttgtggtttagaatggtcaaatggtcattttcatctgttaacacagaggaacacttttctttttcttgtttttgaagtgagtggtataagaataagctttggaggcgaccccccgaaaaatgagcttgatggggattcgaaaatgtttactgggtatggtgatttgggccattataggttagccgcagtcatacaattgagggtattattaaaggagtttcattttaaggccgattaagaacttgagtggactttgggcatcattttctgctagtatacactggccaaattttgggctttgagaaacttttgcgtttgagtcctgaagcaccgtactagaacatggtggctgtaatcgatcagtaaa

SEQ ID NO: 2594 - DNA, 6000 bp, Homo sapiens
gccgcgtgcggagagtgaggcggatccattacgggcacacagcttaccatttccttccagaattccttcttccaaacaagctatactgaaatccctctagtaaaagattgagacgaaacactaatagttttgggccaaaacgtggtggagaagtttgaaaagacaaacatagcaacgtgtctttggctatatggttccttgccctccagcaagcttgaaatataaaaaggctaacatgcaaaactaggggtactacccccctcccccagtttttaaaaagcaatttccagaagcaaacacacaatggttcgacttgaagtgtcggcataaccattcagtaagaaaagctagaatagtaaacctcttttcctgttttgtgctatttatcaaacctaataaacatcaggatcgtactcaaagatgaaactggcaatgtgtggagccgtctgagctctttatcaactcagtgtcattttcctcgcatgctgcccgcctgctttccgagtttccgcagcccttccctgaggcactcacaaaatcacgtgctccttaagcggtctgagttttgaatttccgcgctggcccggtgctcaggtccccctccggatcccgcgaacgcccccaaacacctccaccccgtctccctctcttcctcgggacatcccgccctgaccccggcaccgcatacggtttgcgggttagggggtcgggggaagggcctccccctgaagccggggaggaggagaggctggagggaaggtggccaggctggtgggggaggggagattgagggagggagcggggcgagggaggaaggagaaggcgcaggccgaaggaaggaagcggggaggggaaaccgccggggaggaaggaagggggcggggagagccggcggacgggccccctgcgggagccgcgtggaccgccccggtggccggcgcgccccgccgcagcccccagcgcgcccgggcagccagcgcggggccgctgaatgggcagggactcgtgagcgcgaccattggccggtcgcggggaggcggcgcgggcattgggcagcgtaagggggccggtccgccttcaggaatgtactacggcgcgtccggcacgtccgtccgcgccggctgggcgcgcgcctcgcctgggctctcgggagaccgcgctggaggcccggagccggcccggcgcatccgcctccctacctactctgccccggccgcgcgggcgcggggagtccgggagccgggcgcgcgcgcgcaccgggcctcctggcgcggggtcacgtggccaccggagctccgccttctccctgctcctccccctttccctccatctgggtttctttctttcctttcctttctttcttctttttttttcaatgaacatacaccgtgcgcatcttaaagccacaccgccccatttcacgacttcactagacttctcgctactgccagtccctctgcagttcaaccccgtttaaaaaaaaaaataaagtgaagcaaatcaagggtttgcgggtcgggttcctaccgcagggaggaacgtaataacttggaaacgtaagaaaaacacattccactttccgaaaacaaaaatttttttaaataaaaagcctagttgtgtagacgtgtctggctccagaatccacctcaaagggtcgcgtgttttccccctccgcgggaagcgaatccccgggatgccttggtgacactggacgcggtgtcgggacgaatcctcgcgatccgcgcacagtttgttttcaatgaatccagcatcggggcatttataatctcctacgtcatactattattaaatataacatgcataccgagttttgtaaaaaaaaatactgactatataaacatctggttaataaaaaggggtgtacaaatgaacccaaaataatcaggaaaactttactctctcaaggaaacaattccgtttctctaagttgtaaaaaaagattctgttgtttctcttttacttatgtcacattcgagattcaaataaaaacgcctctgcctctacaagactgcttcggtgtctggattccacgtttatagaacactgactccttcaaaccaagactgtgttttttttttttttaagttggggggagaaagcggctggggggcagacggattttaagaaagatggcttttcccaacgtccttgctttcctctttaactttccattctgtttatcttaatgcgaggcgttgttccctgcaagagcctaagtcttccctttagttataaaagaaaagagaagaggaaaaaaaaatctggcacacactggcgcactatccagcacgctgtcattattggtgcaggcctgggaatgcgagccggacctcccagtatttgctgcagcttgaggccaaggtgcctctgaaaggcttttctttgaggaatttcagaaattgtttaagcgcttaaaaaaatattacatttccccccgtgtctaccgcgaggcaaatgttcgtgtgtgtgcgtgcgcgcgcgtgtgtgcgcgcaaaggcatcccacaaaaagaagacactgttgaaaagaaaaggaataagagagaaaggagggggagcattccttaatggaagtattgcatgcgagaaggttggcgctctcagaggctgccccgaagccgaggatgcacacactgggttgcctacctgggtggtctctctactttggtgagctgttgctaagcagctaataatagtcatgtttgctgagtaatttctgccctccgcgagccaatcgcgtcgcagaaacccaagccatctgacagccccgggggcgggagctccagcctttttctctttcgctcgctctctccccctccaccccctcccctcccctcctcctcttctttctccaaatggagagagttcttttttttcttcttccatctcatctattgaatcaaggagctgctgcggccgctgcccgctgcacacacacagagcggagtccccaggtcccgggagcgagagaggcgcgctgcacggggacagaatggtccagcgggttgccgaggagcacaagaaagcagagtccgggaccgagcagccaccgcgaacccagcagccagagcccgagcagcccgagcagcagctcctggagccgccaccgccagcagcagccaccgcgggagcagcggcagctgcggctgcccgggcccggcagcgctgagacccgccgggcaccctcggaccccgcggcggcggcggctctgcgcttgccctccgcggccgctcgggcgacccgggaggcgccgagagagccagcgcggccggcgggagcagcggggattcgctggctctttctgcagtgaaggggtcgcggcgcggggcggggggcgggtagggggagttggggaccgcaaggagtgccgcggaagcgcccgaaggacaggctcgctcggcgcgccggctctcgctcttccgcgaactggatgtgggcagcggcggccgcagagacctcgggacccccgcgcaatgtggcaatggaaggcgcagggtctgactccccggcagcggccgcggccgcagcggcagcagcgcccgccgtgtgagcagcagcagcggctggtctgtcaaccggagcccgagcccgagcagcctgcggccagcagcgtcctcgcaagccgagcgcccaggcgcgccaggagcccgcagcagcggcagcagcgcgccgggccgcccgggaagcctccgtccccgcggcggcggcggcggcggcggcaacatggcctcggctggtaacgccgccgagccccaggaccgcggcggcggcggcagcggctgtatcggtgccccgggacggccggctggaggcgggaggcgcagacggacgggggggctgcgccgtgctgccgcgccggaccgggactatctgcaccggcccagctactgcgacgccgccttcgctctggagcagatttccaaggtgcatttcagactctctcctcccactttctcttccctcctctaactctttgggatcgcccccgccacacacaaacacacacactctcttcctctctctctcacacacacacacacactcactcacacctctccaggaaaagcagcagacaaatggggattgaaaaattcaaaccctccctctggtcctgggaggaaagggctgtctgaggtccgcagggggtggaggtgtgtgtgtgtgcgtgtgtgtgtgtgtatacacacgccctccctggtgtgccttttccggagcactggaaagccgtccacggcggaccacctcaagggcggccgcggcactgtcctgccccgtgccccctgccctgaacttcttcctcctgcgcccctgcccctatttgcagcctaaactcctgtacggctgccacatttcttaacatcttggagggggaggcggagtggagagaggcggagagaggaaggggggagggagccgaaataaaggtggtttccttttttggcagccagttttggttttgttgagcatgaaatctctgctcccttaaaaaattattctcggaaaaagatatcccccccgttttccaggttttgagccgcctctccttagggcctggtcgggggaggaaaagttgtaaacaaattgccaccttaaattcgcggtgcgagtctgcggagctgccgggttcattgtgtttacgaggctcgctgaaatgtgtggaatccagggaaggcgagcacccagacgggggcccgccggggccgcggccagcgccggggaaatgccgcgccggggagcagcctgcgccggcctgagcccttccctttgcactcggctgttttttacgtttaaccagaaaggaagggagaggagggaaagatccatgtggctgccctcttccgatcacaaatattgtcgtaagttgcagctggctgccccacttcctaattcagctcacacagcctctccccacgctatggaaatgcgtcgggagtgaactccggcggccgcgctcaccacgtggatccccacttactaccattctcggcgggggtccagttgggggaacccgcaatatgttgttccaaagagcgctcgcccctagcgcccgtccccgagggtgatggacagagcaggactggtttgctggctcctgaaccttgggctccatcgctgggattacgcagcccctcccttctcagctctggggtgaatattgtctgtgtcgagtggtttctctcctctctacctcggcttcctcttctgtattgcagccccagtgccccaagtcgctcagggatcccgcgggtgggggcgccctgatgtccccgaggtgcagctcccacgctgcggcccggctttatgaccgagccccccatgacgctcagatccgccggggctgcagtctcgagggcgagtccgtgtgccgcggccacccgcgcccccacggctgttgggggctcaccgggcgggtgcgcgcaagcgggcgtgggcgcgcgggccgcgactccccggcgctcactcctcccttctgcttcgtccccaggggaaggctactggccggaaagcgccgctgtggctgagagcgaagtttcagagactcttatttaaactgggttgttacattcaaaaaaactgcggcaagttcttggttgtgggcctcctcatatttggggccttcgcggtgggattaaaagcagcgaacctcgagaccaacgtggaggagctgtgggtggaaggtaagagcgcccgccgcggcgcccgcgcccccggcccggtccctcctcgcggttgatagagatattcgccagcgcacacctagagcctggctgcggccggcgaaaccccctgcccgcacccgggggattgtttattgtttgggcgcctggccgggagccaggcccgcccgacaaaggccgcgctgtaatctactcggggcgctgcgccggccgaggtgtggtgggagagagcggcgggggcgggacgggggcgcggggcccctccgggacggaccactctgcgcgccgggggccccgggcc

SEQ ID NO: 2595 - DNA, 6000 bp, Homo sapiens
ggagatgtgagggaatccggagagcttaaggcatctgctttgaaaactacacactccaatgagaagtcttggatcatgactgggagaccaaaatgacaatttatgcattgagatgaactttacttggaaaggggaaatggaacactcagctgttgcttcataaaggctggcaactcctgctggctgataaggccccaagttctcacttatttttatttggtaactgtcacaaggggtgccagaggcagaagggccatttaaagggactgtcttcccggaggacaccttagcaggtctggctgccccagtctgcatctcagatctgtggaatccttgtggttagttgaagttaacaaacccggtgtggcacagcagtcccctgcacagggcatgcatattaaagccgacaatgcttacaaatgtaaataagggcagattgattaggaacaacattatcgctgggaatgtcgcactcgcatgcatcagcaatgaggcaaattgggggcagcctcagccctgaccacccaagtcgagcaggcttttacactggctcctcttccctttcttaaaacgttacagaaacaaggccaattagatcctcaaagtaattcatctctaagtatgaaaaaagcagaccacaggggaagcggcgggtggggggtggggagattaagatagcgctcgttagagccgaggctccggagtgcgtcctggaacccacgggtagaatttacaggccgggaccattgtctgagatgctgaaaagttaacccatcaaacagcgggcgagggggctcagggcactgaaagctccggggatcaatgttcaaaacgtttaggaattaagtcaaactaagggatatgggcctgagtggaagaggctttgccactgaaatgacgtgcatgtggcagccgccggaaccagaggacatgcagccgcgtgcggagagtgaggcggatccattacgggcacacagcttaccatttccttccagaattccttcttccaaacaagctatactgaaatccctctagtaaaagattgagacgaaacactaatagttttgggccaaaacgtggtggagaagtttgaaaagacaaacatagcaacgtgtctttggctatatggttccttgccctccagcaagcttgaaatataaaaaggctaacatgcaaaactaggggtactacccccctcccccagtttttaaaaagcaatttccagaagcaaacacacaatggttcgacttgaagtgtcggcataaccattcagtaagaaaagctagaatagtaaacctcttttcctgttttgtgctatttatcaaacctaataaacatcaggatcgtactcaaagatgaaactggcaatgtgtggagccgtctgagctctttatcaactcagtgtcattttcctcgcatgctgcccgcctgctttccgagtttccgcagcccttccctgaggcactcacaaaatcacgtgctccttaagcggtctgagttttgaatttccgcgctggcccggtgctcaggtccccctccggatcccgcgaacgcccccaaacacctccaccccgtctccctctcttcctcgggacatcccgccctgaccccggcaccgcatacggtttgcgggttagggggtcgggggaagggcctccccctgaagccggggaggaggagaggctggagggaaggtggccaggctggtgggggaggggagattgagggagggagcggggcgagggaggaaggagaaggcgcaggccgaaggaaggaagcggggaggggaaaccgccggggaggaaggaagggggcggggagagccggcggacgggccccctgcgggagccgcgtggaccgccccggtggccggcgcgccccgccgcagcccccagcgcgcccgggcagccagcgcggggccgctgaatgggcagggactcgtgagcgcgaccattggccggtcgcggggaggcggcgcgggcattgggcagcgtaagggggccggtccgccttcaggaatgtactacggcgcgtccggcacgtccgtccgcgccggctgggcgcgcgcctcgcctgggctctcgggagaccgcgctggaggcccggagccggcccggcgcatccgcctccctacctactctgccccggccgcgcgggcgcggggagtccgggagccgggcgcgcgcgcgcaccgggcctcctggcgcggggtcacgtggccaccggagctccgccttctccctgctcctccccctttccctccatctgggtttctttctttcctttcctttctttcttctttttttttcaatgaacatacaccgtgcgcatcttaaagccacaccgccccatttcacgacttcactagacttctcgctactgccagtccctctgcagttcaaccccgtttaaaaaaaaaaataaagtgaagcaaatcaagggtttgcgggtcgggttcctaccgcagggaggaacgtaataacttggaaacgtaagaaaaacacattccactttccgaaaacaaaaatttttttaaataaaaagcctagttgtgtagacgtgtctggctccagaatccacctcaaagggtcgcgtgttttccccctccgcgggaagcgaatccccgggatgccttggtgacactggacgcggtgtcgggacgaatcctcgcgatccgcgcacagtttgttttcaatgaatccagcatcggggcatttataatctcctacgtcatactattattaaatataacatgcataccgagttttgtaaaaaaaaatactgactatataaacatctggttaataaaaaggggtgtacaaatgaacccaaaataatcaggaaaactttactctctcaaggaaacaattccgtttctctaagttgtaaaaaaagattctgttgtttctcttttacttatgtcacattcgagattcaaataaaaacgcctctgcctctacaagactgcttcggtgtctggattccacgtttatagaacactgactccttcaaaccaagactgtgttttttttttttttaagttggggggagaaagcggctggggggcagacggattttaagaaagatggcttttcccaacgtccttgctttcctctttaactttccattctgtttatcttaatgcgaggcgttgttccctgcaagagcctaagtcttccctttagttataaaagaaaagagaagaggaaaaaaaaatctggcacacactggcgcactatccagcacgctgtcattattggtgcaggcctgggaatgcgagccggacctcccagtatttgctgcagcttgaggccaaggtgcctctgaaaggcttttctttgaggaatttcagaaattgtttaagcgcttaaaaaaatattacatttccccccgtgtctaccgcgaggcaaatgttcgtgtgtgtgcgtgcgcgcgcgtgtgtgcgcgcaaaggcatcccacaaaaagaagacactgttgaaaagaaaaggaataagagagaaaggagggggagcattccttaatggaagtattgcatgcgagaaggttggcgctctcagaggctgccccgaagccgaggatgcacacactgggttgcctacctgggtggtctctctactttggtgagctgttgctaagcagctaataatagtcatgtttgctgagtaatttctgccctccgcgagccaatcgcgtcgcagaaacccaagccatctgacagccccgggggcgggagctccagcctttttctctttcgctcgctctctccccctccaccccctcccctcccctcctcctcttctttctccaaatggagagagttcttttttttcttcttccatctcatctattgaatcaaggagctgctgcggccgctgcccgctgcacacacacagagcggagtccccaggtcccgggagcgagagaggcgcgctgcacggggacagaatggtccagcgggttgccgaggagcacaagaaagcagagtccgggaccgagcagccaccgcgaacccagcagccagagcccgagcagcccgagcagcagctcctggagccgccaccgccagcagcagccaccgcgggagcagcggcagctgcggctgcccgggcccggcagcgctgagacccgccgggcaccctcggaccccgcggcggcggcggctctgcgcttgccctccgcggccgctcgggcgacccgggaggcgccgagagagccagcgcggccggcgggagcagcggggattcgctggctctttctgcagtgaaggggtcgcggcgcggggcggggggcgggtagggggagttggggaccgcaaggagtgccgcggaagcgcccgaaggacaggctcgctcggcgcgccggctctcgctcttccgcgaactggatgtgggcagcggcggccgcagagacctcgggacccccgcgcaatgtggcaatggaaggcgcagggtctgactccccggcagcggccgcggccgcagcggcagcagcgcccgccgtgtgagcagcagcagcggctggtctgtcaaccggagcccgagcccgagcagcctgcggccagcagcgtcctcgcaagccgagcgcccaggcgcgccaggagcccgcagcagcggcagcagcgcgccgggccgcccgggaagcctccgtccccgcggcggcggcggcggcggcggcaacatggcctcggctggtaacgccgccgagccccaggaccgcggcggcggcggcagcggctgtatcggtgccccgggacggccggctggaggcgggaggcgcagacggacgggggggctgcgccgtgctgccgcgccggaccgggactatctgcaccggcccagctactgcgacgccgccttcgctctggagcagatttccaaggtgcatttcagactctctcctcccactttctcttccctcctctaactctttgggatcgcccccgccacacacaaacacacacactctcttcctctctctctcacacacacacacacactcactcacacctctccaggaaaagcagcagacaaatggggattgaaaaattcaaaccctccctctggtcctgggaggaaagggctgtctgaggtccgcagggggtggaggtgtgtgtgtgtgcgtgtgtgtgtgtgtatacacacgccctccctggtgtgccttttccggagcactggaaagccgtccacggcggaccacctcaagggcggccgcggcactgtcctgccccgtgccccctgccctgaacttcttcctcctgcgcccctgcccctatttgcagcctaaactcctgtacggctgccacatttcttaacatcttggagggggaggcggagtggagagaggcggagagaggaaggggggagggagccgaaataaaggtggtttccttttttggcagccagttttggttttgttgagcatgaaatctctgctcccttaaaaaattattctcggaaaaagatatcccccccgttttccaggttttgagccgcctctccttagggcctggtcgggggaggaaaagttgtaaacaaattgccaccttaaattcgcggtgcgagtctgcggagctgccgggttcattgtgtttacgaggctcgctgaaatgtgtggaatccagggaaggcgagcacccagacgggggcccgccggggccgcggccagcgccggggaaatgccgcgccggggagcagcctgcgccggcctgagcccttccctttgcactcggctgttttttacgtttaaccagaaaggaagggagaggagggaaagatccatgtggctgccctcttccgatcacaaatattgtcgtaagttgcagctggctgccccacttcctaattcagctcacacagcctctccccacgctatggaaatgcgtcgggagtgaactccggcggccgcgctcaccacgtggatccccacttactaccattctcggcgggggtccagttgggggaacccgcaatatgttgttccaaagagcgctcgcccctag

SEQ ID NO: 2596 - DNA, 6000 bp, Homo sapiens
caaaacttgccaaattacattggattttaaagactcatttggtttgatctgagaaaccagtgaaaagttaaatctcactgtggtttttcataactccaccaagtctggcttccacaattgcttaccattggaacatcccaacacaaagggcagatgttttatttcattgtcatcatttggataatctgatgtcatttttgaaatgtgtgtggtgtggccatggatatttgtagtattggaacagagaagggaggagatgtgagggaatccggagagcttaaggcatctgctttgaaaactacacactccaatgagaagtcttggatcatgactgggagaccaaaatgacaatttatgcattgagatgaactttacttggaaaggggaaatggaacactcagctgttgcttcataaaggctggcaactcctgctggctgataaggccccaagttctcacttatttttatttggtaactgtcacaaggggtgccagaggcagaagggccatttaaagggactgtcttcccggaggacaccttagcaggtctggctgccccagtctgcatctcagatctgtggaatccttgtggttagttgaagttaacaaacccggtgtggcacagcagtcccctgcacagggcatgcatattaaagccgacaatgcttacaaatgtaaataagggcagattgattaggaacaacattatcgctgggaatgtcgcactcgcatgcatcagcaatgaggcaaattgggggcagcctcagccctgaccacccaagtcgagcaggcttttacactggctcctcttccctttcttaaaacgttacagaaacaaggccaattagatcctcaaagtaattcatctctaagtatgaaaaaagcagaccacaggggaagcggcgggtggggggtggggagattaagatagcgctcgttagagccgaggctccggagtgcgtcctggaacccacgggtagaatttacaggccgggaccattgtctgagatgctgaaaagttaacccatcaaacagcgggcgagggggctcagggcactgaaagctccggggatcaatgttcaaaacgtttaggaattaagtcaaactaagggatatgggcctgagtggaagaggctttgccactgaaatgacgtgcatgtggcagccgccggaaccagaggacatgcagccgcgtgcggagagtgaggcggatccattacgggcacacagcttaccatttccttccagaattccttcttccaaacaagctatactgaaatccctctagtaaaagattgagacgaaacactaatagttttgggccaaaacgtggtggagaagtttgaaaagacaaacatagcaacgtgtctttggctatatggttccttgccctccagcaagcttgaaatataaaaaggctaacatgcaaaactaggggtactacccccctcccccagtttttaaaaagcaatttccagaagcaaacacacaatggttcgacttgaagtgtcggcataaccattcagtaagaaaagctagaatagtaaacctcttttcctgttttgtgctatttatcaaacctaataaacatcaggatcgtactcaaagatgaaactggcaatgtgtggagccgtctgagctctttatcaactcagtgtcattttcctcgcatgctgcccgcctgctttccgagtttccgcagcccttccctgaggcactcacaaaatcacgtgctccttaagcggtctgagttttgaatttccgcgctggcccggtgctcaggtccccctccggatcccgcgaacgcccccaaacacctccaccccgtctccctctcttcctcgggacatcccgccctgaccccggcaccgcatacggtttgcgggttagggggtcgggggaagggcctccccctgaagccggggaggaggagaggctggagggaaggtggccaggctggtgggggaggggagattgagggagggagcggggcgagggaggaaggagaaggcgcaggccgaaggaaggaagcggggaggggaaaccgccggggaggaaggaagggggcggggagagccggcggacgggccccctgcgggagccgcgtggaccgccccggtggccggcgcgccccgccgcagcccccagcgcgcccgggcagccagcgcggggccgctgaatgggcagggactcgtgagcgcgaccattggccggtcgcggggaggcggcgcgggcattgggcagcgtaagggggccggtccgccttcaggaatgtactacggcgcgtccggcacgtccgtccgcgccggctgggcgcgcgcctcgcctgggctctcgggagaccgcgctggaggcccggagccggcccggcgcatccgcctccctacctactctgccccggccgcgcgggcgcggggagtccgggagccgggcgcgcgcgcgcaccgggcctcctggcgcggggtcacgtggccaccggagctccgccttctccctgctcctccccctttccctccatctgggtttctttctttcctttcctttctttcttctttttttttcaatgaacatacaccgtgcgcatcttaaagccacaccgccccatttcacgacttcactagacttctcgctactgccagtccctctgcagttcaaccccgtttaaaaaaaaaaataaagtgaagcaaatcaagggtttgcgggtcgggttcctaccgcagggaggaacgtaataacttggaaacgtaagaaaaacacattccactttccgaaaacaaaaatttttttaaataaaaagcctagttgtgtagacgtgtctggctccagaatccacctcaaagggtcgcgtgttttccccctccgcgggaagcgaatccccgggatgccttggtgacactggacgcggtgtcgggacgaatcctcgcgatccgcgcacagtttgttttcaatgaatccagcatcggggcatttataatctcctacgtcatactattattaaatataacatgcataccgagttttgtaaaaaaaaatactgactatataaacatctggttaataaaaaggggtgtacaaatgaacccaaaataatcaggaaaactttactctctcaaggaaacaattccgtttctctaagttgtaaaaaaagattctgttgtttctcttttacttatgtcacattcgagattcaaataaaaacgcctctgcctctacaagactgcttcggtgtctggattccacgtttatagaacactgactccttcaaaccaagactgtgttttttttttttttaagttggggggagaaagcggctggggggcagacggattttaagaaagatggcttttcccaacgtccttgctttcctctttaactttccattctgtttatcttaatgcgaggcgttgttccctgcaagagcctaagtcttccctttagttataaaagaaaagagaagaggaaaaaaaaatctggcacacactggcgcactatccagcacgctgtcattattggtgcaggcctgggaatgcgagccggacctcccagtatttgctgcagcttgaggccaaggtgcctctgaaaggcttttctttgaggaatttcagaaattgtttaagcgcttaaaaaaatattacatttccccccgtgtctaccgcgaggcaaatgttcgtgtgtgtgcgtgcgcgcgcgtgtgtgcgcgcaaaggcatcccacaaaaagaagacactgttgaaaagaaaaggaataagagagaaaggagggggagcattccttaatggaagtattgcatgcgagaaggttggcgctctcagaggctgccccgaagccgaggatgcacacactgggttgcctacctgggtggtctctctactttggtgagctgttgctaagcagctaataatagtcatgtttgctgagtaatttctgccctccgcgagccaatcgcgtcgcagaaacccaagccatctgacagccccgggggcgggagctccagcctttttctctttcgctcgctctctccccctccaccccctcccctcccctcctcctcttctttctccaaatggagagagttcttttttttcttcttccatctcatctattgaatcaaggagctgctgcggccgctgcccgctgcacacacacagagcggagtccccaggtcccgggagcgagagaggcgcgctgcacggggacagaatggtccagcgggttgccgaggagcacaagaaagcagagtccgggaccgagcagccaccgcgaacccagcagccagagcccgagcagcccgagcagcagctcctggagccgccaccgccagcagcagccaccgcgggagcagcggcagctgcggctgcccgggcccggcagcgctgagacccgccgggcaccctcggaccccgcggcggcggcggctctgcgcttgccctccgcggccgctcgggcgacccgggaggcgccgagagagccagcgcggccggcgggagcagcggggattcgctggctctttctgcagtgaaggggtcgcggcgcggggcggggggcgggtagggggagttggggaccgcaaggagtgccgcggaagcgcccgaaggacaggctcgctcggcgcgccggctctcgctcttccgcgaactggatgtgggcagcggcggccgcagagacctcgggacccccgcgcaatgtggcaatggaaggcgcagggtctgactccccggcagcggccgcggccgcagcggcagcagcgcccgccgtgtgagcagcagcagcggctggtctgtcaaccggagcccgagcccgagcagcctgcggccagcagcgtcctcgcaagccgagcgcccaggcgcgccaggagcccgcagcagcggcagcagcgcgccgggccgcccgggaagcctccgtccccgcggcggcggcggcggcggcggcaacatggcctcggctggtaacgccgccgagccccaggaccgcggcggcggcggcagcggctgtatcggtgccccgggacggccggctggaggcgggaggcgcagacggacgggggggctgcgccgtgctgccgcgccggaccgggactatctgcaccggcccagctactgcgacgccgccttcgctctggagcagatttccaaggtgcatttcagactctctcctcccactttctcttccctcctctaactctttgggatcgcccccgccacacacaaacacacacactctcttcctctctctctcacacacacacacacactcactcacacctctccaggaaaagcagcagacaaatggggattgaaaaattcaaaccctccctctggtcctgggaggaaagggctgtctgaggtccgcagggggtggaggtgtgtgtgtgtgcgtgtgtgtgtgtgtatacacacgccctccctggtgtgccttttccggagcactggaaagccgtccacggcggaccacctcaagggcggccgcggcactgtcctgccccgtgccccctgccctgaacttcttcctcctgcgcccctgcccctatttgcagcctaaactcctgtacggctgccacatttcttaacatcttggagggggaggcggagtggagagaggcggagagaggaaggggggagggagccgaaataaaggtggtttccttttttggcagccagttttggttttgttgagcatgaaatctctgctcccttaaaaaattattctcggaaaaagatatcccccccgttttccaggttttgagccgcctctccttagggcctggtcgggggaggaaaagttgtaaacaaattgccaccttaaattcgcggtgcgagtctgcggagctgccgggttcattgtgtttacgaggctcgctgaaatgtgtggaatccagggaaggcgagcacccagacgggggcccgccggggccgcggccagcgccggggaaatgccgcgccggggagcagcctgcgccggcctgagcccttccctttgcactcggctgttttttacgtttaac

SEQ ID NO: 2597 - DNA, 6000 bp, Homo sapiens
agtggagcttgcagtgagccgagattgcgccactgcagtccgcagtctggcctgggcgacagagcgagactccgtctcaaaaaaaaaaaaaaaaaaaaaaaaaaaaaaaaaaaaaaaaaagataataatagctattttattgaatcgtaaggcatgcgataatatataacaaatgcctggtacatggcagttgctcaacaagtgacagtattagtactgagtaaataacatttggcccaagaccagtgagtcatgctgaaactgccaaaagtaagcaaagtgagtgtgcccctcagaagtgtcctcatccagtccattgaaaaagaaaaactttactccctctcactacacaactggcagctcccataaaactgctaggaagcacactgcatctccttccaggacttgaaatgggtcgtgttatgcagaaagcaagttatttccagaaatatgcaatgttaagaaaataaatcacattctatctccttcaacatgtcaaaggtccactgaaaactcttgctaagaacaccacaaaatcacgttttgtcatcctcatccgatggcaacaaatacaggttggatcaagtggtggatgagccggccctccctgtgctcatgccctattctgtccaagaatctacggcagcggccctccctgtcctcatgccctattctgtcctagaatctacggcagcgcccctacagtctagccaatcacatcacttccaaactcctcagctggggcccctgctggtgtcccgcccatgcctaaaatgccctccttcccctaccgtctccagttctctccccccaccccctaccaccctcttgtaactttcacagcccatttcagctgtgaacccaaatgtagtccaaatgcatcgaattctaatagttttaaattgtgcagtgtcgcacacacttgagtctcttatggtgcttaacacagtgctagggacatcataggtgctcaagaaacttgttgctaggagcataatagctgctcgataaaacccttcttttatctaccagtgatactgaatcgctgaactgaggtaaattactccatggattcaatccaaagaacgcttttgtattaattaccaaactacttaaggcaggaatgttttgtcttaattatgtagactattattttaattgtcacttctcaactaaatactccaactccaccccaggcttgcaaaactctgcaagctgaatcttcacaaacaaggagagattaaggaaatattcttcaaggtctccaacagcatcctgaaagggatcactgaagcgattatgcgcataactcttcagcttccacatgctgtccggaggaatgctccaggtattttggtttgaattatctacctagtcacctctaccctcccctactaccctcttgtaaggtaagggatgcccaaagtggtgtttagggttaaagtgtttccaaatagcaggatttggaacttgccaaaaagataaataagaaaccagcgggggaaaaaaattgaaacctttgtcaccaaaataatgtaaaaatgtttgtcttcgaaaaaatatatatctattttaaatctgcaactgctttgctaaggtctcaagaaccccaaaactgaggaacgtggataaaagactggcagaacccctctgagaggtcccttcaaccccgcgttcttaaaacatttcttttctttgcctgcaaaatgcagccttcccccagaataattccatgtaaaaagcccccacccgcgaggaaacattaatctactttgcaaacatgcgttccagtctgtgccttactatttttttttccactccttccacccccaccccgcgttttttgtaccttgagacaaatgtttttttccctcagagttgaaagctgtccaaaaacaggaccacacacgccgccgcctccgcagccccgcgctgcgcccgcccccggccctccccagcgcggcggccgcggccgccgggggcgcgcacactccagccagccggaggggtggcctctggctctccccgactcctttttctttggacgcggtgggtgggggtgggggagagaagaaagccgggccgcggagcggggccgggagaggccagccccggggcgcctctcggggcgcggcccaggcggacagcggcagcggcggcgggcccggggcccccggcgcgcagagtggtccgtcccggaggggccccgcgcccccgtcccgcccccgccgctctctcccaccacacctcggccggcgcagcgccccgagtagattacagcgcggcctttgtcgggcgggcctggctcccggccaggcgcccaaacaataaacaatcccccgggtgcgggcagggggtttcgccggccgcagccaggctctaggtgtgcgctggcgaatatctctatcaaccgcgaggagggaccgggccgggggcgcgggcgccgcggcgggcgctcttaccttccacccacagctcctccacgttggtctcgaggttcgctgcttttaatcccaccgcgaaggccccaaatatgaggaggcccacaaccaagaacttgccgcagtttttttgaatgtaacaacccagtttaaataagagtctctgaaacttcgctctcagccacagcggcgctttccggccagtagccttcccctggggacgaagcagaagggaggagtgagcgccggggagtcgcggcccgcgcgcccacgcccgcttgcgcgcacccgcccggtgagcccccaacagccgtgggggcgcgggtggccgcggcacacggactcgccctcgagactgcagccccggcggatctgagcgtcatggggggctcggtcataaagccgggccgcagcgtgggagctgcacctcggggacatcagggcgcccccacccgcgggatccctgagcgacttggggcactggggctgcaatacagaagaggaagccgaggtagagaggagagaaaccactcgacacagacaatattcaccccagagctgagaagggaggggctgcgtaatcccagcgatggagcccaaggttcaggagccagcaaaccagtcctgctctgtccatcaccctcggggacgggcgctaggggcgagcgctctttggaacaacatattgcgggttcccccaactggacccccgccgagaatggtagtaagtggggatccacgtggtgagcgcggccgccggagttcactcccgacgcatttccatagcgtggggagaggctgtgtgagctgaattaggaagtggggcagccagctgcaacttacgacaatatttgtgatcggaagagggcagccacatggatctttccctcctctcccttcctttctggttaaacgtaaaaaacagccgagtgcaaagggaagggctcaggccggcgcaggctgctccccggcgcggcatttccccggcgctggccgcggccccggcgggcccccgtctgggtgctcgccttccctggattccacacatttcagcgagcctcgtaaacacaatgaacccggcagctccgcagactcgcaccgcgaatttaaggtggcaatttgtttacaacttttcctcccccgaccaggccctaaggagaggcggctcaaaacctggaaaacgggggggatatctttttccgagaataattttttaagggagcagagatttcatgctcaacaaaaccaaaactggctgccaaaaaaggaaaccacctttatttcggctccctccccccttcctctctccgcctctctccactccgcctccccctccaagatgttaagaaatgtggcagccgtacaggagtttaggctgcaaataggggcaggggcgcaggaggaagaagttcagggcagggggcacggggcaggacagtgccgcggccgcccttgaggtggtccgccgtggacggctttccagtgctccggaaaaggcacaccagggagggcgtgtgtatacacacacacacacgcacacacacacacctccaccccctgcggacctcagacagccctttcctcccaggaccagagggagggtttgaatttttcaatccccatttgtctgctgcttttcctggagaggtgtgagtgagtgtgtgtgtgtgtgtgagagagagaggaagagagtgtgtgtgtttgtgtgtggcgggggcgatcccaaagagttagaggagggaagagaaagtgggaggagagagtctgaaatgcaccttggaaatctgctccagagcgaaggcggcgtcgcagtagctgggccggtgcagatagtcccggtccggcgcggcagcacggcgcagcccccccgtccgtctgcgcctcccgcctccagccggccgtcccggggcaccgatacagccgctgccgccgccgccgcggtcctggggctcggcggcgttaccagccgaggccatgttgccgccgccgccgccgccgccgcggggacggaggcttcccgggcggcccggcgcgctgctgccgctgctgcgggctcctggcgcgcctgggcgctcggcttgcgaggacgctgctggccgcaggctgctcgggctcgggctccggttgacagaccagccgctgctgctgctcacacggcgggcgctgctgccgctgcggccgcggccgctgccggggagtcagaccctgcgccttccattgccacattgcgcgggggtcccgaggtctctgcggccgccgctgcccacatccagttcgcggaagagcgagagccggcgcgccgagcgagcctgtccttcgggcgcttccgcggcactccttgcggtccccaactccccctacccgccccccgccccgcgccgcgaccccttcactgcagaaagagccagcgaatccccgctgctcccgccggccgcgctggctctctcggcgcctcccgggtcgcccgagcggccgcggagggcaagcgcagagccgccgccgccgcggggtccgagggtgcccggcgggtctcagcgctgccgggcccgggcagccgcagctgccgctgctcccgcggtggctgctgctggcggtggcggctccaggagctgctgctcgggctgctcgggctctggctgctgggttcgcggtggctgctcggtcccggactctgctttcttgtgctcctcggcaacccgctggaccattctgtccccgtgcagcgcgcctctctcgctcccgggacctggggactccgctctgtgtgtgtgcagcgggcagcggccgcagcagctccttgattcaatagatgagatggaagaagaaaaaaaagaactctctccatttggagaaagaagaggaggaggggaggggagggggtggagggggagagagcgagcgaaagagaaaaaggctggagctcccgcccccggggctgtcagatggcttgggtttctgcgacgcgattggctcgcggagggcagaaattactcagcaaacatgactattattagctgcttagcaacagctcaccaaagtagagagaccacccaggtaggcaacccagtgtgtgcatcctcggcttcggggcagcctctgagagcgccaaccttctcgcatgcaatacttccattaaggaatgctccccctcctttctctcttattccttttcttttcaacagtgtcttctttttgtgggatgcctttgcgcgcacacacgcgcgcgcacgcacacacacgaacatttgcctcgcggtagacacggggggaaatgtaatatttttttaagcgcttaaacaatttctgaaattcctcaaagaaaagcctttcagaggcaccttggcctcaagctgcagcaaatactgggaggtccggctcgcattcccaggcctgcaccaataatgacagcgtgctggatagtgcgccagtgtgtgccagatttttttttcctcttctcttttcttttataactaaagggaagacttaggctcttgcagggaacaacgcctcgcattaagataaacagaatggaaagttaaagaggaaagcaaggacgttg

SEQ ID NO: 2598 - DNA, 6000 bp, Homo sapiens
tattcacgacatttaatctctttattcagggcctcttaggtccaggtagaacctcatgataaattttgggaacctacttgatcgcagtgggctatgtctcccggcactgacccatcaccctcaccaccagccaccctggccacacctgcctcccacagttgaccaggccccttggcatttcgttttctcagcacattcttcgttaacaaggctgcccctgcaggtcttctacatatgggaaggtcatcactggatgaataggagtcagtttgtatgtgtacctctgttggaggaagagcaacttgagtaagtgttgttttttgaggtgagagttccacaggtatctatctctctgtttcttcttgtcctgaaattatcatctgatttttcgaacacctccaactgccttcctactcctcagcaatggggtccgacaaagcctatattccatagtattccaggtttcactccacccactctgtttccaagctgtatgttctggtgtttctattcatacaacatcatcgccttttctgttttgcaatcctattttctttctttttgttgtttgtatttaaacaattcctttgtttcaactcaagttatcttcaattgttcattgggtctaattcgatgttgtaacaaacacctttaaatatttcttacctctccagtccccaaagccctaattctgagagttgatttggcttgtgaatatcctcccacaaggaagaggccaggatagggagtgagggggggcagtcattttagaattgaaatccccacattgagcaagagtacttttatgaaagcttgtgaggatctgtctgatccagaatcaaagactgaccacgcctaaggtgtggccagtgtggtatggccactgaccatgtgcaagagcagcattcatcttgaggtggagagctccttaaatgtgggcaactgtttcttctgaaccctcagttactcatttgaaagccttccaattgctggaggttaccgtgagggaggagatgaatggaaactcttaggcacccatttttattgggagccagagaagaggggagcttaaaatgaagaatgtgtgaacacatgtatgcatgtgcaagtgtgtgtataagtgtgtatgttgatggtacaagagtaacactgggccaggcacagtggctcagacctgtgattccagcactttggaaggccaaggtgggcggatcacaaggtcaggagatcaagaccatcctggccaacatggtgaaacctcatctctactaaaaatacaaaaattagctggtgtggcggtgtgtgcctgtaatcccagttactcgagaggatgagaattgcttgaacccgggaggtgaaggttgcagtgagccaagattgtgccactgcactccagcctggtgacagagtgagactccatctcaaaaaacaaaaacaaaaacaaagagtaacactgtatctccagtagcaacaatattcagaaagacaacctcgcctatgcatactcattgtggtctgttttcagtcggtttcaggcctgtttcaaaagtcctattgtcctgtcttccaatgccccctaaatctccatctggccctgccctgaaatcttcagctttggaattattcttctgtgtatggctccaaaagtccaagttaaccagcaaaagtattgtctagtagcctcatcagccattaacacctggatgccaattggcttatcagactgggaagacttggagctgagcggtgttgtctggtagccttgtgtgccattaacacctccatgccaattgacttagattgggcagcactggagctggtttttgggaagtggggagacataagcaactttagaagtgtggaggcagctgtttgatgagagagggcccaccctggtgggagtctcagagaagcactagaaggtaacacataagggtgttgagtccctgacccccaaccagaacctatatcattgacttaatgcttctagcatctgagagtggagagaagagaggcacagcactgacataatctgcgaagattgatttcaaaggaaggaaaagaaagacaggttgcttttgggagacgttacatggaaaatgtttatttagaaacagaatgcttgttccctggtgctgcaaagaaacagcactcgaagaaacagcactcgaacataaatttaattctctcagcaaggccattattactttctgcagaaagggtgctcatcagagatgaaacaatgtgacagcacacctgaacaaaggagggaagcaatttttatcccttacatagtttgttcctgagactgtgtcctgtctccattggctggagccagacctcacaatctaaactaaaaccagattggctaacagtttaaaacttttctaaataggtaaaagtaatgaaaagacaaaggaaaacaggaagttgcttgtgccatacagggaagggccataggctgccagctggaacttgcctgtgagcatgtccagcataaatatcttggttaaggtacaaggacatagaatgtactatgtgcctgtgagcatgtttaacagctacatacgatagggcttaacaaagagttattagcacaaagcaaggaggcttgaaggaagttagtttttaaaagaaactattatttttaacacttatgatttattctttaacaagaagggaaggggaaactttgaagaggaactttttacattctacaagagagaacatttccaggggcttccctccttcctatacttgtacgttttaacaccagattttctactccctgcctcattatgccactcctgcccaactctaagtacttacactcttgtacaaaacaaacttgtctttgctcccaattgtaaagccttggactaagataagactcatatgaacacattcagtcctaactaagggacagcgtagaccaccaggaccacaaagactgggtagttctgtcgtcctcctgtctgcacactcaagaaaggcgatttcctagaagcccaggtagctttagggctcctccctgcccaggccacttcaaggccctgtacttaattttgtgtttgcagttttgagttgctaaagaagctccccactccccgttcactctgaaagctgcctaagtcctaggccacacaaaactagtgtccactcttgagtatcagccttggccacaactcagcaggagcatgtagccaagtgtgcttccatgagggtcttcattttaactagaaaaagcaaactcctcaagttctgctgtaattttcctagcaactgtatattgtgggccatttaaatgccctttgtcggctgtttctcttttttcttatccccctttctccctcatattctagacccctctatttggagattatgtataccttcctgttcataaccccactcacatttatagataaacagggccctttgatatgacaccaaaagacagggggaagtgtttcgaagggaaatgttgggttttttgttgttgttgttacaactattgtgacttttagaatccatggtcagccaatatgcatttgagtccatttttgactgaagtcactggtatgaaaatgaccttctggaccagccaaattcacagggctgccccccttctaatgcttaattacttaacgtgtctcaaacacatacattctggaaactcaaatgactctgctcaagaatggctacgtcatctttgtgggagggagatcccaaaactcctaggatgattattattatttaataacacatggggcacctcttctacccccgccccgccccccccgcccccaacacacacacacacctaatcacactgtcagcccagaatgaagtgagaagagtctggctttatttcaagaccagctagtcagctcttcagagctgcagtaaatgttctcactccctctaccctgcccttgtatctgtaattcatctttattcataatgtggcccatttaaagtcgcagtgtgtgaaacaccgtctaccagcggcggggttgagcagataaaatgtcagacattgtagcgggggcgctcccgaatagaacgcttcagtcttgagcgagagcagggttatccgcgcgacccaccagctcctaggtttaggccagtcacccaaggccgcctggcacaggacggcacagtaggtgggagcatttgggtggcataccccagaaaccacaggaatcagaagagaaagggagcaaatgtcaatccgtgattcttcggaccaggtacaaatcttggtttccaagggacgccaccttggtctctttcagaagaaacggcttccgagggaccgacacgaatccgcacacatctcgtgctgaaatttccccgggaaggcgctgtgatctgtccggttttcctgctccccgcccctctggcggcccgtaggcctgtcatctagaaggctcccagcttttccgcgcttccgtgggaatgcgagaaggaaaggctttgagaatgcaagcatgaaaggtggtgttcttctgcagtcctctgggaaccccccacttcccggaccgctgaggatgctaaaaggagcttccttgcttccccacacctcccccgaccggcgttgggacaagatggccaaatgttagcaaataatgtgtgcgggggcgggggagccgagcacaaggtggagaagccgcgggagcgcgcggagacccccagcccggcggccccccgcaaacacggccgcggggggcggggagagggtggctaggctcgcgggagctcgccgggcagggcgcctcccaggaaggcggggaggggagcgcctgtttacccaggagggctgtgctgatagcacgttcctcgagtttactttgctttccttgagtttattgtaaaggggtaaagttttcggatccgtcacgtgaccctgacaggtcctgcctatggcgcggcagaccacccacgccgagggccatggaactgcttaatagaaacaggcttgtaattgtgagtccgcgctgcactccgccgaaagcctccggcggcccagcgcgccggggtttttacactttccgttccttttgtaaagacggaggaggaggagaagaagaagaagaaaacggaggagaagaaaaagacgacaggggagacaaagagacccgcagcgacaaggcaagggggagacgagggaagactgggagaagacggaggagcggaggacgaggaaaggggggccagggaaaaaaaaggaattgatgtgaaatccaagcccagcgtccgcgccatcggcacccgcgctccgagcaggggttgacggccggctatggtgagtgcagccagcgcggcggccgccgacgccacctcgcctcgcgcgccgtgctcctcgggcggcgcggggacacggggacgcgggacgccccgcgcggcggacggaggagcgagccccgagcgccgggcaggaggggcgggccgcgcgccggggccgtggagccgggtgggctgcgccgcctgggcgcgggagcgcgggtcccgcgcctccacgctcgctcgcacgcccgggcccccgcccccgaggccagccccgcgtggcggggagggggctggccgcggcgggccccggctgaggaacggctccggggggaattctcacggagggggtcgccggagctcccattttcacgcctgaaagggtcgccaccttggcttccgctcatcagcctggtggtggctactgactcgccagcggaggcagagctggtgatggaagggctggtgcggagagtgacagcgccgaggggagggggctcagagcgcgcgcgcggaagccgctgccgccagctcgcgggagcagccgcagccgcagggaagggcacgctcgcgccccgcagacccgctctcgagcccgcacgcacgcctaggggtgcgggacacccgggctagaagagacgcaccttacccacctcccctcccatgctgcgggaaaagggccagagaggcttttggagttctggaaggggcggt

SEQ ID NO: 2599 - DNA, 6000 bp, Homo sapiens
gtaagaatagaacttacttcatgagtagtacatgaaaattttttttttgaaaaagctctgtcaccaggctggagtgcagtggcgcgatctaggctcacaacaacttgtgtccgcctcctgggttcaagcgattctcgtgcctcagccttctgagtagctgggattacaggcatgcatcaccacacccagctaatttttgtattttagtagacggggtttcgccatgttggaaccaggatattctccatctcctgacctcctgatctgcccaccttggcctcccaaagtgctgggattacaggcatgagccaccgtgcctggctgaaaatacttttttaagacctagtaccagacttctttagagaagtaattactagtttttaggaaaagtgactttgaatagagaatgtgagctctgtaaggaaggctcaggaggagcaaaacaaagatcactgatgttcttcacgaaaagtaaatgagaagacctcctccaacatggtcgactgagctttcctttataaactcatagaaataatggataaaatataattattgttctataaaccatatacaaccgtaaaaacaaaaaacagcaaaaaggaaattctcagtgcctgaaataaattttaaaaattgaagagcagaaagcagaacagatactgcggtagccctccaaaattttatacttggctatatgcctcaggagccagtagttgagttttaatgtccaagcacaaggctgagctttgatgaggcaggtgagctggaactaagcccttatgtaaaacctggagccttaggaatagccagctaccggaactggaaaaaggcaatctactagtttggggaagcgataaagaagtttgttctttggggctttggatagggtgggaaaaaaaaaacataaggtacctatgagaaatcaaaactgcagccctgcaacagatctaaatatacaatatttgcataattcaggagccacaaactgagaaattatcatttgaaaatgcttcagatctttaagagctacggtatgctggcagaagcaaatgcataattgtctaaagggactcttttgcaactaagggtgtaagagagtcccataaacaaaaccatcccactgaagaagagcaccacatgaggaaataaatcactgagtaagagtcagtggaggtcgtaaacaagagttaggaactgaaaagctaaaaataacagaactaacagaaaagaagataaaataaagacatataacttgattaaaaggacaaaataatagaaatcataatgaaagaagaggcagaattcacaaagaaccaaacagaacatgtattttagaaaacaatattgtcactgacattaaaatgaatgggtctaaccagtcccactgggtgaatgaatataataacctccttttctattcctcattttaaattatacttagctgtgtttctttgcaagtttgtcaaacaggttatattcggtgaacccacagttcaaataatatggcgttagaaataaaatacagtcatgcgttgcctaacgacgagatacgttctgagaaacgcctcattaggcaatttcattgttgtgcaaacatcatgaagtatacttaacacaaacctacatattatagccttatgattctagactacaaacttttatagcatattactgtactgaataatgtaggtaactataacacaatgttgtgtttgtgtttctaaacagaaagggtagtatgttgcactacgatgttacaacatcactaagcaacaggaattatccattataatcttaagggaccacagtcacataatgtaatcagacattgaaatattatgtggtgcacgagtgtattcaaaaagtgctgccaggccactgccctccagcctgagacagagtgagactccttctctgaaaaaataaaagtgctgctagtcaatccaatgtaaaaatataaacttcctgtcattatcaattcatttccttgaacctaaaaataatctctcaacaaaatgagtcttccttacttctgcggtaaagtcctttctttttttcttgtcctttgttccaaggagaaaggattcactcgggtccctgtgagaagagcttctttagcactctaaaattagaaaagtatacccaggagagagcaggttccttccagttccctaggagagtagagcaccaaatatttctcctaggtcttgctttgtggctgtatgtgtgtccttgctggtactgatgatgccttccatataaggactcagactccactagctgccagatttctgcttgaaacactgcccgctagcgttgaagctttcaaacgattttaatccatggtgatgaagcaagaacagtgttttctgtacactgcatctaccctatactctctgtttctacccctcacatctccaaattagggggcttcactggctttgtgccttggttttttccactcacctgtgtgatctcaggaggcagagtttcaagttagtcatcagtgatttcctcaagtccatttgtcttatatttagcagcaattccttagtgcttctggcacgcaataagactaaaactgagagatctccacctttataagcatttttcattttaatcaatggtcttaatgggagtagttagatctgcacattcttctaaccacccaggagtccttatccaacaacagtgcacttgtgtatgttttcatccatgtgacgtaagtgtatcagctagttgttaaagtgcaaagactaacagtctgtcttaacacatatttccataccaaaaaatcactttatttcacaacgtgacaaagtccacattaggatttgttggcaaattaaaattctttactcacaaaatgataaaaggaaggagacacagctcaaagttaatgtgtaagagttaacagaatcaatacaagtgaatagctgtggagcccaggggatgcaggaatcaaggcagacaaagatatctgttgaattaaattaatgttaggtcactacccatggttgacatcacagaagtggataagcataccagagtaaacaaaggaatcctttcttaaacaaaaaacccatacaacttattttactcccttatcgagaaatattttcaaaatataagcccattcctggtaggttaagaccaattcagatgactgcattgccattccagggccaagaaagcaactttaaaaacatgacctacgctatggtctaaatgtgtccctcaaaatgcacattttgaaatcctaactcccgaactgacggttttagcaagtggcatcttgggaagtgaggaatgggattaaggtccttataaaataggcccaagcgagggcctctgcctctccaccatgcgaggacagagccagaaggtgctatccactaaagagaaagcacccctccctagacacaccttattctgtgacattccagccttcagaaatgtgaagaataaacttctgtggttcataaactacccagtctaggatattttgttatggaagcccaaaaggatcaagccattccaaaatagcattgttgcccacaccatctttttgaacctcacttagggtaacaccatacccattcggagttaagcccttcctaactcttaagtatcaacgtgcttggaaacgtgagcaatcctgacacgttttttcttcctaaagaacaatacatactaataataggatcggctaataatactagattctatgcatgaagcctagtatttaaaagcatgcaatctggagctagaccgcctgggaacaaatcccagcttactagacaagctgtttaaccttttacttggtctcatttaactcatttgtaaaacgagggcaatttctgatttcatagggttgctacgtggattttaaaaagccccttgcaatatagcctaatattcagaactcaataacatgaactgtcttaaaaggtttccagaaaaaatccccaacaggttaggtcggcttatcattacaacgctttccggtataagggagatgaatagctatttagcaccacacaatttctcctctgggctcggaacagctctcggtagactacgatccctttccgacgtggaaacttcagataaaaacgctccccgaggtccgaggccagtacggggcggagccaggacgcgggccagagtcccccgaaggacggtgcctctctggccccaagaagtacagcttttattttgcagcaatctgagccaacccgagaagattctgaagcttccaaaacagaaccgacgagaacactcatagaatgcctctccacttcctaactgtcgctttgaggagagaaaagtaagccacagccagcaccgcagactggagaaggcggagtctgcagtgtgcctaacgcgaactagagggaccgaggcggggcggggctggcgaagcgcgaggacccggggccgaggtgtggggctgaccatagagtgccggacgccggtgtgaacatacactatctgctcctgtagtgcccaggcccctgccggggagtccccggagctaccattatcgagactctcattctattgccctgcggctttaatccttcgagtgtaggggaaaaattgaaccctaaagacaggcagctcctaggcaccagcacaggaaataagcaatggaggtggggtcctttgctcgcgccgaaattcaaaggaataaatagttccggcgcgggtgttgagagcggtgtggcaggtgttgtagccgctatggtgaagttcgctttgtagcggccccggctagagagttgttctgttccctgcctttgtgacccggaggagcttttggggtgcgtcaagcccctggcctgaggcagcggtgaggcgtgtgcgtgagcacggccggttgggccgggccagacttcctggcgggaggcgggaggcgggaggcggggcgcggggcgcgggggctgtagggagggggaccagtggcagagggaccttaggtgatccttagaaataaaggctagcttctgttcgaccttggagtagggcgaagaggtgtagacaggcctggagaagcgaggtaaaagcctgagtaaaagcaagaagttggagaatatgagatacatctcatctctagtaaatacttaaatgacttcccctcctcccggagtcaagcacaattcggggatgcaatgacggacgtaggtgaagacactgcgggaacttacagacaagtaatgaccgtctaatatcagctttaagtaccatgaaggaaaaagaaagccgagtgaaggattgtggagaggtgacatagggaggtcagggaggactccagtaaggtgacatttgagcaaagacgtgagtgcagtagagagtaagctatgtcagtatcagagaaaagcacattataggcaaagataatgggatatgtaataatccatagtctttgtttaggtagagtatgataaaagtagaaggcaagcctggaaaaacgggtagaagaaatagttaagacttcccagttgaatggtttaatttccagatagtggctaactctggtatatttttgagtagatgaacgatgtctttacatcagacaagatagtttgtcaagtggctgttttatttctatcaccctatcgttgctgtttttgcctcgtgttcattatgattccaggtttacattccacttaggtggtggtatttctgtttcgtacagaactggtttgtggcctgtttgattcctgtcagaggtttgctgacccaagacagtatcgaaaatgcatattaagtcaattattctagagggattcaagtcctatgctcagaggaccgaagtcaatggttttgaccccctcttcaatgctatcactggcttaaatggtagtgggaaatccaacatattggactccatctgctttttgctgggcatctccaacctgtctcaggtaaagtgtaaactttctgatttatttgaatttaagttggcaggagaatcctcactgaactttggagacg

SEQ ID NO: 2600 - DNA, 6000 bp, Homo sapiens
agtgagcggttcatttttgctagcatagaaggtacagggtgataactaggtataaataaatttgtaaaacaaaaaaacaaaaaaaacaaaaaaacccacaaaaacaccaggaccaaatgatggagggcattaaattctgagtaaaatggttctgactttggtatacagttaaaagtctaccaggttttagataagtagaatgatggatgagagttgtgttctaagcacattgcccaaacagagttggtatgggctgggaaggagaaaagaaagagagggagggaggaaagcggggagagagatagggagagggagagacagagtgagaaaaggagagagagagacattgagagagagagagagagactaagaggcatagaagtttttattttggaacatgatctggctctgtagcccagcctggagtgcagtggtgtgatctcggctcactgcaacctctgtctcccaagctcaagccatcttcccagctcagactcccaagggcataccaccatgcctggctaatttttgtagtttttttttttttttttttttttttttttttttttttttttggtcgttgttgttgtagaaagtgtttcttcatggtgcacaggctggtctcgaattcctgagctcacgtgatccacctgctttgtcctcccaaagtgctgggattacaggcataagccactgcgctaggccagcgttttttattcaatgaaaagaggctcataatagcctagttgagagacatggaaggcttaaatgttgctcacacatattaatcactcaataaatatcagttattatgaattcaactgtttttaaaactaaagaaaaatagctgtttataggtgtaaaatgttatacctaacattgaggcaaaattttcctccttttagcttttcaatatttcctatagaccctgagcatgcctgctacattctatggtgtattctgattatttaggcatgagtatggctctgcaatggatttcagactcctagaagacagagaccaggcaagatatttatctcggaatctttcatactacctcacagtcagtaggcgcttaagaaatacaggcttctttcagcagttgttcagcctattctgaacccaaagcaccccagattaagggattttaactcctttgagatttgacaggagtagtgaacttaagcttttgagacagtggcaggtggctgagagtcctgcacaaacaggacaaaatcttatctttatttaaggaggggtaagtgaaacctccatttcatcactgaacatttatctatatttcttgtctatttctagaaaaaaatgatgcttacctgtttattaatttattcactggatttccctttgcaatttcttaagcttaagtctaagtaaagcaacctataaaatctaaggtcagattacaggccagaaaagccacctattctagagtcctaaagctggggtccagggatagatattcacaaatgagattggcaaagacaaatttagtgaaactccatgtaaaattgtgtgagattttttatagtacattttccacaacagagagggtctatagcaatagtgaggttcttaaaacagtctgtgatattaaaaatattatccattgattttcaaatctatcatactatgaatgaaatgctgtgaaacattccattttcttattaaatgccattgtacaaaaggtcctattttagtgtcaccccaaaatctacagacaggaagttctttcttaagtctatcctaatctgttggcagctcctccccatggaagcccttagtaaattcggtggaaatagcaaacagctgctcaccaacacccaccccaaagaaagaacaagacatttctcacatatctcaagctgccttaaatgttctttctttggcaaagaagaaaaaaagaaatatatttttggcctctaaaccttttcccacccgtgtgtatttctgcaaaaatgttatccatatggttttgattgcattctccataagtcattagaaatgctttgcactgagaacttttctgatgaccaaggtgtcttcggagacattttaaaatggccctcttagcctttcttcatagaaacaggaaagctaaactgagccaaatgcaaatgaactaagacctggaaaggttggcattttattcaaaactcagaaaccataaggctcgagtgagccttaaatctgtccatgcaaagtcttcacctccttctccagggacaagatacactaaatcatccattgggatgggacacagataatgcaatggatccagacatctaagttgatatttagggttgggtgcagtgaccccataaaattccaagaacttccaatcaccccagggcttccccattattcccagaggataaagattttggacttggacttgggtgttgaattcctgactccatcacctactagctatattttggcatatagctagtttggcatatactcaagtttttcaagactcaatttcctatgccataaagatgggatagtattatctattcatactgcaaagtattttcagaactgtaagcaataatattcagaacattgcaaataaaatgcttggtgcacggtaaaagttcaaaattctctctcctctttctctctgtgtagtattggttggaactagaagagctctttttttctttagggaaatattgactgggtggggtgaggaagagaaagactggacagtattccaaagcattaagtccccactttctaaggtatgtagaccacaacccatcttgggagattgattacaaggaaagggttaagaagaatcagtcagaactttggtcttcacctgaagttgcctgactacgttgtctcagattgatttcagaactgcattatcagcagggcagctgttgcctactaacagtcatggaagtagatctcagctgggggatgatggggaaacaaagagaaagatagggacgaataaaggaaggaatggggcacagacagaaagagagagagagaaaagaaagaaaggaggagaggcaagagatagtgacctggggtttcataccgcggtgggtgggagaaggagtgtgtgtggtgggcgtatttcttcgtggtcagaatcaaagtcagaactgacctggggaacctgtgttcaagacctgaacctggaccagaagccaagggaaagagaaagttgcccaagaaaaaagggagaaatttccaccaggcgaaaatagaaatcgctgactgggtttgtggctggagagctgtccgtggtgctgactcctcctcattgggattccagtgaaggctgagaagctctgcactggctgctcctcctctccctttcctctcccctcagtcctgaccttctgagacccaggatcattctggctagctcgatgtcttctcctctctttctccctttctctttgtcgattaaataatttttcccgagttcccagttcatcactcaaacatttctcttccattttgtttcaagactcctcttcctccaattagttcactggctcctagattgttctaggcctccctggtggtcacatctctctcttatcatcctttgaattaaaaaacaaacaaaaaacatacaatggcaatcataaaagcagacaacatgcactgagcactcactaggtgtcagggagcagtctaagtgcctttgcatacattaactcatgagcagtctaagtgcctttgcatatattaactcattacaattccacatcaaccctattagatgggtagatatattattattctattaaacagacaaggaattgaggcttaaggggtaagtgatttcaccaagaccagacagctacaggactccaacctctctggagcctgcacttctactgaatctggctcttttacatattccaacaccttttcctatgacttcctgcccctccatctggtagccttaatgctttctattcttgcctaatcttcaggggactagggatctgcattgctgatttggtttaaatcagaagggaagcaaagtaaacaaacataccaaatgtgcgctgtgtgggaattatcatacgagggctttattttctgcttcaggaagaggccctatgttagcagccccagcctgcattcaggctgattgcagagtattttgctttttattttcatgtcttagtccctgtaccctcgccccttccccgcctctggtggtctccagagaacttcgtgtcccctcagcttctccctcctacatcctgcctacgtagagaagctcttgcttcattctgggaggttacgtgggctctcgcctacacaccgagagaaacaaacagtgtcaaacactcacagagagacgcgcagacacaaacggacccacacgggcaactcccgagacaaaacccacactcgatggatccacgcggccgtggaaacacctgccgccccagaaacactcaggtactcgcgacacacacagtacagtcacgcttaagggcaccaggattccgggtttgcgcgtatgcgcggtccctttggatgctcgtgcgcatagacacaacaccctacacgccccagacccacgaaactccctacggctcagccccagcccacccgggccgcccttccctcgaggcggcctcccgtctctcctcctctcgcttctcctcctcctccgcctaaagatgtacaaaacactcctcggaagcaaccccggcgttcagctcctccctccccgccccccggccgccgctcccccattcattttcggccgtcgccggctaagtccctcccccggcgtagcccggcctccgccgctccccgcccggagaccgcggcgcacttggacttccctctccattcgccagccgcctcgctcccggaccccacggctgcaaactgatctggcgcgcggggaggaggagagcgcaggcgagcgaacccgcgagagagggagagagcgagcgagcaacagcgagagcgagagcgagagagccgggaggcagagggagtagtgaccgccttccggagccgggattcatgcctgtcctcgggaccagcgaaggggactttacggctgagtatgagccaggctgctaggagccaggtacccccacgcctgcagtccccgcgccgtgcccggaatgcgagctgcacgcagggctctcccaagttcccaccgagccgaataaaaagcgtcctcccgcagctctccgccaaagacggacattgactccaggtaaggcggcgccgggtgcagcgccccgcagccccgctgcccttggacccggccccgggccgcattcggggcgtccccgcgctcctctgcccctccccctaccggcacccttgtccgctcttcacctggccgccccgccgcctccaagtcttctccagttctagggagggggttcctgtgcctggggctcaaagggctaattgcgggtttgagtgagtggcgtgtgtgtccccgcgcgctcccgacgtgtgcaccatggtgggaacttgatgtggtgctagtgtgtttgcgtgtgcggcgtcgtttgcgtttgatgcgtgtgttcgtggtgtgtgtgtgtgtccgtgtgtgtaagggaggggtgaagagagagaggtcctataacctacttacggcgcgatgtgtgtgtgcatgtttgtacgtatgtgtttgtatgtgtgccctcgtgtgtctttttaattaggtctctccagcttacacggaatgggacccttactataggatcacgtagtcaccgggaaacccgctgtggacttcctcttggggctctgggcttggggtttggggaggattatggggctgtagatggcaccttatttagcccaatgttggtacgcttgaaggaaaattcctccaaacggtggaatcctgctacactgggacccacagcttaatatgaaagagacatggccaacccccgaggcaaatgagacgctgtcactttaaattctacactgggcagactccaagattctgat

SEQ ID NO: 2601 - DNA, 6000 bp, Homo sapiens
tgaggccagaagttcgagaccagcctggccaacatggtgaaaccccatctctaccaaaaaatatatatatacaaaaattagctgggtgtggtagtgcgcacctgtaatcccagctgaggcagaactgcttgaacccaggaggtggagactgcagtgagctgagatggtaccactgtactccagcctgggcaatagagttagattcagtctcaaaaaaaaaaaaaaaaaaaaaacctcaggtaaacatgtcacccttaagaactgtccaagagattagacaacctccaagttatagaacccctgctccccaaaaatattaatacttaaatataagtattcagtaaacctgcctttatcattaattcttccatttagccaggtatggaatctgtatcttttattaatctctctgaaatctttcttgtggataaaatcacatgagctctttataagaaaggttacactgtggtccatttactttcacatatgtcatttttttttttttttgagacagggtctcgctctgttggccaggctggagtgcagtggcatgatctcggctcactgcaacctccatctcccaggctcaagcaattctcctgcctcagcctcccggcccacatatgtcattcttattccttcaaaactgttatgtatgccaggcatggtggctcacgcctgtaatcccagcactttgggaggctgagaagggtggatcacctgaggtcaggagtttgagaccagcctggccaacatggtgaaaccccatctctactaaaaatacaaaaattagccaggagtggtggtgggtgcctgtaatcccagctactcaggaggctgaggcaggagaatcgcttgaatccgggaggcggaggttgcagtgagctgagaacgtgcacctgcactctagcctgggcaacagagcaagactccgtctcaaaaaaacaaactaacaggccaggctcacacctataatcccagcactttgggaggccgaggtgggtgcatcatctgaggtgaggagttcgagaccagcctgaacaacatggggaaacctggtctctactaaaaatacaaaattaactgggcgtggtggcacatgcctgtaatcacagctactcaggaaggctgaggcaggagaatcgcttgaacccgggaggcagaggttgcagtgagccaagctcacgccattgcactccaccctgagcaacaagagcgaacaaacaaacaaaaacagttatgtagatttgatccagtactagtgatgtgaccatttccaacttagcgaaacagaaattgtgattaaatctggaacatcgtatgcatttagtattttatcttctaatcaatttaaaacacaagtaaatttctgtcttcttttctacagaacaaatcttttccatcttgctcattaagtggcctcaatgattacttttcttaatagaatgttttattttgcctttacagcctcagaaaaagtactcctggcatactttcttggcctaattttaggttgcacttcatgccaagaaacagaaaaaaattaaatttctttaaatacaccagagatgagcaacacaacaaattaatctgataaaagcatttccaagacagaaaaaaaagtctctacctataaagaaaaattcagaatacttttgtcttggttgcccaaaacatatatttttaagtttattaagaaatggatacaggccaagtatagtggctcatgcctgttatcccagcattttgggaagccaaggtgggaggatcgcttgagcccaggagttcaagactggcctgggtaacatagcaagaccctgtctctaccaaaaaaataaataaaaattagctggtcatgggggcatgtgcctgtggtcccagcttctcaggaggctaaggtgggaggactgcctgagcccaggaggtcgaggctgcaatgagccatgattgtgccaccacactacagcatgggtgagagtgagaccatgtccccgctcccccaccaaaaaaaagattaaaaatttttttaagaaaaaaaaagaaacaaatacaagtcaagtacaatgcagctatgtttcaacaagaaataaaatggtctaaaaattgtacttccttaaggtaagaaggaaatctaatgtttatcaaactaagaggtacaaagaagtccaacagatttttctttctttttttttttttttttttttttggtgagacggagtctccctctgtcacccaggctggactgcagtggcgcaatcttggctcactgcaacctccgcctccctggttcaagcgattctcctgcctcagcctcccaagtagctgggattccaagcacctgccaccacctccagtttatttttgtatttttagtacagacggggtttcaccatgttggccaggctggtctcgagctcctgacctcaagtgatccacctgcctcagccacccaaagtgctgggattacaggcgtgagccactgcacctggccagattatctttcaaatcatttcagtgcccaatttccttttctttttttttgagacagagtcttgctctgtctcccaggctggagtacagtggtgtgatcccggctcactgcaagcaattctcccgggttcaagccattctccctgcctcagcctcccaagtaagtaaactgggattacaggcacctaccaccatgctcggctaatttctgtgtttttagtagagagggggtttcaccaagtcggtcagtctggtctcaaactcctgatctcaaatgatctgcccacctcagcctccccaagtactgagattacgccactgtgccctagacacattttcataaaaagcaacattttattcatcataaacacaaagttcaaaaaagctttatgcatgataaataagaagaaaaaattccatgtcaattcactgacatgcaatagtcaacctcacctatgggattaataatgctactaagaggtctggttagttttccatgaattgggtcccaatgctagttgtattcttattcccttaaaaaaaccacatagcagaaagaagccacaaaaggaatgtctgaaggactcagatgagcacaaatgctacattactactaacgaaggctgtccttatttgaaattattctattaaaaacgggaaaatgcacaagaatgactcccctatcatatgccacataaaattaacaggtaagtacaattcagtcacattcacaacagcacgtgtggcctcaaatattatgcatacttgttgactgatgttaagtatcaacttactgtacaaagaagaaataaaacaaaacccacagtaatatatttccttaagaatacactgagtcggggctgggcacggtggcttacgcctgtaatcccagcactttgggaggccgaggcgggcggatcacgagttcaggagatcgagaccatcctggctaacacggtgaaaccccgtctctactaaaaatacaaaaaattagccaggcgtggtggcgggcacctgtagtcccagctactcgggagactgaggcaggagaatggcgtgaacccgggaggcggaggttgcagtgagccgagatggtgccaccgcactccggcctgggcgacagagcgagactccgtctcaaaaaaaaagaatacactgagtcggttaaatactagcacgagctgataagcactgctagaaacctaagctctgatttcagcaaatgcatagaaacacttttcaaagaagcagtatacctaggccggcgcggtggctcacgcctgtaataccagcactttggtaggccgaagcgggcggatcacttgaggtcaggagttcaagaccagcctggccaacatggcgaaaccccgtctctactaaaaatacaaaacagccgggcgtcgtgacgggcgcctgtaattccacctagtcgggaggctgaggcaggagaatcgcttgaacccgggaagtggaggttgcagtgagccaagatcgcaccgctgcactccagcctgggtgacagagtgagactctatctcagttaaaaacaataataataataataataataataattaaaaagttttaaaaaagaaaagcagtataccaaagtcattcctttacccatacatacatttactcttacttggactcaggagtaacaaggaactcacctcctttagaaaacgaagaaaatgaaatactgagttaagaaggggttaaggagaaagtatttgtatttattgagaaccaactactttatccacttcagtaagctcaacaacatactcagaaacgggattcacctctgaattagcaaaaccgacgatcctaaaaagcaatttggaggagtggcaatgaagagggacgacctgacgttcgctcccgccagtaccaaaccactcgggcccaccgccttccccttcctcagagacctaaacacactgaggccgcgttccggtagccggtggcatctcctgtcagacgccggccactccgcgctcctgtcacctccggtggaggcgaccccatcccgagggcactgccgcgggggctcggctccgactgcgggagacccagggatggggtggggagccgagccttctaaataaagctgttacagctgcgggtcctggggcagcccgaaggccagaaggggcgaccctgggacagaggccgcgacatccctcgggatccccactgaggcaaccgggacagcattcgacgactcggctcgcgagaccctcggcgtgacgccgggtaggaccgggtcgactggcaatgggggaggccctccaccgcgactggactggatacccggcgggggtcctggagaaaggaagggccggccggcgggcgccccacagccggaaggggcgagcccgcaaatagggctcaccttcaggtcgttctctggcaggtacttgcacagccgcgctatttccacatacttgtccaggtctagcggcgccattttaagaataacaagccgcggcaacagcggcggcggcggctgtagcagcggcggcggcagcggcggaggccgaagccggaactttccctgcgtcacgtccggcccgtgagtggcgcctgcgcagcgccgttaaagcgcgacccgtttctccccgctacgtcggtacgcccggcgccccctctggctgaaccccgactgcaggccccaagagagcccgcttcggtccaccccgcgaaacctgctgggacccgtagtcgtctgccgcgggggtgctgggatgtgtagttttctgttgtggacagccacccctctcttttcctcccgttcctccagactttcacctcccggcagccggcgaggcttttccgaggcaaaacagcggagtaggtggtcctagccactcactggtttgtttttccaacccttttaagcactctccagaatatcttcacttaacaattgggtaagcctggccgtagtaaccgtttgcacctttccaagtccctgtgaaaacctcgcctaagcctgtggcagagatgtcaggccccagtcttccagcctgaaaggaagggaaacgaatattattaaagcatttctgatgctaaatgcgatacaaatgatatttttccttttaatcttcgtaacgattgataggaaagtgaggctaggaaactgcagttcaccccaaatctcacagggaacaaaatggtggggtcaagattgaaaaatggcttaagcttaagcatgcttccagtgagaatcccacgagggcagggagttttttgctgtaactccagcaccgagaacagtacctggtactagcataccttcagcgttcgtttatccaaccactctttgctgagcaacaaagatgtgccaggtacagctcaaggcgcttgcagtacttcgtgaacaaaatagacaaagatctctattctatctgtagctacaaaaagtaccaaaattagcctggcgcggtagtgcgtgcttgtggtcccagctactctggaggctgaggcaggagaaccgcttgagtt

SEQ ID NO: 2602 - DNA, 6000 bp, Homo sapiens
agttccctactgaagactggagcactcagcctgccacggaagactggtctgcagctcccactgttcagaccactgaatggttttaaattgttcttgcagggactcttaagcaacttggaaataaggttgatggaaaataggcatcagtttctttttttttttttttgtttgagacagtctcgctctttcgccaggctggagggcagtggcgcaatctcggctcactgaaacctctgactccctgtttcaagcaattctcctgcctcagcctcctgagtagctgggattacaggcaggctaatttttgtatttttagtatagacggtgtttcgtcacattggccaggttggtctcgatctcctgacctcgtcatccgcccgccttggcctcccaaagtgttgggattacaggtgtgtgtgtttatggccaccgtgcctggccataaacatcagtttctaaaaaaaaaaaaaaagaaaaatatctaaacaagaacagcatcttcttccatttgaatttttttctccaagaaattctgagcagattatccctttacctttttttccttttttttttttgagacagggtctcactctgttgcctaggctggagtgcagtggcacaactttggctcactgcaacctccgcctctggggctcaagcaatcctcccgcctcagcctcttgagtagctgggactacaggcacatgccagcatgcccggctaatttttatattttttgtagagatggggttttgccatgtttcccaggctggtctcgaactcctgggcccaagcaatctgcccacctcagcctcccaaagtgctgggattacaggcatgagtcattgcacctgtcctgcctttttttcctcccctcccctccctctctctctttctctctttctttctttttgatggagtctcgctttgtcacccagtctggagtgcagtggcgcaatgtcggctcaatgcaacctctgcctcccgggttcaagcgattctcctgcctcagccttcccagtaggtgggattacaggcatgcaccaccatgcctggctaatttttgtatttttagtagagacggggtttcaccatgttgaccaggcctgtcttgaactcctgacctcaagtgatctgcccgcctgggcctcccaaagtgctgtgattacaggcgtgagccaccatgcccagcctcctacatttttttttctgaagtcttacatgttacaccttcagaaatgcctttcctgcccacctaatactcagagttaacactcatattgcactcactctgtgctagacaatgtttttttgtctttgttttttgttttgagacagagtctcactgtcaccctgatgtagtacagtgacacaatcacagctcactgcagccttggcctcctgggctcaagtgatcctcccacatcagtctttagagtagctgggtctacaggtatgtgccagcaccaaacctggctaattttaatttttttttttttttggtagagatgaggtctcactatgttgcccagtctggtcttgaactccttggctcaagtgatcctcctgccttggcctctcaaagtgttggaatcacaagtatgagccactgtgcccggcccagacattgttttaagccattttcatataccaactctgttaaacctttgtacaagcctatgaggtaagtagtattcttacaatctccagaggaggtaagcattattattatctccatattggagctgagaaaactggagtacagaaaggataaataacttctccaaaccaaaatcacacaataagtggtagagcctgtatttgaactctgcccacatggtgctagaagctacatcctgtactttacctcctctgtgttatcaacctaaagtaggcctcttttttttgagacggagtctcgctctgttgtccaggctggagtgcagtggtgcgatctcggctcactgcaacctctgcctcccaggttcaagtgattctcctgcttcagtctcctgagtagctgggatcacaggcacgtgccaccacaccaggctaagtttttctttttctttctttctttttttctttttcttttttttaagacggagccttgcattgtcacccgggctggagtgcaatgacgctatctcagctcactgcaaccgcaacctccatctcccaggttcacgcaattctcctgcctcagcctcccaagtagctgagattacaggcacacaccaccatacccggctaattttttgtatttttagtagagacagggtttcactatattgaccaggctggtctcaaactcctgacctcatgatccgtccgcctcggcctcccaaagtgctgggattacaggcgtgtgccaccatgctgggcccttttttttcccccaaaggacacaagtacaggtaagaaaatgtagttttttgttttttttttttttttagacagggtctcactttctctcccaggctagagtgcagtggtgggatctcagctggtcaggaactcctgacctcaaaaagacctgcccgcctcggtctcccaaaatgctgggattacaggcgtgagccactgtgcccagccaaaggtagacctcgtctactccatttttcttgcttatagtacctcctattttcccttttgagtactaatcacaatttgcaattaaatatttgctcactgccaggtatggtggcttacacgtataatcccagcactttgggaggccaaagcagcggaatagcttgaggccaggaatttaaaaccagcctcagcaagacctcacctcaacaattttttttttttttctgttggccaggctggagtgcagtggcacgacctcagctccctgtaacccccacctcaaagcaattttcatgcctcagactccggagtagctgggattacaggcatgtgctacaatgcccagctaatttttgtatttttagtagagatcaggtttcaccatgttggccaggatggtcttgaattcctagcctcaagatatctgctcaccttggcttcactactgggattacaagtttgagccactgcacccggcctcaacaaaaacaaaaattttaattacctcaccctatgcatctcttcatttgtatcctttgtaatatcctttatattaataataaaccagtaaatgtaaataaataaataaatactgtttgtctcttcccagcagattgtaagcctgattagggcagggatcatatctgttttattcacatcataagcactgtgtaacctctggtttcttttctctttgagatggagtttcactctgtggcccaggctggagtacagtggcgccatctcagctcactgcaacctctgcctcaagcaattcaagtgatcctcctgcctcagcctccccagtattttgtatttttagtagagatggggtttcggcatgttggccaggctggtcttgaactcctgacgtcaggtgatctgcctgccttggcctcccaaagtgctgagattacaggcattagccaccgcggcctggccaataggcactatgtaactattagtttaatgaatgaagaaatgaatgcttgtgggcatcattcattctgcaacaaacttctaaaaattaattttactttgaaacaatttcatactttcagaggagttacaagaataatacaaagaagttcacccagatatctcattcagggttagccaattgtccacaaaatatactttagagagcaagaggattaattccagggtctcttgagcaacaaatatttattgagcgcctgctactattggattacataacagtctcttaactggtctcttagctataggcattgcacccccacccctagtcccatacagcagctccttttactaatttatttttgaggaggatctcgctctgtcgcccaagctggagtgcagtgccgcgatctcagctcactgcaacctccgcctcccaactcaagcggttctcctgcctcagcctccagagtagctgggaccacaagcacgcactaccgcgccaggctaattttggtactttttgtagctacagatagaatagagatctttgtctattttgttcacgaagtactgcaagcgccttgagctgtacctggcacatctttgttgctcagcaaagagtggttggataaacgaacgctgaaggtatgctagtaccaggtactgttctcggtgctggagttacagcaaaaaactccctgccctcgtgggattctcactggaagcatgcttaagcttaagccatttttcaatcttgaccccaccattttgttccctgtgagatttggggtgaactgcagtttcctagcctcactttcctatcaatcgttacgaagattaaaaggaaaaatatcatttgtatcgcatttagcatcagaaatgctttaataatattcgtttcccttcctttcaggctggaagactggggcctgacatctctgccacaggcttaggcgaggttttcacagggacttggaaaggtgcaaacggttactacggccaggcttacccaattgttaagtgaagatattctggagagtgcttaaaagggttggaaaaacaaaccagtgagtggctaggaccacctactccgctgttttgcctcggaaaagcctcgccggctgccgggaggtgaaagtctggaggaacgggaggaaaagagaggggtggctgtccacaacagaaaactacacatcccagcacccccgcggcagacgactacgggtcccagcaggtttcgcggggtggaccgaagcgggctctcttggggcctgcagtcggggttcagccagagggggcgccgggcgtaccgacgtagcggggagaaacgggtcgcgctttaacggcgctgcgcaggcgccactcacgggccggacgtgacgcagggaaagttccggcttcggcctccgccgctgccgccgccgctgctacagccgccgccgccgctgttgccgcggcttgttattcttaaaatggcgccgctagacctggacaagtatgtggaaatagcgcggctgtgcaagtacctgccagagaacgacctgaaggtgagccctatttgcgggctcgccccttccggctgtggggcgcccgccggccggcccttcctttctccaggacccccgccgggtatccagtccagtcgcggtggagggcctcccccattgccagtcgacccggtcctacccggcgtcacgccgagggtctcgcgagccgagtcgtcgaatgctgtcccggttgcctcagtggggatcccgagggatgtcgcggcctctgtcccagggtcgccccttctggccttcgggctgccccaggacccgcagctgtaacagctttatttagaaggctcggctccccaccccatccctgggtctcccgcagtcggagccgagcccccgcggcagtgccctcgggatggggtcgcctccaccggaggtgacaggagcgcggagtggccggcgtctgacaggagatgccaccggctaccggaacgcggcctcagtgtgtttaggtctctgaggaaggggaaggcggtgggcccgagtggtttggtactggcgggagcgaacgtcaggtcgtccctcttcattgccactcctccaaattgctttttaggatcgtcggttttgctaattcagaggtgaatcccgtttctgagtatgttgttgagcttactgaagtggataaagtagttggttctcaataaatacaaatactttctccttaaccccttcttaactcagtatttcattttcttcgttttctaaaggaggtgagttccttgttactcctgagtccaagtaagagtaaatgtatgtatgggtaaaggaatgactttggtatactgcttttcttttttaaaactttttaattattattattattattattattattgtttttaactgagatagagtctcactctgtcacccaggctggagtgcagcggtgcgatcttggctc

SEQ ID NO: 2603 - DNA, 6000 bp, Homo sapiens
ggctaatttatttatttattttttagtagagacggggtttcactatgttgctcaggctggtctcgaactcctgacctcaggtgatcctccagcctcagcctcccaaagtgctgggattacaggcgtaagccaccacgcccagccccctgctctcacttctgtcccctatccttgcccctcttcctcagtctgtgactcaagcagggatagtgttggggggcctatggagaggagggagaagacaggctcacagacagggcagagttggagaccttaaacttcatcgtcaaaggcatcaggcccacgcaatcctgggttcaatccccacctccatgaccttgggcaagtcatgtcacctctctgagcctcttttttttttccccatcagtaaaataggataaatataacatcccttacatgatctcatggcagcaaaataaaatatttataccaagagtatcattttgatttaatccccttgtgtctttatttgcatgttccgaacagacctgaagccttctgagagaggccggggccttacccatccacactagcccccttccatatgaggactggatcatgggtgctcaacagatgcttctccctcagttgacctgacattggggacagtgtgggatgatggcaaatgaccctgggctttgagagtaaagaaacctggctttaaatcccagcttcatagcttcctggctgtgtagcctggggcaggccacaccaatctgggcctcaatttcccctttcgtaacttgggtctaataataacaacctcctaatagggctgctggagagtttcagggagacaatgcaagtcaaccccaggccaggcactgagtcagttcctggctagtgtgggcagaacttctgtgattaattgattgattggagacagagtttcgctcttgttgcccaggctgggtgcagtctccagatctcagctcaccgcaacctgctcagactctgcaatcactcccggactcaagtgagtcttctgcctcaggcctcctgagtagctgggattacaggcgccaccacgtctggttaattttctgtatttttattagagacggggtttcatcatgttggccaggttggtctcgaactcctgacctcaggtgatccacctgcctcagcctcccaaagtgcagggattacaggcatgagtcaccgcacccggccaattattattattattattattattactattattattattattgagatggagtctcattcttgcccagactggagtgcagtggcacaatcctggctcactgcaacctccacctcccaggttccagtgattctcctgactcagcctcccaagtagctgggattacagatgcacgccatcacacccagctaattttcctacttttagtagagacggggtttcgccatgttggccagactggtctcgaactcctgacctcaggtgattcacctgcctcctcctccaaaagtggggattacaggtatgagccactgcaaacaggcaacttttgtgattttagagggttgtgggtatcacaggctgttctccgtcctgtacccctgctatccagttgacccactgtctcttcagatgcaccaaaagccaagagcagcccattccatgaacccatcttctccttccctcctatgcttcccgtctgtctctgctcagaggaaaacagggggtccaggctggggtcagacagctgtccagcgcctccctttcctgtgctgccctcaccttctctgttaaatggcagcaggaccagcggctctcttggggcagacatctaccaaggactggccacatgcccagccttgccagcttagccgacccctgggaagcaggaaacgtttccagtcaatgagaaatcactcatttcttcttatttctgcctgggttttgccagcttggtgatctggggccccggacctgggcagcctgggtagctttctgacaggcttccggcctttcctgcctctcttgcctgcctgcatcccacagtggggactgaggccctgaggccccaaggggaagtggcgggcggatgctggggttcagacgagggatggcggggtgtaggtgacaactccaccggaacttctgctagggcctttgcccacaggatgtgacttagggagggctcatgggaaacggcaggccctggcttgagatgtagtcggataatggaggccacacaagcccaccgcagatccccgcccaccgcactactgctcagaccccagcaatgccgtggctccacccctaggccagatgggcagggccccgagatggggaagtgctggggtttgtgccagactgacctggttcaaataccagtatggtcactgaccagctgtttgacccaggccaagtgatgtcacctcgggatcctgatgtgtacaatggaggtgacaacagtacccatgtggttgagtggcaaccgagataattcccataaagtgccaagtgtagggcttggaccatttattttccgtcaataagttgtcattactaaaatttttatggtctcactccttatcctccccacctccaatttagggaacagcctcctgcttctaatagtgtaagccatgaagccgaccctacgtcactaactgcctaaacccctctcttgcttcacgttactctcaggagagggctccttcctcctcagcctgaccttccagcccctccctggtagtgcccttccccagaacaagacctcttgtgacatcaaggtcaccaaagccattcctgcctcctcctaggaggctttgaggctaagcagtgtggggtgagagctgggagccaccccgagggcttttttttgagacggaatctctctctgtcaccaggctggagtgcagtggcaagacctcggctcactgcaacctccacctcctgggttcaagcaattctcctgcctcagcctcccaagtagctgggactacaggcgcccaataccacgcctggctaatttttgtctttttagtagagacggggtttcaacatattggccaggctggctccaactcctgaccttgtgatccgcctgccttggtctcccaaagtgctgggattacaggcgtgagccaccgcgcccactccaatggcttcttgcaggaagagagggtaacgagagtctgggggagtgtaggatcaggggagcaccgccctgaacgcagaaaggcttggggagacagtagagagatttgcatggccacagcttgaggggtggggtgtgaactggaaagagcctccaatgtcacattcaggttcttcggggacagagaggccagactggggggctaggtctcaggatccacccgcagagggctggagaggagggggcagattgaagcggggcagaggaggcagaaaagacggctttgctggaggctgtccttgggcagagctggagggggaatctgggggccgctggagccaggaagatgcgagggaagggatgggcgcgatgggggagggagatggggggggtgaacggtgagctcgcgcctgcataaggacagcaggcctccccactgctatcctcctggcccaacagcgaatagcgtgagtcaagagaatcccctcactcagacacccaggttcgggtcccaactttgtcgccgtgtgaccttgggcaaatgacctcacctctgagcctcaacgtcttcttctgcaaaatgggttagtgatcctgactatggggctgttgattcaggattcggcgggaacgcccagcacttcctgagtacacaagagtgctgagaaaatggtagctgttttttgcgattactgactcggggcccgaccagctctggcacgactcagcggaggtgggagtcctgcgggtcccatccctgcctcccggagagccagaccccagcgatagaaggcccgggcgttgcttgctcgtcgccgctagtgccgccgcgccccctggcggccgtcggttgccatgtcaacggagggtggcggggaccgggggaggcggaggcgggggccgttctctcctcccagggccggaggacgctccctccgcgcctcccgccttcgcctctgtgggggcactccgagccggggaggaaggggctttccgctgcagccgacatgtgggggtaaactgaggcacgcggcagggcgcccgcagccaggtgccgagcgcggggccccacctccgaaggcggaggaggggccgcgggcggtgacgcgccgagggcggccggcggacagcgagcgggcgggcggtggcggcggcggcaggtgcggccgcggagggtgggagggaggagggcgggggcgggcggaggaggaggggagggcgaggccgggcacctccccctttataacgcgccccctcctgggctctcgggccgtctcctagtcggctcttcccgtctcgccccctcgcccggccgccccgggcccgggtccggccagggagctcccaggccgcggctcgggggctgaccccccgcccgccgccccgcgcagcccggcggaggcggcgccgtcggaggaggaggagcagggcactgcggctggccccggatcgggcgccagagcggcagcagcttcggcagcagcggcggcccgggcccatgcagcgggacgcgccaccccgagccccagctccggcgccccggctccccgcgcccccgatcggggccgccgctagtagtggcggcggcggaggcgggggcagcggcggcggcggcggaggcgcctctgcagctccggctccccctggcctctcgggaactacaagtcccagggggcctggcggtgggcggcgggcggaagaggcggggtcggcgccgcgaggccggaagtggccgtggaggcggaagtggcgcggccgcggaggggcctggagtgcggcggcggcgggacccggagcaggagcggcggcagcagcgactgggggcggcggcggcgcgttggaggcggccatggcaaagcagtacgactcggtggagtgccctttttgtgatgaagtttccaaatacgagaagctcgccaagatcggccaaggcaccttcgggtaaggctgggcccctcggggccgggagccctgggcctgcacccctagggccgacgtcgggatgcccgggccccccccgagttggtagagaagtcgtctgtccccgggcttgcctgctggtctctaggccgcgccgcaccccgccccggcctgacggagccggctggtggggaggagcctgaggcccgtggtgggggcggggaggggctgcagagaggcgcccgtgaggggagcgggatctctccaagggacgcccaagtgaggagaagggactgagggaaggaagcagaggctccgaacgagacaggctgccgggtggcggggtagccgcgtgccctgggtacctagcccagccccgcccgggaatctctttgctgctgcccctcctcctgtagtgggggaggggcgggccctgcggaaatggcctgatgagttctcgggtctccctttccgcctgcagggaggtgttcaaggccaggcaccgcaagaccggccagaaggtggctctgaagaaggtgctgatggaaaacgagaaggagggggtgagtacggatcgggcgtgcgggccggccggctaactgcccgggaccccgggtcggttttccaccctgctgcttctgggagtctcaggttgagatttaatttttttgtagtagttcagaaatttccagggaatgtggcttccaccctaaaactaaatgtttcattcttaggcagttatgggtgaggccaggagggggagttgatgcatgcatcgtgtgcactttatttcacgaagttaggaagcctttaaacacctttttttagtgttaaatttcgcttaatgtaaaagaaagattatatatgcatgctttttgaaaggtgtctgatactcaattatttaatgtatttaaaaggagcggtcccttctccaccccatcttagctctagtacaact

SEQ ID NO: 2604 - DNA, 6000 bp, Homo sapiens
cctctcgggcgcgatggcttcagccttgctactcagacccatgtctcggagctcccgatccccatcctttttcccagtgccatccccgtttgagtcctggagatcaccaattccagccccaaggggtcctctgtctaccacagagtggggcagagaatggaggtgagaagccttggggaagaaggaaggtctgactttccaaataaccctctgacaccccctcccaacacacagggggctccccccgcagcagccacagcagccgcttctgaatctccagggcaccaactcagcctccctcctcaacggctccatgctgcagagagctttgcttttacagcagttgcaaggtatggatggccccaggcctcttctcagtctcttttagtggtagctccctagcagcgcattgctctaaatctcaactccacacagccaccctgagagggagctattcttggcatcctagttcactcatgaggacactaaggctccaggaggtgaaagtccctaagctgctaatttgaatgcagatctgtctgattgcagaggtgtgtccttggccatggtgctggctctttgggcaatactcagcacacttcactcacattcagattagatgccatctgacaggtgaagaagctaagaagggaaatcatttgccctgcatcagcagtggctaagctgggccgatgcctgggcctcttgaccatccagatgtctgagtggttgtctctagccctgtgcattaagtctgtggccttgtctcaatttcccaatatggagagcagtctcagctcttccttccaagatgctgctcctttttttttttttttttttttttttttttttttgagacagagttttgctctgtcgcccaggctggagtggagtgcaatggtgcaatcttggctcactgcaacctccggttcccgggtccaagcaattctcctgccttagcttcccgagtagctgggattacaggtgcccgccaccatgcccagctaatttttgtatttttagtagagacggggtttccccatgttggccaggctggtcttgaactcctgacctcaggtgatccacccgccttggcctcccaaattgctgggattacaggcgtgagccactgcgcccagccaagatgctgctcctgattctactgataaccccctaaggagaggtacaaccatgatcccattttacaaatgaagaaactgaggcccagagaggggtcatgtgcccaagattacataacaagtcggtattgattagatggttgtcactctgtggacctgtcagggccacatggatgtggtcctgggaactgacttaaaaatgataagcaggtaggtagagagagagaaccatacacagggacctgccacatatacatatacatcttcctttttttctttcccatttaaaacattacacccttcagccatgggttgtggctcacgcctgtaatcccagcactttgggaggccaaggcaggaggatcacatgagtccaggagttcgagaacagcttgggcaacatggtgaaactctgtctctattaaaaatacaaaaattaggctgggtgtggtggctcacacctgtaatctcagcacattgggaggccgaccgaggtgggcggatcacgaggtcaggagatcgagaccatcctggccaacatggtgaaaccccgtctctactaaaaatacaaaaattagctaggtgtgatggtgtgcacctgtagtcccagctacccaggaggctgaggcaggagaatcacttgaacctgggaggtggaggtcgcagtgagctgagatcgcgccaccgtactccagcccagcaacagagcgagaccctgtctcaaaaaaagaaaaaaaaaattggctgggcgtggtggcgtgcgcctgtaatcccagctactcaggaggctgaggcatgagaattgctgaacccaggaggcgggggttgctgtgagccaaaattgtatcactgcattccagcctaggtgacagagcgagaccctttctcaaaaaaagaaaaaaaaaaaggaaaataactcacactcttggccaggtgcagtggctcatgcctgtaatcccaactctttgggaggccaagacaggagatttgcttgaggccaggagttcaagatcagcctgggcaacttagcaagaccctttctcaaaaacaaacaaaagaataaaagtcacactctttaaagtggaaaaaaaggttaaaaatggggataggaaaacccacagtgtcatctgttgactcactcaccacctgaagaaaaccaccagtcagcatttttgtctctttcatcccattttttttctaggcacagacttggggatttgtatctgatgattgtgattgatataagtcccaggctgtaccctgtttctttgtcactgaatagaatggcatgatcgtttaccataggatttgatcatctgtgttaagattatttttaatagctgtttaatattgcaccagagggctatgcctttgtttatctaaaccttcttagctgtttggctctttcctttttttttttttgcttttttctttcttttgctttttttaattttttgttttgttttgttttgggttttttttttttttttgctgttttaagtaaccctgggatgaatatgttgtttgagattgttttctcactgagtcaggggggatggatgttttatggctcttgataagtattgccgaattgctttcctaaaggactggaccagtttgcaatgccaccagccacgtatgacactgccggtctcaccatgcccacagcaacactgggtattatatgctttttatatatatatataaatgtatatatacatataattaagttggttggcaaaaagaagctatgtcatgaatgttttacatttcttagagtgctagtgcaattgaacattttatatttgtctgttgaacattttatttctttttgtgacttgtccatgtcctttgttcatttttcttttaggttgtttcatcttttgtcttattgtttttaagagctggttggctctctgcacatatgtgtatatgtatttgtttcaagttaatgttaattgaacatttactatgtaccaggcacatttgtatatctcattgaatactcatgaaacattgtgaggcaagtgctattattatcccctttttacagatcaggaaatcaggctaagcagggggaagtgatttgttcaaggtcacagagcttgcactgtagagtctggatttgaacccagcgctcacagcacgccatgctttaacctttaacccctgtgcttcccatcccagcactggggcaagagttccaactgcctttcatcccttaaatacttcccaagctctgggcttcccctgaggtgcagagctgagttagatgatgtgaagcagaaagcagataaggagctggatgtggtggctcacgcctgtaatcccagcactttggtaggccaaggtgggcggatcaccctgaggtcaggagtttgagaccagcctggccaacatggtgaaaccctgtctctactaaaaatacaaaaattagccaggtgtggtggcgggcgtctgtagtcccagctagtcgggaggctgaggcaggagaatcacttgaacccaggaggcagaggttgcagtgagccaagatcgcaccactgcactccagactgggcaacagagcaagactccctctcaaaaaaaaaaaaaaaaaagcagacaaggaaagtatgaagtatgtagctcgtcctagaataattggaagctggggcctttggggacacagtctgcaaaggtctcttggaggagagatacctatagggaggtctgaagggtgtcagtgggtagaacagcccaggcagagggaacagcatattcaaaggccctgaggcaggatgtctgaaggacggcacagggacatgtgactggaatatagtggggacatgtggggagaatggcaagaaaggaggctggaaaggtgggaagggccagaccatgcagtgaggaatggcctttgctacccaacagcagggagctatggaagtgtttgggcagaagggagagatgaactcagaatatggtttgcgaaagatcgctgtttgctgccatcttgtgcaaaagctgtggctggaattcaggcaaaggatcaagtggttttgggaggaggcagggagtgggagtggggatggagcgggaaagtcagattgggaagaggcataggagacagagttgatagtatgtggggatggcttgcatggaatagggcaaagagagggaggaatgaggaataccccagaatcctggctggggcggtaggtggatggcagtgtccctcgtagcgaccctgggcaagctgcacctccactctgtctccgttttgtcatcggtagagataacacccaccctgaaacctgctgggccgagggactgaggcagtgtgaggaatgggcttagcacagtgcctgactcatagttgctgctgataaagggtagctggtaggggtgggggtgggtgtcttgttatcccagggaccagccctcctgctggttctccctatgggctgtgctaagtctctcacctactctatggcagactctaaagcatgcctgagggtgagcagagttttggggaatgctaaaggcaacacccccacccctagctggggcagaaaagagccctaaagcttccttcaccatcagtgcccaagatggggctgagcctcagctctcatctcttccctttggctgcccttgggtgggaaggtccctttcaattatctgggatgttcccatgatgctctggggcactgatgcctgaccctaccttctgccacccgaccacattgtgacccctcttctcctgtcttcttgcctgcaggtaacctccgaggctatggcatggcatccccaggcctcgcagcccccagcctcacacccccacaactggccactccaaatttgcaacagttctttccccaggccactcgccagtccttgctgggacctcctcctgttggggtccccatgaacccttcccagttcaacctttcaggacggaacccccagaaacaggcccggacctcctcctctaccacccccaatcgaaaggtgagtggtaggtggggatgggagtgggcgggaggggaccctgggtgtcagccccagtgccacctgctctggctcagtctgggccttcggacaggtcacactccctttatgcctcagtttcctcatctgtaaaatgaggggggcgggaatggacttgtttagcgtttcccaaacttcaaatattcttttatcaacgaagggatttttgccatgcccaaacactaccagtactatcatttacttaatgtttcttttttgtttgttttttgagatgaagtttcgctcttattgcccaggctgaagtacaatggcgcgatctcagctcactgcaacctccgtctcccaggttcaagcgattctcctgcctcagcctccagagtagctgggattacaggcatgcgccaccacgcccagctaattttgtatttttagtaaagacggggtttctccatgttggtcaggctggtctcaaactcctgacctcaggtgatccgcccgcctcagcctcccaaagtgctgggattacaggcgtgagccactgcgcccagcttaatatttctttttaaattattggtgtggccaagcgtgggggctcacacctgtaatcccagtactttaggaggccatggtgggtggatcacctgaggtcagaggttcgaaaccagcctggccaatatggcaaaacccccttctctactaaaaatacaaaaaagtagccgggcatggtggtgcatgcctgtaatcctggctactcaggaggctgaggcaggagaatcgcttgaacccaggaggcagagcttgcagtgagccaagattgcgccattgcactccagcctggggaacaagagcaaaactctgtctcaaaaaa

SEQ ID NO: 2605 - DNA, 6000 bp, Homo sapiens
aatcaaagtatgtgacatcatcatgagaagggatagatagagtccatgagaagggatagatagataaagtcctggagcagaataggtctggaaggcctggcatggaggctcacgcttgtaatcccagcactttgggaggccaaggtgggtagatcacttgagatcaggagtttgagaccagcctagtcaacatggtggaaccccatctctactgaaaatacaaaaattagccgggtgtggtggcgcatgcttgtagtctcagctactcaggatgctgaggcacgagaatcacttaaatccaggaggcagagactgcagtgagctgagatcacaccactgcactccagcgtggatgacagaacaaaattctgtctcaaaaaaacaaaacaaaacaaaaacacctgggatggtaatgtgcatgcattttataagccagtgagctcacttcacatcatattgtgggtgtttatcctttgaaaacataatttctgatggctgggcactgttccttaaaaggtgacaccatgacttatttagctattcccctaaagttgattattttccagacagctattataaataatgttttggctgaatgtggtggctcacacctgtaatctcagcacttcaggagaccatggtaggagaatcacttgaacctatgagttcaagaccagcccgggcaacatagtgagacccctgtctttaaaaaaaaaaatacaaaaatttgctgggcgtggtggcatggacttgtagtcctagctgctcaggaggctgaggtaggaggctccattgagccagggagggaaaggctgcagtgagctatgatcgtgccactgcgctccagactgggagacagagcaagaccctgtctctttttttttgttttgttttgagacagttttgctcttgttgcccaggctggagtgcaacgatgggatcttggctcactgcaacctctgcctaccaggttcaagcgattctcctgcctcagtctcctgagtagctgggattacaggtgcccaccaccaggcccagctaattttttgtatttttagtagagacggggtttcactatgttggccaggctggtctcgaactcctgacctcaggcgatccacccacctcagcctcccaaagtgctgggattgtaggcgtgagccaccatgcccagctgaggctgtccttaaaaagaaaaaagaaaaaatatataaatatttccatgaacaacctgctatcttgtaaaagtctcatttctgattattttcttaggctagactcctacaaatggtgttattgggtcaaagggcaaaacatgtgcaagattcttttttttttttttttttttgagatggagttttgctcttgtcacccaggctggagtgcaatggtacgatcttggctcactgcaacctccggctcccaggttcaagcaattctcctgcctcatcctcccgagtagctgggatgacaggcgtctgccaccatgcccggctaatttttgtatttttagtagagatgaggtttcaccatgttggccaggctggtcttgaactcttgacctcaggtgatccgcctgcttcagcctcccaaagtgctgggattacagacatgagccactgcatcggcccaagattcttgatataaaatttgcaaattgcttcccagaaagatgaaccaacacaggaagttagtgctggctttccaccttcaccagcacaagcattatttttagttttttcactttggcaatttgctaagctccttctgtgccaggtgccagtgctaagcattatgtaatgtcatccttaccaccccgggagggggcacacatttcaccaaggaggaaaccagctaagaggcctctcccccagccagtgtcacctagccacaaggcaggggagtcacgattcaatcctggacctctccaacgctagcacccagatcaaggtgttaacatgcttgcttggcagcctgggcagtctttgatttttattttttaaaatggagtctcactctgtcgcccaggctggaatgcagtgatgtgatctcggctgcaacctctgcctcccgggttcaagcgattcttctgcctcagcctcccgagtagctgagattacaggcgcccgccaccacatccggctaattttttttgtatttttagtagacacgtagttttaccatgttggccaggctggtgtcgaactcctgaccttaagtgatccacttgcctggaccccccacaaagtgctgggattacaggggtgagccgctgtgcccagtagagcctgggcagtcttgactcgcccctctctcctcactgcttctgtcttggttttcacgggagcgggttttctaattggcagatttgatgctgtcactcatgaggttcacacccttctccagtgctccctacccttagaggataaagcctacttctcagcccagcattcgaagtccccaccctccaggctgcctgttcacccataggcgccgacgtccccggggccctggacgccaccctgcgctccggcctcgctgagtcactttcgcgcctctaagtcctagctcttccacgactagtccaggttgagttaggctcctcagccgccgcccatctgccgcagagccagtccagagctttggagcggcgctcgtcacatgactgcagtgatttatggacgcgcgaattctgctgcccgagcgccctccgtcaacgcgctccgcctgcccgggtctgcgcgccgccagtgcccccgcgcgccctgcccgcccaacgtcggcgcggaaggcagggcgaggagtcgcccaggctgtgacacgcacaaggcagggagccacagaaaagggagccggaattgctacttagtccaggagaggtggctcacccctgtaatcccagcactttgggaggccaaggcaggcgaatcacttgaggtcaggagttcgagactagcctgaccaacatggtgaagccccgtctctattaaaaatacaaaaattagccgggcgtggtggcccgcgcctgtagtcccaggtattctggaagctgaggcgggaggaccacttgaacccaggaggcggaggttgcggtgagcccagatcgtgccactgcacttcagcctgggcgacagagtgagactccgtctcaaaaatataaataaataaaaaataaataaaagaattactacttagtagccaaggattgttacggcgcggggatggggggatacagcggttgttaagggggttcttgggggcaggaccattttaggtgcaggataagggagcagggctctgttttcctctccttttctttttaaaatttttacttttttttttttgacagctcttgctctgtcgctcaggctggagtgcagtggcgcgatctcagctcactgcagcctgtgcctcccgggctcaagtgatcctcttgccttagcctcccgagtagctgggactacagacgcccgccaccaccctggctaatgtttgtattttttgtagagagggatttcgccattttgcccaggctggtcttgatcctccagcctcggcctcccagagtactgagattacaggcggaagcgcccggcccctagggctattttttgataattggcctcgaccctcctcacctactccttccttagccaaatctactgagaaaagacttggagggggactctccctccacccctccgtgggcaaactcctgacggactgtaagaccttggccgccctctcgcctggcctgggtccctcgaatgaatgtacatccgccaactgcgcgccccctctcaccgcagccccgcgcggggccccaggatcgcaggaccgcggcggccgcagggaggtgggttgggaacaggaaggaagtccccctcgatgccccgcgggatggctgacccttccgggcggcagacggaccttggtctccgagcctccccttcgcgatgcggaggacgcgggacagagggtatgagccgcccaggaccccctcgcacctgctagcgccccgcagccgccccccagcgtgacttgtgcactgggcgggctcgggtggcgcggccggaggcgcctggacctcccgtcccccagagggcgctgccccggccggccccgcccgcatttgggccttacgagcccacaggccccggagtagcagcggggaggccgggagcccgcgggccggagccgcccggccgaggcgtgggggctgcggggccggcccatccgtgggggcgacttgagcgttgagggcgcgcggggaggcgaggtgcggggccgggggcggctgggtcgtggggctccgcctgcgagctggctgtgtctgcggaggaggcggctggcggggtgggagcgggcggagtggggcgcgaggaggtggcggtggtggagagaagccgtcccacggagctcaggaccacggtgaccgggttggacgggtgccgatgttattgacacccgggggcccagagagggttgcggtattgaaaaggggctgtgagtgaggaagtgatgggcgcagagagaggctgaggctgagggtgggaggatggagccgccagaaatggagagatggagggacttgaaggaggggctgttggcagtgtctggggggcattggcaggagggtggttgaatcttgcccctagcaggactggaggtaacttggaaggatgggccaagcgagtgtggcaggctcttggcaggactgggaatgcagctgtgaagctcctcagcagtctctgcgggctgtggctgcggggagtggcggtggatgggaggggagcaggcctgacttatggtggggaccccttgcctcactctgctttctgcccctagccaccatgttcagccagcagcagcagcagcagctccagcaacagcagcagcagctccagcagttacagcagcagcagctccagcagcagcaattgcagcagcagcagttactgcagctccagcagctgctccagcagtccccaccacaggccccgttgcccatggctgtcagccggtgagttcccctctcgggcgcgatggcttcagccttgctactcagacccatgtctcggagctcccgatccccatcctttttcccagtgccatccccgtttgagtcctggagatcaccaattccagccccaaggggtcctctgtctaccacagagtggggcagagaatggaggtgagaagccttggggaagaaggaaggtctgactttccaaataaccctctgacaccccctcccaacacacagggggctccccccgcagcagccacagcagccgcttctgaatctccagggcaccaactcagcctccctcctcaacggctccatgctgcagagagctttgcttttacagcagttgcaaggtatggatggccccaggcctcttctcagtctcttttagtggtagctccctagcagcgcattgctctaaatctcaactccacacagccaccctgagagggagctattcttggcatcctagttcactcatgaggacactaaggctccaggaggtgaaagtccctaagctgctaatttgaatgcagatctgtctgattgcagaggtgtgtccttggccatggtgctggctctttgggcaatactcagcacacttcactcacattcagattagatgccatctgacaggtgaagaagctaagaagggaaatcatttgccctgcatcagcagtggctaagctgggccgatgcctgggcctcttgaccatccagatgtctgagtggttgtctctagccctgtgcattaagtctgtggccttgtctcaatttcccaatatggagagcagtctcagctcttccttccaagatgctgctcctttttttttttttttttttttttttttttttttgagacagagttttgctctgtcgcccaggctggagtggagtgcaatggtgcaatcttggctcactgcaacctccggttcccgggtccaagcaattctcctgccttagcttcccga

SEQ ID NO: 2606 - DNA, 6000 bp, Homo sapiens
accatgcccagctaatttttagttatttgtagagacggtgatctccctatattgtccagcctggtcttgaatttctgggctcaaggaatcctcccaccttggcctctcaaactattgggattataggtgtgagtcacaacacctggcccatttacctccttcttaaactgaaaaacggggggtaaagacgtcagtttttctctaatttaaacatatttagtgcaacaccaatcaaaattctaatgaggtccaggtttagtggctcatgcctgtaatcccagcaatttaggaggccaaggtgggtggatcatctgaagtcaggagttcgagaccagcctggacaacatggtaaaaccccatctctactaaaaatacaaaaaattagctgggtgtggtggtgcatgcctgtaatcccagctacttgggaggctgagacacaagaatcactcaaacccaggaggcagcgggtgcagtgaaccaagattgcaccactgcactccagcttgggcgacagagcgagactctgcctcaaaaacaaacaaacaaaaattctgatgggatttcagaggctggggaaggtttgacaaaattctatgaagtatctgaaaaaaatatataattgggaattagcaaaaattttttaaagaataacaatgtcaggggcttgcactatgagggggtaaacatattctaaagctataataatcaaagtatgtgacatcatcatgagaagggatagatagagtccatgagaagggatagatagataaagtcctggagcagaataggtctggaaggcctggcatggaggctcacgcttgtaatcccagcactttgggaggccaaggtgggtagatcacttgagatcaggagtttgagaccagcctagtcaacatggtggaaccccatctctactgaaaatacaaaaattagccgggtgtggtggcgcatgcttgtagtctcagctactcaggatgctgaggcacgagaatcacttaaatccaggaggcagagactgcagtgagctgagatcacaccactgcactccagcgtggatgacagaacaaaattctgtctcaaaaaaacaaaacaaaacaaaaacacctgggatggtaatgtgcatgcattttataagccagtgagctcacttcacatcatattgtgggtgtttatcctttgaaaacataatttctgatggctgggcactgttccttaaaaggtgacaccatgacttatttagctattcccctaaagttgattattttccagacagctattataaataatgttttggctgaatgtggtggctcacacctgtaatctcagcacttcaggagaccatggtaggagaatcacttgaacctatgagttcaagaccagcccgggcaacatagtgagacccctgtctttaaaaaaaaaaatacaaaaatttgctgggcgtggtggcatggacttgtagtcctagctgctcaggaggctgaggtaggaggctccattgagccagggagggaaaggctgcagtgagctatgatcgtgccactgcgctccagactgggagacagagcaagaccctgtctctttttttttgttttgttttgagacagttttgctcttgttgcccaggctggagtgcaacgatgggatcttggctcactgcaacctctgcctaccaggttcaagcgattctcctgcctcagtctcctgagtagctgggattacaggtgcccaccaccaggcccagctaattttttgtatttttagtagagacggggtttcactatgttggccaggctggtctcgaactcctgacctcaggcgatccacccacctcagcctcccaaagtgctgggattgtaggcgtgagccaccatgcccagctgaggctgtccttaaaaagaaaaaagaaaaaatatataaatatttccatgaacaacctgctatcttgtaaaagtctcatttctgattattttcttaggctagactcctacaaatggtgttattgggtcaaagggcaaaacatgtgcaagattcttttttttttttttttttttgagatggagttttgctcttgtcacccaggctggagtgcaatggtacgatcttggctcactgcaacctccggctcccaggttcaagcaattctcctgcctcatcctcccgagtagctgggatgacaggcgtctgccaccatgcccggctaatttttgtatttttagtagagatgaggtttcaccatgttggccaggctggtcttgaactcttgacctcaggtgatccgcctgcttcagcctcccaaagtgctgggattacagacatgagccactgcatcggcccaagattcttgatataaaatttgcaaattgcttcccagaaagatgaaccaacacaggaagttagtgctggctttccaccttcaccagcacaagcattatttttagttttttcactttggcaatttgctaagctccttctgtgccaggtgccagtgctaagcattatgtaatgtcatccttaccaccccgggagggggcacacatttcaccaaggaggaaaccagctaagaggcctctcccccagccagtgtcacctagccacaaggcaggggagtcacgattcaatcctggacctctccaacgctagcacccagatcaaggtgttaacatgcttgcttggcagcctgggcagtctttgatttttattttttaaaatggagtctcactctgtcgcccaggctggaatgcagtgatgtgatctcggctgcaacctctgcctcccgggttcaagcgattcttctgcctcagcctcccgagtagctgagattacaggcgcccgccaccacatccggctaattttttttgtatttttagtagacacgtagttttaccatgttggccaggctggtgtcgaactcctgaccttaagtgatccacttgcctggaccccccacaaagtgctgggattacaggggtgagccgctgtgcccagtagagcctgggcagtcttgactcgcccctctctcctcactgcttctgtcttggttttcacgggagcgggttttctaattggcagatttgatgctgtcactcatgaggttcacacccttctccagtgctccctacccttagaggataaagcctacttctcagcccagcattcgaagtccccaccctccaggctgcctgttcacccataggcgccgacgtccccggggccctggacgccaccctgcgctccggcctcgctgagtcactttcgcgcctctaagtcctagctcttccacgactagtccaggttgagttaggctcctcagccgccgcccatctgccgcagagccagtccagagctttggagcggcgctcgtcacatgactgcagtgatttatggacgcgcgaattctgctgcccgagcgccctccgtcaacgcgctccgcctgcccgggtctgcgcgccgccagtgcccccgcgcgccctgcccgcccaacgtcggcgcggaaggcagggcgaggagtcgcccaggctgtgacacgcacaaggcagggagccacagaaaagggagccggaattgctacttagtccaggagaggtggctcacccctgtaatcccagcactttgggaggccaaggcaggcgaatcacttgaggtcaggagttcgagactagcctgaccaacatggtgaagccccgtctctattaaaaatacaaaaattagccgggcgtggtggcccgcgcctgtagtcccaggtattctggaagctgaggcgggaggaccacttgaacccaggaggcggaggttgcggtgagcccagatcgtgccactgcacttcagcctgggcgacagagtgagactccgtctcaaaaatataaataaataaaaaataaataaaagaattactacttagtagccaaggattgttacggcgcggggatggggggatacagcggttgttaagggggttcttgggggcaggaccattttaggtgcaggataagggagcagggctctgttttcctctccttttctttttaaaatttttacttttttttttttgacagctcttgctctgtcgctcaggctggagtgcagtggcgcgatctcagctcactgcagcctgtgcctcccgggctcaagtgatcctcttgccttagcctcccgagtagctgggactacagacgcccgccaccaccctggctaatgtttgtattttttgtagagagggatttcgccattttgcccaggctggtcttgatcctccagcctcggcctcccagagtactgagattacaggcggaagcgcccggcccctagggctattttttgataattggcctcgaccctcctcacctactccttccttagccaaatctactgagaaaagacttggagggggactctccctccacccctccgtgggcaaactcctgacggactgtaagaccttggccgccctctcgcctggcctgggtccctcgaatgaatgtacatccgccaactgcgcgccccctctcaccgcagccccgcgcggggccccaggatcgcaggaccgcggcggccgcagggaggtgggttgggaacaggaaggaagtccccctcgatgccccgcgggatggctgacccttccgggcggcagacggaccttggtctccgagcctccccttcgcgatgcggaggacgcgggacagagggtatgagccgcccaggaccccctcgcacctgctagcgccccgcagccgccccccagcgtgacttgtgcactgggcgggctcgggtggcgcggccggaggcgcctggacctcccgtcccccagagggcgctgccccggccggccccgcccgcatttgggccttacgagcccacaggccccggagtagcagcggggaggccgggagcccgcgggccggagccgcccggccgaggcgtgggggctgcggggccggcccatccgtgggggcgacttgagcgttgagggcgcgcggggaggcgaggtgcggggccgggggcggctgggtcgtggggctccgcctgcgagctggctgtgtctgcggaggaggcggctggcggggtgggagcgggcggagtggggcgcgaggaggtggcggtggtggagagaagccgtcccacggagctcaggaccacggtgaccgggttggacgggtgccgatgttattgacacccgggggcccagagagggttgcggtattgaaaaggggctgtgagtgaggaagtgatgggcgcagagagaggctgaggctgagggtgggaggatggagccgccagaaatggagagatggagggacttgaaggaggggctgttggcagtgtctggggggcattggcaggagggtggttgaatcttgcccctagcaggactggaggtaacttggaaggatgggccaagcgagtgtggcaggctcttggcaggactgggaatgcagctgtgaagctcctcagcagtctctgcgggctgtggctgcggggagtggcggtggatgggaggggagcaggcctgacttatggtggggaccccttgcctcactctgctttctgcccctagccaccatgttcagccagcagcagcagcagcagctccagcaacagcagcagcagctccagcagttacagcagcagcagctccagcagcagcaattgcagcagcagcagttactgcagctccagcagctgctccagcagtccccaccacaggccccgttgcccatggctgtcagccggtgagttcccctctcgggcgcgatggcttcagccttgctactcagacccatgtctcggagctcccgatccccatcctttttcccagtgccatccccgtttgagtcctggagatcaccaattccagccccaaggggtcctctgtctaccacagagtggggcagagaatggaggtgagaagccttggggaagaaggaaggtctgactttccaaataaccctctgacaccccctcccaacacacagggggctccccccgcagcagccacagcagccg

SEQ ID NO: 2607 - DNA, 6000 bp, Homo sapiens
gaggatgtcctctggctgtggatgggtgcatttccatgtttccagccccaggggtgtgctccacatgtggcccacaggcagtgtgtgcttagcacgtggcagctgcgtgctctgagcatgcagaggctggagcagagtgtggcagctctccaggtgggtgggggggtgtcaaagggcccctaacaggcccctcaagccccgcctccccaaccctcctagtctcacctctggcctctgctcctcactcagccacactgcccttcatccttcatccgggttctcaaacccgttgggctcttttccccctaactctttgctcaggacagtccctgcacctgcggaagtccacaccttggcttgaccacgtcctagtcttgctcaggtccaatcttaaatgctacctcctcaggaggccttctgatggcccagaaagcccccctcccctcaatgtcaggctccttgcaacgcaggagcagcctccttcaaaatacacgacaaacgtgctctttgtggatttcatgtctgtctgccccgatcagccgcaagcctccccaagcaggatgggtctggctgactcacaactgtatcctcagggcctggcacacagcaagtgccaaggaaatattagttccctctgccccatccaggtcatcgatactctgcctaggatgtctcatttatcccctaatagactttggcctccatctccaaatctgagaaatgggaccactatgatgcatcctggtgtgttcagaggaagagacagagcttaatagtggggagggggctgtctcccctgggaaaggctaggtttgacaaagagaagggctctcagagtccagagaccagcatcacgtccatgctgggatagaatgcagagcagagagctgagtgctatggctcacacttgtaatcccagcactttaggaggctgaggtgggtggatcactggaggtcaggagttgagaccagcctggacaacatgatgaaactccatctctattaaaaatacaaaaattagccgggcgtggtggtacatgcctgtaatcccagctacttgggaggctagggcaggagaatcacttgaacttgggaggtggaggttgcagtgagctgagatcgcgccattgcattccaagtctgggtgacagagtgagactccatctcaaaaaaagaaaaaaaaaagaaaaaaaagaatggggaggaagggacaagggcattgggggagacagaaagcctgggggtggggggtaggcagagttacggggaaacctaaaacccttcctcccaggctgctccttcggctctgggcagagggtcgctcctcaggacccctaccctaccctggatggagaagatccccaacccgtgcccccatcctggtgcacctcccagcccacgccatcccagagggcttgcctgtctacgcccaggcagggatagaagcagcgcgtcctccatgccaggccctgccccgagtgcttcctggggattgtttcaacactcaccataatctcacaagggatgtgctattattatccccattttacagatgaggaaatagcagctgggcagggtttggggaacatgcccagggtttctctgcttgtaagtggcagagttgagcttcatactcggcaggtctgactccacaccatgctctcggcccctctgccacattcccaccagacttggcctgccctaggacaacccactcttggccctagaggagcactggggtggggggtgtagcggggcgggggtgacaaagaggagctggagggacagcgaggaggcccctttggcctagggcaccaggcatctgttcatgaaaggctggtgtgtgctgggtccacaaacactcccccatctacacttacccccaggatgagctcatctactctcgggtttaaatcccatctctacaccaacgacttccaaatttttacttccagcccgtcttccccctgagctctcaacttgcatcaccaaactgccagctgacatcttccacttagaagtctaacaggcatctcaggctcaatatgttcagaaccaaaccctggtcttcccccatccccccagtctgctcctccttactcttcccgactctgttaatggcaccaacacccacccaggagctcaggtcaaagtcccagaagtcatcattgattcctctttcctcaccctccacattcatcctccagcaggacttcctctaaaatatatcctgaaacccacccaccattctccttctggttgcagctgaagcccttgtccaggccccccactaccccctgcccactgcagcagcctccccaccagtctcctgccttttccctcacccgctccccaagtcacacccttgctagaattagctcatcactccactactaaaaagcttcccacaagagagaaaataaacccaaactcctcactcctcatggcctaagggctttgtagatctagcccctgcctatctctcaggtcctgtctcccccttgctagctgaataccagctacagggtctcctttctgttcttcaaaggcaccaaattctttgctaccccggggcctttgcacctttcccttggcctggaactctcccgcccctggcaagttacacagcttctcatcccttggttctcatctcagatgccacctcctcctggagacctctgacctccctggggagagcagccccactcccctccctgacgttcaccacattttccagttgtcttctgagtttctccctctgcagtgcagagtcttggtcttttccaccatagaatccccagtgctgagacatcgtgcaccctccacaaatgtttgctaaatgactgaatgaattggcctcagttttcccttctgtaaaagggaagggggtgaagaaatagtatagacccagacaagttctagcagcatcccaggcagctgcaaggctacctccattgcagagttgacagcaggatcctcctgagcacccagaagcccgggtgggcctggggcagccctgatgcattttcctgtgaagcattttctgttggggattggctcctgggaagccccaggagacagaatggctgttactatgctcaccagtctggggactgagccctgttggagaggtcaggagcccttgagggagctggcaggctgagacagtggaacccactgagcctcagtttccctggccttctcactagctttcagaggatcatgaatgcttttctgcctactccttcacatcaacctaagccccctcccctgccctgggcctgcatctggacaccctgcacatcctcctgtggggacaacggccaagggcattggggtggagagggcagccagagggcccaggcctcctggggcacggtccaaaccttgctccaccactcaacaagcaagtactcgatgaaatctgctgtggtcagggatggcccctgcgtcatgggctccaggaaggcaggggctgggcatgcaggtccccaagcctaattggctatcagcgccccctcccgcatgtttacaaaagcacctttccacccatgaactcggtggagcccacagtcaccttctcaggaaggcagggcagcggctgtcagcgtttccattccgcagatggggaaatggaggcccacccacccacacgtccctgtgcctggtgcaggacccggctgtcagaggatgtgcagcgtcgagattaggaattgggctttggagtctaacagctgctgccctttctgaatgtgtgaccttgggcaaggcatctaacctccagggtctcagtttcctcatctgtaggatgggcatcatggtacctgcctcttgggagctcctgtgagcctatgaaggactcagcatagggggatgcatgggatgggctcagtagatgcgggctgaaatcaccagttggtcccctccctaccccaagcctgaagcacgcagcctggcatggggcaggagttcagccaacattcaaaggacgagaggtaggaatatggtttctccattctaaactgctggatatccctgactgctggcccttggggaaggggcccgtggtgtgtctcttgcctgtgtctctgcagctccgggggtcatgtgatcagaaggggggctctgcaggagccattggagagacagatgccttcccctctgctgaccagatgggcacggccgcccccacggtggccttccaacgtcccacacacacatggctccagtcaggccctctccctctcacctctagggctggcatgggtttcccaggacatttgaggggcaggaacaaccacccagtcccactgtccatgttagagatggggacactgaggctcagagagggcaagtgacttgcctgaggttttgcagcagaacctggcttggacagaactgctgtacctctgcggacaagggcccctgcctccctctcccatgtgccagtcacttttttggccctgaaggtcattggaagaaagcaagagtttctgaagaagatgggggggagatgaaagacggggtcagtgtaaactctctcacttcatcccccagtctgcccagccccccaacccacctccagtacctggagagctcctatctttcttctctctcctcagcaccagaaaaactatttctgcctccctttgggggtttgtggggagcctgcgggtcacgaccctgcctgccccgctaaacccacgaccctttgtctttgcggttgttcctctctccgccacctaggcctctcagcgccttgtgggatcagaggcgggagggggattaggttctgcaaatggctcccccctcccgccatccctgtcttagtcatctctgccctctgccgcctctccctccaacacgattcctctggccaggccaaggggagggcgacactgacaggcgccccccacccaggggccgtggcgaagcaaggggccggctgctcagaaaaggataagaagtggtttctcctcccctcttcccttcctcatcctgcagcccgcgcctcccccctcgccgcgctgcgcacggatggcggcgggagccgcagaggtgtgtgtgtgctggcgggaggccgtgcccggtcctcgatgcccgcgggactacgtcctcttctagggactgggatgcgggggctgacctctgccacggcccaggaattcccatgggggtagggggatgtcccccattgagcccggtgtgggggacgctgcccccgggtgctgcccgctccaagggactcccggagcccaacggagacgctgagtaatgcgggctctctccatgcccatgttgggggcggggggcagctctttgcccggggcttctggcagagcgttgtctgccctaaaggatgggacggaggagggggcgtgattcggtagccggaggcttgacgacgtttgcagactagcggggggcgctgctgccccgaggggctctcgtggtggggggagggcctcctcgctccggctgggggtggggggcgcgccggccgcgggtgcagcgtcgggggctgcgaggtcgccgcgccgtcagtgccccgggcggggactccagggatcccgggggtcgggggtcggcgcctgggggcgcgccgcgcctacctgcctacgaaattctcgagcaccgagctcttgccggcgctctggccgcccaccacagcgatctgcggcaggtcgaggtccgcgttctggccgatggcagagaaggcgtcttgcagccggttgaccagcgggatgagatcttccatgccgcggttgcccatggctgcggcgggccccgcaggctgcgatccggctgccgctagcgctcccggctccgactccggctccgccgctgcagccgcgcgcccagactgcctgcgccgcggggcccccgcccctcggggatcggagcgagcaccgctcccggacgccgctagggggagcccgcggcgctgcgggccggccgccgtgcgcaggcgccgtccggggcatcatgggtgtcgtagtt

SEQ ID NO: 2608 - DNA, 6000 bp, Homo sapiens
attaatgaatgaatgttttttaccttcatccttctttttcctagaccagtggttctgaacctttagtggacgtcagaattacctagaaggccccacccccaaagtatccaattccgagatctagtgaaaggcctgagaatttacatttctaacaaatacccaggctcctgctcgtggtgccaggaccacattttgagaaccactgccctagactatcaaactatacccttcttccctagaatacttctattttggtcctataaacctgaaacctaaagatatctcacagtttgcttgtatctcttttaggagaagctctgcgtagtgtctttttgaaatatacatggtatctgtttggcctgtattatcttagtaaataatgttgttcatgttaatagaaagtcaaaacgtaagcattatttattgaagagatacgccttaccaaaattaagctctggccttacacttaagttactagaagattcttcacctttgggataggctataagctttagcaaaccatccatcaaggcccctgatggcagaaattctgaatggagaatctggcaagttggagctctcctgccccagtttgtccttgagagggactccaactactaagacctattcaatcacacatgactacacatgttggcaggttttaccatcagctgttttactctcacatagtaagtagttatttcctacccttttttccttccttctaggcactgataggaagagagaatgggagcaagtatcttaccctttttagatgcatttgtgctgaaggcgtcttggttcacttgatagaatattaccctaagaagtcacctgagagttcctgagccagagcggaacattaacttaacagtgtaacatttctgctctatctaactgtacctgataataaaatagtctatccatgcctggacctgtgtctgaattgtccttgaatttttatggataaaaaattgaatataggaaacaagttatagtgaagagacatctgccttcatttacacatgcagtacatttttacatcatagacaaatgtgtacaaaattatcttaggcaaattgatatgcggtcacctattttatgttacatacagtcctgaggagtcgtagagggtagtgtctaggccacatatcacagcacttgtttttgaaaaattcgaatattcacctgtaatttcagataaatccattctaaagacatcttaggtatctgccactagtattttcaaaaggtttgtgtgtactcttggctctctcacagctcataatgcatcttggctagggcagagatatgtgaaaaaaatggcgtacgggtcctgctaatgacagctgtccatggctgttaggctagagttcatgtgtaatcctaggcatataagccatccgtctgtaaacacctaaagaatgatattagttaagatgaacagtgaaaacagattgatctatgtgccttctgtttcatctcaaaatacttaaacacagagcccttatcttcttcctcaaacctacattttattcagaaagattgcttatagaagtgaagttataatgatgaacataagtgagaacacaacttttgggtcaaatatgaaagggaaaaaagtctagatctggaggcaggtttctttttaaatttggctttcgaagataaggacgtggattgacactggtgttctgctctgccaggtgtttccatctgcattcctcccttcccctcaggaggttcacagatcacatctcactttactgaccagagtgattatgccttgtagtacccccataggacaggattgaaatacaaatgaataagtcaataaacacttaaaaatataaataagagtagaatagtaggtagcctttgacataccaacataaaattgctaccaatttagtaccattatcatttttagtgcagtaataaagaaattaaaagtcttaacattgagcattggacaaaaacactctgcttggcagggggtgggggctcacgcctgtaaccccagcactatgggaggccaaggtggatggatcacttgagtccaggagttctagaccagcctgggcgacttagggagaccctgtctctacaaaaaaatacaaaaattagttgggcatggtggtgcgtgcctgtattcccagctacttgggaggttgaggtgggatgattgcttgagcctgggaggcgaaggtcgcagtgaaccatgagtcatgattaggccactgaactccagcctgagcgacagagcagggctctatctcaaaaaacaaaacaaaaaaaccaaccaccaacaacaaaaccactctgctttcctagagtagggcctttatgtaggatgggttgtggctgggcagtctacaggatctcatctagcgtagatcctaattttacccttgccttagatatttcttttcaggtaaaatgtccaaccgggattagtcgcaagaggaagtctatatgactcactggactaactgcttattttaagattctgattttaagattagaggctcttgcactttatttatttatgtatttattttgaaacggagttttgctcttgttgcccaggctggagtgcagtggcactatctcgactcattgcaacctccacctcctgggttcaagtgattctcctgccttagcctcccgagtagctgggattacaggcatgtgccaccacgcctggctagttttgtattttcagtagagatggggtttctccatgttggttaggttggtctcaaactcccgacgccaggtgatccgcccaccttggcctcccaaagtgctgggattacaggcgtgagccaccacacctggcctgggctcctgcactttaattcaagccctgtgacttgcagtgagtgtggccaggcaagcactccctgtcagaatggtatgatccctcttttctggagggccagcctgcctgcagcactgttcacaggcttgcaggtgccactgaagagaccagtggagtttaatgtctggaatgtgttccacgtggaaatataattactctgtcatctggaacaagcgattttaattgttagagagttcctcagtccactagtttgactttggccatggtcgtacatttaagaacttggttcaagttttttccatgtttagggtaattaggtgtccatagtatatgaggctcagctttcatactctattcaactctggaatggctgccaaagaagctgattaaatcttaccagttctgagcagggtgtttttgcctcttgtgtgccaggtgccaggataggccctaggtgtcccagatggttcctgtcctcatggagtttaccatctagtgatcagattgtacctaaatatagtttgaaggacccatattttaaaagcaaacaaaaatgtatttatatatactcatttagcatggatatttaatacaagttaatttggacagaaagtagggtaaaagggggaagaaaatagaaaaatgatagctgttcacaaacattttatgtctcttttgtagtaaacttaagtcatgctgcctgaaggcagaattaggctttgcacatttatttaagaaatactggccaggtgcagtggctcacgtctgtaatactagcaccttgggaggccttggtgggaggattgcgtgaggctaggagtttgggaacagcctgggcaacatagtgagaccccatctttaaaactaaaagaaaccgattagtcgggcctggtggagtgcatctgtattcctagctactcgggaggctgaggtgggaggatcacttgagcctaggagtttgaggttgcagtgagctatgatggctccactgtactctagcctaagagtgagaccctgtctctaaaaaagaaagagagaaagaaagaaaaagaaaagattttaacttctagtcattcaatcaagaagtgccagacagcatggtagctgcttgaaatacagtactgagtaagctgcggtctctccctggatataactcctagtgaaggaggcatgttcagtaatcaatcaagcttatttaattgggttgtggtaagtgacacaagaaatataggctgcaagagtataacaggggacctgacctagtctggaaggtggaagtgggaggcaagtagaggcctaggaggtcttctctgaggaagtgagcatttaagctgagattttaaggatgaagagtgagtttaggaggagccaaaggtagactctcttaggctcaggaatggggagcatgtggcttagccaaggaactgaaaggccagtgagtcaaggtggtggggagggttggggaggggtgaggactgtggggactgtggcaggcggtgaggccctgcaggcccactcagtgctttgtgcctctcactgtcctggacctgcctcacatggctcctccagtaacttcggtgtgccccgtgctgtgccgagggcaatggaatgcatcatctcatgtaatccccacaagccttgtgagcttgatgccatcattattctaactttacagacgaggtaacttacggttagacattggagacttaagataaatagctaaatgttacacagctaataagttgcagagcttggattttaacccggaactctctaattctagggcctatcctgcccattcatttatacctctaacagacattaacaaaagacagagattacaagttcagcacaatataaagaattttccagcaaccagctgttcagaaatgtagacggggagaggcacgtgcttccaatgattatgagtgttcattccagtggaaacgtggtggccacctgtcagggatagaggaggaagaagcttgtgccagatgaacccctaacccgcttttgattacatctgggattttgcttcattgtacatatgttttcttccttcagtgaccatgaaagacaccaggttgacagcactggaaactgaagtaccagttgtcgctagaacaggtaagctataaccaggccagtggttagaggaagatgggagggaattatcttgcccatggtcgtgcattcagggatttaacatttacagttttagctacttgccaggaactggaccatctatggcatgaagggattagtcacattactgatgattattagttgcttgtattcagtgcctgacactgtgcaaagcgcattatatgcgttactttcttcttcacagccacgcttttggtgtttccccattttacaggtgaggattcgggttcaaacatgtcaattttcctaaagatgcatagctggtacttagtggactcaattcagctctgtttagcagcaaagtttggttgtgaccacttcattcaattaaagcctgtgtgctggcacaagtcatttaactagtgcagacgttcttaaccctggctgcacctgagaaatctgcatgggtttataaaaacaaaccaaatgtgatgtccggattccatcccttagttaacctgctccagagtttctgtaagctctccaggtgattctgatgtacatcctgggctgagaacccttgagctggtgagtgagcatttgcatcttaacatggctatatctgttgctttaaattaattttgggggataaattatatgctatagtagtttttaggaattggatgatcctgtctcagaatatatccttcataaatgttgaggcgccggcatttccacggatggaatttcctcttagtgacttaactgatcactgaactgtaattttggtttagcagtaatagtgccaagcgcaacagagctgtgtataggaagggtgtagggaagacgggaggtgcttggtctgctgtctttgtacatggacagctctgtgactcatgccgaggctcagtggttgctgtttagtgtattctgtcactgtctgcctcacctctgtcgtaggaattgtaaaataaggtagggatttttgtcttacagctctacattggttcataagtagggtcttgatacaaattgtagactgtcgaaag

SEQ ID NO: 2609 - DNA, 6000 bp, Homo sapiens
tcgagggcacctgtttgaggtgttttctaagtgatctgcctctcctggagtacagcagtttgaatggtccccctgcagttgtgtaaagttgcaatcctccaccaacaccatgtatctcagtcttggggtctctcggttctaattctcaagaaggagaatcaggctggttcagtgtgaggaaggttttcagccctgatccaggtccaatcagggggttgggggtgtgtgtgtgtgtgtatgtgtgtgtgtgtgtgtatctgtgggtttggcttgatgtgtgtgtgtgtgtgtgtgtgtgtgtgtgtgtgtgtatctgtgggtttggcttgattcacagtgagtagcctgggctgaagatagattctctaagaaggggctgtagcagttgggatcctggtgggaaacagtaacaccctccaagggataattaaaaagacaggtgtgagcagcttcagagaaaaaagaggtgctgaagcacctaaggactagtgagctgtggggatccgtgatcacctctgggtgtgaaaagtgagtgggggaaaccattactaacaccacgggtgagacaggccacgcagcaggagctgtgcctcacggccaggccaggccaggtgggaaggctcttcctcgctcacctgaccctgccgcactttggtcaaatccaagaggagggagaggacatgcttagcgggtgtggctcagaggggagcccagacagagaagggcaaacggagaatgaccagcacaggctgcagaggccatctggtgcggagggagaggagacggcctaagccaaggtagggcggtgtgaagcctctgggcgttccttggtactggaggacacggtgctagaaagcaaggggaaactgatgcgctagagaggccggggctgcagagggccttgggggctgccagcagaagctcagaccccatcctgcgggggttgcccaccaacggcagggcacctggccaggaggctgctgcacagagagctgaaagctaaagccaaaaggcaattcaagcggatgaacttcgggcacagagtgggaaatatttttggctggtggtgtccttccaaaggcctctgaatcccaccacatccagaaggccttttgttgatgagggtcagaaatccaatgaaactagcattggccaaaatagttattgcttcatggaacttggaaggccagggcaaagctggtttcagggactccggaaatgcaggagatagcagcatgaatttctctttccatctctgtctctttcactctttaactcgacttgtcacacaccttgctgtaggacgggggaagggagaggccacagcttcctcatcgcagtttagtgaccccaaaggaaagagaaaaattgctttttttttttaaacacccatctataaagacccagaggagcactctagtccagctcaagtcacaggtccactgtagaccaaccatttcagcttgttaaagcaaatgaaatatggcctgagaaggactccgtacttttatatttgagtccttgtggacgaaccgtaacctagcttaataggcacgcaaaattgaaaacctaacttagtagtatgcacttgtaacaatagctgagtgttggccaatcccagcggccatacttcaaccactcatagactgctgagtgttcaaactgttcaaatacggcaaacgccgagctgcaaccaatctcactgtttctgtacctcacttctgattcctgtatgtcactttagtttagtttttttttttttttttttttggagaccaagtctctctttgttacccaggctggaatgcagtggcacaatctcagctcactacaacctctgcctcccaggttcaagtgattctcctgcctcagcctcctgagtagcttggattataggtacccgccaccacgcctggctaatttttgtatttttagtagagacagggtttcaccatgttggccaggctggtctcgaactcctgacctcaagccatctacctgccttggcctcccaaattgctaggattacagaagtgagctactgcgccaggccactttactttgtctataaatttgttctgaccccgggagtctctctgaatctgttgattctagaggctgcctgattcatgaattctctttttctttcttttttttttttttttttgctcgattaaatttaatctaattgaacttgtcttaagctttcttttaacaagctccatgatgggcatctcagattggccaggcctggtccacctgctgtggcctggggctggtactgtgattgtgaggaccatcagcactgaaagaattgaggatgggcggttcacctgttcagaaggcgagggggagatgtcacacagccaaatgcagcagatgtcctccaccacgtgcatcctgtcagcacgcccgcctatggagggctcagccctttcatgctcagacaggccggtcaggaagccccgtcacagggaggctccagggtggtgtatggaaggtagtggtctgaatagtgtctgttgagcaaatgacaaaaatcaaccccagagaagcagaaaacatctaggtggcccagcctggtaagtggcaggagatggtagtagagctgtctctgcctgtcaccttcagcctcttcttgcaagcccctggtggtcccatattgaggtaacaatgcccattcttcttccagacagtgtagaaacagtgacaatgtggttatggccccctggaaagtgagcagttgatgagctctgcttatggctgctctcctccatggcagaatgcattcctgcaggatgaggtcatggagccaaggaaggtcagggtgtgggggggcttcctgggtcagagctccagagcagtgctgctccccctgccctcctccttaggtctcccatcactggtggtctcagaaatctctgaagatttcagaaatcttgaatcccttccctggtgtgaatgcaaagggaagagtctgttcctgtaaagtagtttgcagattggtggaactgagagaacccagacccttccccgtttccctcgacctttccatctctggaccccatgcagactatgcttgggtggtgacacagaagaatttagtgtttggtggacccgtttctggaagtgatggatgctgacagctggcacttaacagttatcaaaaataacattaactggagtaggctctgtgccacttagagcttaatgactcactgacttcaccccaaatccccatgaactagcattattattagccctatgttgcaggtgaggagactaaggctcatccagttagaacatgatggctgaaacctacattcaaactctggtctgtttgaatctagaactcttagcttccccccagcgactgtgttagaacagaggaatcatcagttcaattttcacctccctcctaagccttcgtggctctagacgtatggttataaaggttgttcactgctcaagggcccaggagggtttggggctggtggataggggccaaaatacagcccaggggtgccatttttctaattctcaccaaggccctatactgactagcagcggctctacccgataccatccagggccttttcagaattctgaaggcacccacggtgctggctactcacacacctggccccccttaaccatggctgccttgcactgtgacccaattggttcccatgacaaaacctgttattcccataactcacccaacacttttttgcccctaggctcttgctcctttggttccctctgcctggaatggccttctctcccgagccgcctcgcctggttctattaggttgatgcaaaagtcatcgcggttttaatggtaaaaaccgtgatgacttttgcaccgacctagtatttcacaaaacctacatttcctttaaaacccaacctgatgcctactccttcaaaatgcctttcatatcccacagttcgacttcatctcactctgcctcctctcacagggctttgtgttcgtgctggatggagcccatcatactcagcctcgcaataaaggccacctatctagtgagtgagcatttactaggcgcaggactctgggctaaacgctgtccatacttcatctccttgattcttcacgtcacagatgtcattatgcccatttcacagaggaagaaactgaggcttggaggacttaaagccttgtttcagcaggaaacggaataaggcgttctgattttcaagctgtctcctattagggctggtttcccctagatgtcatgagtaggtgtgaagtgtgagctacttgaaggcagaagccaggggggtcccccgcaatcccggaggcgggcttctgaaaatgtttagcccaggaaggagggctgccctggcccgcagctttccgccccttcccaggtgagctgcaactccaaagctcccaagcaggcccttcacccacgcgggccccagcagctccttgggaaacaggatcgctgctctgaggccgcccacagagagaccctcggagggcgccacgcaagcgaagggcagaaacgactcggggggcaggggcagggcgctccaaccacacccaggcgccgccagcttgtttacgcctctccgccgcgtccccccgcccgccagtcacgtgaccgcccgccccgccccctcgggctctcgcgtggctcctcccgccgcgccggcccttctttttgcctccttcgcggagtcacaagatctcttcgcagcctcctttcggatccttccgcccggccccgcccccctccataaaaaccctccttactttttttctcgtccaacccacatcgtcagttatgagtggaagagcctcttccttccggcggggctgccgagcgcggccgtctatccttcctttcgagaaggaggggaggtccggagggggactctttttcgtggcggaggccgccgtcggccttggccctttcacgacgggggaggtgctgtacgtccaagatggcggcgccctgtaggctggagggactgtgaggtaaacagctgagggggaggagacggtgggtgagtatgggggtgtctccccctcctttttatgggggcttcctggggcagccccggcaccatgactccagccggggaggctcggaggggctggagcaagagactcacttgcttggtagggatcccggggaaggggggttcggagagctctcccctccctcttattacacgctatctccggctggcccggccgggactggcgggtccctggggaggagaggcgagccggacggagcacttcgcccctccttggcccccgaggggacggctgcaccctgggcctcggtccctcgggcaggggcgaggtgggccccttcgtcagtccctcacttggtggggtgacaggttcacgctaggtgcggagggcagggtagagacgcttggcgggaggggaagggtcgcgagggtggggctggtcccagaacttaaagagaggggtcggggtataggggcgtggagaatgaatggaggtcgcctgtggggatcaaggactcgcctggattcggtgtctccgctgaaatttgcatgactcgctctgggtgtacttgtgggtgtttaattggtggtgaaagacagttaccttaaagtgggcaaaggggattcctaagagacagctatttgcagagcccctcctaggcgttcattcattcatttgaggaactggaggatgaagagcctgcaatcggagggaccttgtagaattaaagctctttctttgtgtttcctgttaaagagttttgctttgtgtgttttggatgtgtggtgaggacttgggaggggacgcggtcctcctaagaacaacagctaacgttaatggagtgctctctgtgtgccaggcactgtgaaagtgcttggcagtcattatctcctttggtcctcacgacaaagagaagaggcagccactgttaacacctccaatcttctcaaatgaagaaactgaggcccggagagagcagggtactt

SEQ ID NO: 2610 - DNA, 6000 bp, Homo sapiens
tcacagtggaagactaaatgtttgggctgtggagtcaaccaaaaaggttcatatcccagcttagccactgaataagtgactataggcaacttactctaagcctgcttcctcttcctatcctgcctcttaaggctgtaagaagttaatggggtatcagacatgtaaaataccacagtgtttggcacatgagtactcaaaaaatataaactttattataacaatattactacttcacaaaaatggattgctgggtacataatgcttagcagtctatccatttaacaactggtatttgaaacattgatacaaccattgtataacttaaaatggatacagttcaagtttgttactatgctctgtgaactactcaaagtagcagagtcttaatgattgcagacattaaggtcactgcctctgttcttcctacagctcccctctgtgtcttccatcacatcacccacagaagggcaaaactgtcctttgttactccaacacttctgggcctctactgccatcatatttacttaagagagtgacctgtgagttgtagggcagtaactactatgctttattttggactaaagcatggtttttaagacattttacttattagatgtaaatctgaattcattcaaccgtaaaaagtattgttatcttttgctgattccatgttcataataaaagttagcactgaacgagagaaaggacaagaagaaactgacaaggtcctgagacagtgtattttatacacagtatataaaatttgcatttttattctctcccatgaaaacagacataaagttactaatttctagcaactacagtcttaaaaagtaaaccagagaaagaataatctcaaactgctgacagtttacctctttcagatgaatttaaatggagaatgagtatttcatgctacccaaattatattagttaccaattcatgatctgagattaaaaaaaacaaactcagtgtttgagtgtatactacatatacacatttcaagcaaacagccacagattttaacgctattaagtacacttttctttcacgccttcagctacttaaatgacaaaaccaatgcaaagactaacctttcagagatttataatatgggaaacttatagggaattaccttttcaaagagtattatgatgtaaaggaaaggataaatgataaacagatcttcacccaacagggtaggctcaaagtcaccaatttgcttggtttttataaaaccattaacaggttgactcaatcgatttagtcagaatatttaaatgacaccccaaaggactttaaatcacagaaatgtaggcctagaaatactcattaatttacattccaacttttacttcacagatgaagacacaggctcacagaacttaagtgacccactgaaggtcaaaagctatctgactctctagaaaagcctgaaatggttgagatattgctatatttggctcatcggcattcaagaatatccaattaattccaggaaaagctaattttagttcactatggccctggaacccagaaataaacatacctgtagccaaacaaacttcaaatgaagacagagctataagaacaagtcagctctaattcagagcccaaaattcacccaccactacacaaataaaaggctacaagctattttaagaaatacctctgtgataaataataaatgaaaatagccagaatgatacttgaagccagtggtcctcaacctccggtgcacataagaatcagtcttcttccaaaatatatatacaaggtgtccgaatatgtaggtctacctagtatagtgccaaatatctgtacatcaaggttctcatgagcactagggtttcagatctcgtttccaccaagttcattattctgcaaacattacatatagaggtatatattagatttgccctagtaagactgttaagtttcatctcacgaatgaaaccaggcatgcacagaaggcatcatattacaccacaacagtagcagtatcagtttttactcttaacccagtgaggaagaggacaactgagtcacaggacctgaagcactctaattttatggaaacaagaaggctggtagccacctgctttctaaccaggaatttaggaacgtaccaagtgtttatgacaccaggaaatgcatgcagcagagaaagtttacatcatctgcccttctaggcacgtgatataagagtgttttggataagatattaactttagtaagaggatattttccgtttacatcttctataaataccccttaagtttacaccaggtggttagaggaagattctgcagctccctagggcaatagcaaagaatgtttcactgtttctgaggagcctcatttgcctgatgcatgactgttaaaggtgcatttccctacacaaccctaaatcagttttcacatttgcatattccagatttactcaggaatgttcaatttaagaatcacaggtggttgctcggtaaatcaaaggctccccaaagattaggttttataatgcttcctgaaatttacagctccactttgccggcctgtttgaattcagatgactccaagttgatcccaaaattataaatcaaagtatctcagaagagtattattctattttagcacttttatagcttactctatgcaacgtgaagtgttatttgtatgctttctatttaaaaaaaaaaaaaagccagcaaggattttagcaggacttctttcttcagtaaactcatcagttttattaaactatcaaatactttttagcctaatttagactaacaagttcacatgcacaacactgccatcccaaacaaaagctaaggcggataagccaagtgcatccccccacttcaacattaaacagacacacgtgcataaaccttggctaaatgataaattttaatcacttacaggccagctttgatcaaataacagataaatttaagagtcatatctttggagtcagtcagatcccagcagttccagtcctggctcagatacaattggggtgtgaacttaggcaaagtaccctgctctctccgggcctcagtttcttcatttgagaagattggaggtgttaacagtggctgcctcttctctttgtcgtgaggaccaaaggagataatgactgccaagcactttcacagtgcctggcacacagagagcactccattaacgttagctgttgttcttaggaggaccgcgtcccctcccaagtcctcaccacacatccaaaacacacaaagcaaaactctttaacaggaaacacaaagaaagagctttaattctacaaggtccctccgattgcaggctcttcatcctccagttcctcaaatgaatgaatgaacgcctaggaggggctctgcaaatagctgtctcttaggaatcccctttgcccactttaaggtaactgtctttcaccaccaattaaacacccacaagtacacccagagcgagtcatgcaaatttcagcggagacaccgaatccaggcgagtccttgatccccacaggcgacctccattcattctccacgcccctataccccgacccctctctttaagttctgggaccagccccaccctcgcgacccttcccctcccgccaagcgtctctaccctgccctccgcacctagcgtgaacctgtcaccccaccaagtgagggactgacgaaggggcccacctcgcccctgcccgagggaccgaggcccagggtgcagccgtcccctcgggggccaaggaggggcgaagtgctccgtccggctcgcctctcctccccagggacccgccagtcccggccgggccagccggagatagcgtgtaataagagggaggggagagctctccgaaccccccttccccgggatccctaccaagcaagtgagtctcttgctccagcccctccgagcctccccggctggagtcatggtgccggggctgccccaggaagcccccataaaaaggagggggagacacccccatactcacccaccgtctcctccccctcagctgtttacctcacagtccctccagcctacagggcgccgccatcttggacgtacagcacctcccccgtcgtgaaagggccaaggccgacggcggcctccgccacgaaaaagagtccccctccggacctcccctccttctcgaaaggaaggatagacggccgcgctcggcagccccgccggaaggaagaggctcttccactcataactgacgatgtgggttggacgagaaaaaaagtaaggagggtttttatggaggggggcggggccgggcggaaggatccgaaaggaggctgcgaagagatcttgtgactccgcgaaggaggcaaaaagaagggccggcgcggcgggaggagccacgcgagagcccgagggggcggggcgggcggtcacgtgactggcgggcggggggacgcggcggagaggcgtaaacaagctggcggcgcctgggtgtggttggagcgccctgcccctgccccccgagtcgtttctgcccttcgcttgcgtggcgccctccgagggtctctctgtgggcggcctcagagcagcgatcctgtttcccaaggagctgctggggcccgcgtgggtgaagggcctgcttgggagctttggagttgcagctcacctgggaaggggcggaaagctgcgggccagggcagccctccttcctgggctaaacattttcagaagcccgcctccgggattgcgggggacccccctggcttctgccttcaagtagctcacacttcacacctactcatgacatctaggggaaaccagccctaataggagacagcttgaaaatcagaacgccttattccgtttcctgctgaaacaaggctttaagtcctccaagcctcagtttcttcctctgtgaaatgggcataatgacatctgtgacgtgaagaatcaaggagatgaagtatggacagcgtttagcccagagtcctgcgcctagtaaatgctcactcactagataggtggcctttattgcgaggctgagtatgatgggctccatccagcacgaacacaaagccctgtgagaggaggcagagtgagatgaagtcgaactgtgggatatgaaaggcattttgaaggagtaggcatcaggttgggttttaaaggaaatgtaggttttgtgaaatactaggtcggtgcaaaagtcatcacggtttttaccattaaaaccgcgatgacttttgcatcaacctaatagaaccaggcgaggcggctcgggagagaaggccattccaggcagagggaaccaaaggagcaagagcctaggggcaaaaaagtgttgggtgagttatgggaataacaggttttgtcatgggaaccaattgggtcacagtgcaaggcagccatggttaaggggggccaggtgtgtgagtagccagcaccgtgggtgccttcagaattctgaaaaggccctggatggtatcgggtagagccgctgctagtcagtatagggccttggtgagaattagaaaaatggcacccctgggctgtattttggcccctatccaccagccccaaaccctcctgggcccttgagcagtgaacaacctttataaccatacgtctagagccacgaaggcttaggagggaggtgaaaattgaactgatgattcctctgttctaacacagtcgctggggggaagctaagagttctagattcaaacagaccagagtttgaatgtaggtttcagccatcatgttctaactggatgagccttagtctcctcacctgcaacatagggctaataataatgctagttcatggggatttggggtgaagtcagtgagtcattaagctctaagtggcacagagcctactccagttaatgttatttttgataactgttaagtgccagctgtcagcatccatcacttccagaaacgggtccaccaaacactaaattcttctgtgtcaccacccaagcatagtctgcatggggtccagagatggaaaggtcgagggaaac

SEQ ID NO: 2611 - DNA, 6000 bp, Homo sapiens
ggacacagcatatccaggtgataatgagaggacagttagaaggtagaagatagaagccatggctccaaacgcctctctggccttattctgtttaatgacagctgttgttcctgctcaaacccacctcttcctctacacttaagcaacctcatggttttggcgggaaagtctgccagccccggccaatgagaggcccatatccctccccctgggcacaatgattggtgctggatgtgcttgtgaccaggctgggccaatcagagtcaaccctagcaatctttctgaaacaattgaggaggaatctctctttccactggggttcctaggcccagagataagagccgcataaagtgggtagagatcatggcgtgaggatgaggccaacacagagggaagcaaagccgagatgatggagagagagtcattcattcattcatttattcactctgtgaagatatcattagtgtctcccaaacactgttctaagccctggagagtctaagccctgagctgtgtgcctggaaaaacagttcctgctcttgtagcatggacattccttgtgggaagttagagcaataaataaatgaattaaaagataggaagatggccaggcgcggtggctcacacctgtaatcccagcactttgggaggccgaggcaggcaaggatcacttgaggttaggagtttgagactagcctggccaacatggtgaaactctatctctactaaaaacacaaaaaaattagccaggcttggtggcgggcacctgtaatcccagctactcgggaggctgaggcaggagaatcgcttgaacctgggagaaggaggttgcagtgagccgagattgtgccactgccctccagcctaggcgacagagccagaatccgtctcaaaaaaaaaaaaaaaaaaaaaagggaagacaagcaagatattttcagataagtgtgaatgctaagaagaaaggggtgggtgaaggaatagaaagtgactggggtggggaggtcctactttagttgaaggtcaaggaggtctttctgcagaagtaacatttccgctaagacctggatgacaagaaggagacaggcttggggaaatcagagagttaggccatccaggcagagggcacgagaagtgccaatgacctgaatgagtgagattccagacagtatcatttgagcatctggatccaaccatgtcagaagctgaaaattttctgtgacatgaattaattgtttcattgttattattaaatgagtttaaattgtgtttctgtactgggcacggtggcatgcacctgtaatcccagctactcaggagcttgggaggattgcttgagaccaggagttcaagaccagcctgggctacagagcaagaccccatctttttgaaacttcctgcaactcgcatctggaaaagtgctgttatttgaaagggtgccgacattgtgaaaaacacggagtattgatctctgaagctgagatttttgtcctaaaggtaaagggaaattattgaaggtttttaaaccagggaagaatcttcctgatctttgttctttttctttctctaggctcagctctcaaaagtcctaaccttccctccccttccttcagtctgcgtttcttccctaatgaacttggctgctgtcagctcccttcaggggacctccagctcttagcacaatgctgttcttctttgagacacttttccctaccttccttctcccaactaacttagcctaggcatcaacttagatatcacttccttcaccaacccccccaagcctgggtccatttccaaatgccccaggcttcttttgtatactatgtttatatcacagcacttgtcaccccaaattgtaaatttcaggttgctctttcctaccctctagaccaggaaggaatatgaaaagtccggctgttttttgaaaccccagcatgtggtgccttgttgtgggcactcgatacacatgtgttacataagggagggaaggaaagagctgatacacgaaaggtacctaatggtaactgttaaatgaatgaataaactgatgaatgggcatgggaatgcggaagcgatttagctcttgggagagactaaatgaaggtgttgactccagggctgctcactaagggaagtgctggtagctttacaggcagccctggaggggacacagagcatgggaagtccagggctgtaagggcctgggtgaggctggctggggactcctggcttcaactgctatgccaggggactggctgcctggccactgctctcccatcaaggggaacctgggtggcttcatctgcaggctgggtccctggtctgggtctgggaaggctgtccctgtgtcagttactcacgggggaaggtagggaccctaaagtgggattacaatcttagaacagcagttgaactgcatgtgcctgatacagccgcttcctattagaaaacaccctaaacaagtggaggaagcgtttggtgagataaaccatgaaaccattaaagatttaatggtgaaaccattaaagatgtcaataaaggctgcaaacgaacttaggaagcacttccataaaatcatgtttcacggaaaatgacacgctggtttacagtagcaaaatgtgtgtatgtgtgtatagggaagtgagaacatgaggaaactggggacttgttgacttggagagaatattttaagttttctgcataatgacaagcagttctagctgattgttggcaatgtacaacacccacagaatactcaagatgtgtccctggctgggcacagcagctcgtgcctgtaatcccagcactttgggaggctgaggcaggaggatcgcttgaggccaggagttcaagaccagcctattgtgaatagtaccactataaatgtaagtgtgcaaatatctcttcgattctgcttccagtgattttgagtctatacccagaagtagattcactcacttttgacattgcattctctgaattttagaggagacatttgagaacttctaaatttcaaataaaaataatgatttagaccagactggacagcatagcaagaccccatctctaaaaaaaataaaaaaattaaccaggcatggtggtgcgcctgtagtcccagccactcaagaggctgaagcaggaggatctcttgagccagggaggtcgaggctgcagtgagctatgattgcaacactgcactccagtctgggctacaaagccaactcctgtctctaagaaaataataataataataataattttcttgagacagaattttgctcttgttgcccaggctgaagtgcaatggtgcgatctggactcaccgcaacctctgccttctgggttcaagcaattatcctgcctcagcctcctaagtggctgagattacaggcatgtgccaccacacccagctaattttgtattttttgtagagatggggtttctccatgttggtcaggctggtcttgaactcccgatctcaagtgatcctcgcctgcctcggcctctcaaagtgctgggattacaggcgtgaaccactgtgcccagccaataataattttttaaaaagatgtttctttccaccaagagagaccacagagctgggagcagtggtctgctgtctgtagcctggggctgggactgacaccccagcattactgaggcctggtgaccacagggttgtgtcctcctggctggtgctccagggctggcccagcagaaagacctcgcctgaaacacccctttttcttcattttgaaccttggacttgcagtttaaattggggcttcctgtcaccagacttgttttctttatgagggaaacataatatctccagcacccgggctggaagagcagacaaagcagcctaacagtgctctgtttgtggcgttctcatcttatgcaaaacctcctgaaataaatcagtcatcctgcaagcgggaggaggcgggggccagaggaggagggagaaggtggggagccaggggatgggacgccctgccaaatgggaagaaatgccccagccagctcagccaagctttaccgccctcactccccccagcatcaatgggacaccccagaggcccccactggcctccccatcactttgtctgccaccagagggcagcacacacgggctctggcacctggccttcaatctgtatggcagcttcagcaggccgagcgtctcctggcctccgaactcactgccacacctccagggtgcctctacccgctcaaaggtcatatctgggggaaatgcaaatttgatgtctcttctgagatatgacctctgcaaggacaagaggggcctctatgcatgtggccggctcgggtactaggggcattgcaccagcctggctctcacaagcctcagggtgctgaacttggggagggagggaggggaggaggcagcgaggagggaggcagggaaaaaaggagggaggaaaggagggaagagagagagaggagaggaggagaaggagggagggagggaaggaaagaaggagggaggaagaaggaaaataaggaagggaaggaaggaggcagggagggaggaagaaagaaaggaggaagagaaggaaggaaaaaggagggaaggagggaaggaagaaaaaaggcaagagaaaagaaagaagaaaaaaaccaaagagcaatgacttccctatgcaaaatcgagttttataagttagagctttttctaactttaatttttaaaatttaataatttagccatcactttctttttgtgcagatgttattcaaaatttccagcgaaattctgaatttctctgcagagagaaagcgtgccgctccaagtgtcgagggttagaaatgagaattcgaagtcttgtgtcctggaaagttttgataagcaaatacggctgagctcccgcgctctcttcattggctgcttgttcaccgccagattttgacacaaataatcagattgaaaatcagggaggggaacagaagaggaaaaacacacagagagacagagcaaaaaggagaagtatctatttgtgcaaagagtcacacagttgacagagtggaggccagtcccgagagaggctttgcagttcccacctcgggaagctccggcagaacccaggcgagggacagctccggacaggtgagtgctggaggatgcgtttctacgcttttgttttgaaatgtgcctgtgcgccgcaggtggcttcacagcaggctccctggctcctcctgcggtcctaggaaaggtgaggtgggctggaaaagctctggaaggcaaggagccaagggagaaacagggtgaggacgtagcctcgtctgagccactgtgctaggaattgcgcctttgccggctgcgcagaaacacttttcaaaatttgattttaggctgacagacgtcaccttcgggcacaaagtcatacccacaacccagctgtcctggggacctgggcagtgctcagggagacacacttccaagtgcctgagttgtgttccccctcggagacagtcccagactttagggacttgactaaagttcctgggacacttttttttttttttttttttttttttttgagacagagtgagactctggagcgcagtggtgcgattgcactgaaacctctgcctcccgaattcaagcgattctcctgcctcagcctcccaagtagctgggattacaggcgcgtgttaccacgcctggctaatttttgtatttttagtagagacgggtttcaccatgttggccaggctggtctcgaactcttgacctcaaacgatccacctgcctcagcctcccaaagtgttgggattacaggcattagccactgcgcccagccaaattcccaggacactttgagagtcaggcgctctcccctccagagcctactaaggggagatgacagggctgccctctcccacacactgcccaggctccaggaacaataggaccgaccatggagaggtactgtttcagctcgcctttccctgtggctgttgttagccctttcc

SEQ ID NO: 2612 - DNA, 6000 bp, Homo sapiens
ctttctgctggggcccctgggcctgacctgggctcattttcccccgactcctccacggacaagtcttgttttccccttgaatcttttttttttttgacagagtctcgctgtgtcacccaggctggagtgcagtggcgccatctgggctcaccgcaacctccgccttctgggttcaagtgattctccagcctcagcctcccgagtagctgggattacaggtgcctgccaccacacccagctaagttttgtatttttagtagagacggggtttccccatgttggccaggctggtcttgaactcctgacttcaggtgatccgcctgccttggcctcccaaagtgctgggattacaggcgtgagccaccacgcccggcctcccttgagtctttaaacataaaggaagtcaaaaaggttctctgtagctgaccctgagaaccagctgagtcttacccaaccctcccaaaaggggaacccgagtgacaagtcttttagtcaaggtggttcaatctctcactgaaggtcaacgaattctacatgggattttagagcaaaagggaagtttagaaatctcttagcccaaccgtcccttttaagagataggaaaaccaagccccaggttggtggctgatgcggtcacaagctccaggaccccaaatcagactcaactccttgggcaacaaaggggcctcattacagggacatcacaggcctgttgacccaagtccaactggaagttagggtgctggctcctgccagggtgcagggtcgcctgtcttcaagaagcactgactgagattctgactcagggtcagggggactctatcaggatcgggggttatggagtgataacagtgagcctctttccggaggtccgataccatcaagtcctctgttttatgaagaattcctgagcttctttcataatctctgctcttagctccttctcagaacggagttcatgtcaatcaaaaccaagtggttgttaattaactacagtataggtgattggttcctgttttttctttaaaaaaaaaacaactctgctaacaggggccaaaaggaagttcaccgggtgcatttggcccctctgtgagccagagggcttggccgtggcgttggctgtgtcactgtcacttgccaagctcaggggagagaacactggggggaggcaagaaagcgggtgtggggctcaggggagatcactagaagaagcatgagaatcaccttcctgaggctggagaaccccagaagccagccccatcttgccctgtgcctaagtgaaaagtgcttggccagggctcatgagcgctagaaagtgtccttgttgtggggcccagggttagagtcagttgacctgggttctccttaggccctgagcccaggagaataccaatgcttcctgaagggaagtctgtccctggcctggccccaccaagactcttcaggagccatgtgggtcttttaggagcctggaaaagacttgagggtcagagggtttgatttttctccctcctttttttttttttttttttttgagacagagtgtggctctgtcacccaggctgaagtgcagtggtggtgtgatctcggctcactgcaacctccgcctcccgggttcaagcgattctcctgcctcagcctcctgagtagctggaactgtaggcaagtgccaccatgcccggctaatttttgtattttttgtagagacgaggtttcactgtgttggctaggctggtctcgaactcctgatcttgtgatccgtccgcctcggcctcccaaaatgttgggattacaggtgtgagccactgcacccggcctgatttttctcccctcttgccccagcaccctgcatttccctctgtgctgcaggcggtgttcaccgggtgctgtgaggacctctgacagtgctgggtggcacagtggcttgagagtaaaatcctaacaggccaggagccctgggtctgagtcactttcctctctgcacctcagttttcccacctgcaacctgggaagacactgcttgacacgggcacacgagggagcttcaaactgctgttttcatccctagcacgtcggctccactccctctgcagagagaagcccatgccgggcactgcccagcacttggcacccattctgcaccgagtaactgcccacctgctgggctgaaagtcaagagcatggaggcctggggccagacagaccccagtccttccctgctcactctgccccagggtcctgagccctccaggcttcagctccttctttataaaatgggacagcagcgggactcagcatctggattaagcatcagaattaaaggtgtaataaacaaggcaggctaagcagccccctgccagaaggtttgaccagctcctcttctatcacagaagccttggcgagtacctttggttctagttgatttcctcataaatattatgcgcaaaaaaggatcatcttttgatattttgataggcaaaccatgaccctcacaggccccctcaaaacaaagtgcaaggggaaccccacacccccagtcctcctcctgctcactgggtcccctcctctccccctagggtctggcctccccatgggctttcttgaagcgaagaagagttaaaagcgggaaggaaggggggtgtggggagccctggtgagggagggggaggaggcaagaggaggaagacgtgtccctgggagataaggccgtgggctgcccccggcccgagcctgtgttcagagagccgagaatctgaccgcgggaagggaccccagaggccttcaaggtcctttctcctaattttagagctcagagagtacagggccttgagcgcggccctggcttctgggaggctgctgcagcccttggcacagggcttaccccgtcctttgaatgcacctgcagtgggctgggtgctgggatgcgggggagcacatgctgagcacctctcacactcgctcctgatggataaaggtcctttctcgctccccaccatcccatgtggttggattgggatccccgtttagcagatatgagcactgaggctcagtgatgagccttacagcaggcaagggctgggcctgagcttggccccctgtgcagagcccccagtccaaactcttgatgcccccaggctctgggccagggggaagcaggcctgggcatagtcgggtccctcttctgcctggctgtggttcatctccttggggaaggggtgagtccctggcccttttccaagctgcattctctaatctcccacctcccaccctgctcctgggccaaggccttatcacccaggccctcactgctgttctgaagcagctgtgatccctctcccgccttctccggaccctatcacccctgcagccttgcatggcggctggcccaaggggtgggggggtgggactcctctgacgcctcaggcatgggcctggtgtcggcctgggtgcagcgtgggggcagaaaggatagaggaccaccagaagatgctctccagagtgcccgggggaacctcacaggctgagtgcagggatgtgaaccattctgggggccaggcagggctctcagctccagagggctctgcaggggaagccaggagtcctggggtggtcaagttggtccagccctgtcactccctgactctgcctgggatggtcccttgactgatgtggtccttggtttcttctcccactccctgactggtggggttggtagtgatgctgggctgcccacggaagctgggggctgttcgcctcttctcctgtgtccatgaagcctcaggcctccaggtgcagtggagttgggggtcctctcaggtcttgagtccccacaccccactcctcagagagagaaagcccctgtctctctagggaacagactctgggccagggctgtggacaaggcgcagccgtgctctggcggctgtggcttgcggcttgcaggagcacgtggattggcaatgtcccctcgtttgctgcagcttctctgccagagcccccagtgatagacactgaacacctgtgatgcacctgtcagcactgcaagcctggacatccccacttacagcaaaggggataggcccagagaggttaagtgtgtgtcccaaattgcacagcaagtgaactgagattctaacccacgaaccactgattccaaaacctaagctcagaccacccgtttctatggcctctgaaggtgaatctcactggtacccaaatgtagctttctagaattggggtccactgtgtgtcacagagggagaccccagtccctgcctttccttttctgctccattgcagcccaggtcatgccaatgggagcaggcttgtctgagcgttttctagggggcgatgcattcatttcctggtgaaggagcagtgagggaagttaggatttgtagctgccgtaacaaaatagcacaaacaggtggcttaaaaccaacagaaatttattctttcatggttctgggatctagaaatccaaaatcgaggtgtccgcaaagtgggttctttctgcagacgccaggggagagggtttcatgcccctctctgagttctggcggctgtcggcactgcctggcattctctggctgatagaagctccgagttctggcggctgtcggcactgcctggcattctctggctgatagaagtgtcactctctgctctgttgtcggcacacggcgttctccctgggtgtctgtgtctctgggtccaaatttccatcttcttataaggacacgagtcatcttggattgagggcccatcctaacccggaatgacctcatcataacttgattacatctgcaaaaacaccctattgctaataaggtcacattcacaggttctgggtggacatgaactttgggggccactgttcaacccagtatagctggtgttttatctcaggaggaggttctgagatatggaggggtattgttctcttgtccttcctaaccgctcccatccctcccccttgcaggtgtggggtgcacactgaaaatgccacgctccttcctggtgaagagcaagaaggctcacacctaccaccagccccgtgtgcaggaagatgaaccgctctggcctcctgcccttaccccgggtgagtcagagcccgggctggcgcctgctgcacccacggggggctctctgctctgcgtgatgagggtgcagcagcgtccctcctgcagcagcctcttcttccaagtctggaaacaggagtgcagtaactgtgggttgcagatgaaaggagtagacaaatgagtgatgccctcatcccttctgccctgttagggagacgagagtgtcaggttggagccagtacttagttactggcatgtggggcctcactggaggcccagtctagggctggagttgggttgctcagaaaaacagactggtccaaagtcttccccggggtctcctcctggcctcttcttgccgccgcctgctctgggcagagcccgggagtgtgagccgccagaagcagcggcacgtggctgtctctctgggcctcctcctcctaggaagggcgtgccctccttgctccctctgggcttcccagaaaccgtggctattgatgctgatggtcctatctccccacagtgcccagagaccaggctccaagcaacagccctgtccttagcactctattcccaaaccagtgcctggactggaccaacctcaaacgagagccggagctggagcaggaccagaacttggccaggatggccccggcaccaggtaccccgctgtgacccactgtcattccccagggagtgccaaggggaggaaggatgaagggactcttgcagcagggccccttggggccctggagtcaggaaggacccacgaagtcactggatgcagcccgggctctgtggcttctgcttgggcctctcagacagggagctaattcccggatgtgggctaggtgggagaagaggccagaagcagcagctgggccggtccgtgcagggagtgaggtgggcactgtggagt

SEQ ID NO: 2613 - DNA, 6000 bp, Homo sapiens
accagcagccctgcctgggcttcaaggccactgggagaaggaaagaatttgctcagatgtgaaatcttgcagcctacgaagtggggatggaggacgagggccagaggggcagcagggtgaggaaggggtcactgctggggttgctggcacccaggctcagtggaggcagccccctactctgcacagccgcaggccaactctcaactatgttaggtgggtgatggtgcctgaggctactgcctggccttgacggctcacagaggcccctgttcacagtggggggtccatgctctgctggattgtccaggcatccagtaagccaggacatgaacttggctttagagagaggccccagacaccagcaggagctgcctggagcctagagtgcaaggcccctgaggggacagcctcttttccaccctgttcctgctctagagctgcttggtgggaggggatgtgtccaccccagtttccccccagctggcactctgcccagacagcagagcaggaggggcctgagatggtagctccaggagctggtctagaggcttctggggacccagaggctttgggctcctggtcctggtcagcgtttggtccctggctggaatggggaggggaggttgacccccagggtggagggatggacgcctgcagggtccagctggagagctctgtgccccctcctggagcccccggaacggttgatggtgtgtctggcgccccacttgggtcagcctcatcctgagggctgaacctgagcccctggcatcactgtgcccatgtgggccctcagccctcgttcacgtgactctcactcccagatgaagatctccttcaacgacaaaagcctgcagaccacatttgagtacccttccgagagctccctagagcaggaggaagaggtggaccagcaggaggaggaggaggaggaggaggaggaagaggaagaggaggaagagggatccggctcagaggagaagccctttgcactcttcctgccccgggccacgtttgtgagcagcgtgagacccgagagctctcggctgccagagggtagctcaggtgagtgcccacctgggggacaggcagcctgggaggggtggagcctggtctgtgtccacgtctgcatgtgcacctccattcacaggcctgtccagctacaccccgaagcactctgtggccttcagcaagtggcaggagcaggcgctggagcaggccccgagggaggcagagcccccgcccgtggaggccatggtgagatgcgggggagtggagcgctggggggagtctgacacccgggcgagcccatgtgtccacattctgtcctctcactttcagctcacacccgccagtcagaatgacctctcggacttccgcagcgagccagccctgtatttctgagcccagcactgccaggaccaaggctgagcccagctgtgggagtcccggaagctgggcagtagccagggactactgcacccgcttctgccttgtttggcctcactgtatcccacccacccctcctggccctggaagcagctagggtgcctcctgccatcggggccaggtctgggtctcactccccggccctgatttgggagggtccaagggggaagtggggtggggaactgcctgtgggtgagtgccaggggcctgctgggtggtggccatctgcgacccggcagggggctgtgcagattctgcacctggccattccctgtcctgtctcctcagcctgcctcacagtggccatggggtgtcggggtgaagggctgtcccagctacttgtcctctgcaggaccctaagcccctgcccgcagcccacatgccctctgtgatgagtggcgtctttcctgcctctgatgatggactcaataaacagcactggacaaggctgctggtgtccccactgcgtggtccttggctgagaagggagcagggggaggtctctgcaggaagaggccacatggggtccagtgggccccagtttgcacgtctatgccagggtgtgtgggaggtgaccccgatctggtacccccactccttgatgtcccagtggccaaggctctgacctcccaacttccatggcctgttaacctgttgcccctccaccccagcctcccagagctggcactgtgggaggtaggatgacaggcctgctgtcaggggcctagacttcaggtgggagggtgagagtgttgcagctgttgggcctgaagtggcttctctgaggggcccagagcctggggagggaccaagggaagggcagcatgagggcagcacaggggacggtgtcttctgctgggcttggcgtgccccccgacccacaggatgaggcaggccgggagcagcgcctgcctcagacggccagagctggggctgtttacagcccatggaacccaagcaccatttcctccctggaggatcaaacctaagagcaaagagataaagagatgctgtctggccaaactccggcggaaggagagtttggtgtatttccctggtcgggttaggcccagctcttttctggaccctctggatcaacacatgcctcccaaatcggcccagtcctcgggccatgcttggttgctgcagggacaaaacagaggccccagggcacatggaaggatggaagtggccagtgcttggtgtgcggccagggaaaggtgggcagcagggcctggtggcagcagtggtgtcatcaggccaagcaaaacttgcaactgaggaaccgacgggggtggggggtgtgaactccccccagtccttgctgagagggacctgaatctgaggcagctgctggatatgcttggcatccccagctgtctctctgggctgggtcctatgctggccaccagggtgtggcagagaacaggacgagcaagcagagctcctgagaggagggtgagccgtgggccagtcaggggaagaggaccggcggccctgctggggagggctcagggtggggctggcctggggagggtgggcaccctcagcggtgtccctgaggctagtggggcagtcacagggaggccactccagaccctcctccctcctctcccaagggggagcctcaggctctggctctgcaggtgtctggcagccccatgctgttgatacgggcaagcagcaggctggcacggatctttacaaagataatctttattcataatcacaggccacaggggtgagacctgaggtttgggttctgtggtgaaggagaacccctgtcctcctgtcccttgccctgggcctctgctggctgaggagggacaaggtgagggggcccccatggtgctcagacaaccagagcctccctggcagggcaggagtgtgggtgccacagagacaagccccttgcagagctgacctggagcccaccatccccatagcctgtgtgagcatgaagcgaggacccccgggtgggctgtgccctgggcttgtcactgatgccagtggaggctggcacctgcccctctcggcacctgagacagtgagggaaggtagctgctgccgtgaagaacaaagatgctctgagcacacacttgctggggctgagctgaggggcacacggaggcaggccctgcccgtggtctggtcagctgtccctgccgccgctacttttctggtctggggctgtagccttggtcaggttcccagcttccctcttgagaacgctgagcaaagtctgggagctctccaggatctggggccagagaagtgagaaggttgttaatgttcacctgttggtaaggtcctaagccccagctgtcctcacactcaggtgctgggacctggctgggggtgctgtagccaagggatcctgtgtgggggaaggcggaagcccaaggggactggcagacggggtggcagggccctcttccctccggaatctgacccaaaacacttcctctccaccctcaaagccaggctgggttagcactggcccgtgctgggtgctctgcccaagacctggctcttcacactgagcagaaataaccacatggctagcgagaaccggataaagaccaggacccaggatgccccaggccccacagacagccccacagtcactcccacagcagcctgggttcctcaatgggcctggccacgctgcccctgcccgaaatgccagcgaggcacagactgcccacagccgggagccccagccggtcctgacgccttgccgtggcaacacccctgccgtgcctatcccctgatgctcggcctggcctcccgagctccaccttgaggtaggcggcctccgtctccgcgatggtccggtcgaactcgttgcgagaggcaatcttgcgtgccaggttctcgttgacgcgggccagcttctctgtcagctgcctcacctcattctgcagccgctgcttctcgtcctcctcctcctggatctgccggcacagctcctcccgcttctggcacagctcctctatgcctgggggccgggaggggcggcgctgtgggcccagggcaggagcgcggcggcggagggcgggcctccttccacccgaggaagccagagtcaggcaccacccccgagcgcccggcgcggggcctgcgagccagcgagggctcgggccacggacacccggcctccggcacggagggctctgctcagccgcgcgatgcccgcagcgaggcgggtccaggggcaccccgctgcgagccgggaacccggccctgcggccctcccgacctccccgtcccggctgcgccgctcacacttgaccagctcgttgttgtagttctgcagcgccgcgccctgctgggtcatggtcaacgccgcccggggccccaccaccccaaccgccgcggaagcagcgctgtccgcgcctgcgcacgactcccccacggcgcgccgaactagcgcgtcatcgctgagcgccttgtgcgcgtcatggctgcgcgtgcagacgtgcgtcatcgccgcgcgccgcgccgagcgaatctcggagtcggtgggtgcagatggcggcggcagttgtggtggcggagggggacagcgactcccggcccggacaggagttgttagtggcctggaacaccgtgagcaccggcctggtgccgccggctgcgctggggctggtgaggcctgggaagagaggggcggccccgcgcggagtttccgggaccgtacgcgctttggggccgctaccctcgggttcatacggctctgtccatcatccgcctctgtcctgtcctgccattttccaccacctttccgtttcgtttcgttcagctccgctgacagcccttccatagcttcggcccaacgtccgggcagcacggacagggggcagcggagtttttgcagcctccccctcagcttcttcccttccccgcctctccccacctctatgttgtgttcccctcgcctcacggttttctgcaccccaggtgtcttcccggaccagcggtgcagtcccgccaaaggaagaggagctccgggcggcggtggaggttctgaggggccacgggctacactcggtcctggaggagtggttcgtggaggtgctgcagaacgatctgcaggccaacatctcccctgagttctggaatgccatctcccaatgcgagaactctgcggatgagccccagtgccttttgctactccttgacgcttttggcctgctggagagccgcctggatccctacctgcgtagcctagagctgctggagaaatggactcgcctgggcttgctgatgggcactggtgctcaggggctgcgagaagaagtccacactatgttgcgcggagtcttgttctttagcacccccagaaccttccaagagatgatccagcgtctgtatgggtgcttcttgagagtctatatgcagagtaagaggaagggggaagggggcacagacccggaactggaaggggagctggacagccggtatgcccgtcgccggtactaccggctcctgcagagcccgctgtgtgcagggtgcagcagtgacaagcaacagtgctggtgtcgccag

SEQ ID NO: 2614 - DNA, 6000 bp, Homo sapiens
caggcagtacttgaggtcctcgatggctggccgggagtctgggaagtctacaagaagaagaacatccctcagggacagacatggatgcgtgcgcacgtgcaggctggtgcagagtgtgtgcggtgtgggaaaggacacgtgcttgccagccccaggacgatgatgagaccacctgctaggcaccagacatccccccgacactctggcgtgctgatgcatttgaccacaatgccacagggtggacagagcaacacccaggggccagtccccagcaggagccaaggccaaggcagcacagcagtggacacccagaagcactgtccagcatctgccacacctgccctgatccaggcacgggggacgccgcagtggggacagtcccagcactgcccggtgcacccccctgcaagagcgacagcgaaggcacagggagccccagacgtggacacagggagcccagatgcagacacagagccgacatggcgaaggccctgggagccccagatgcagacacagagcagacacggcgaaggcacagggagcccagacgcagacacaaggagcccagacacagacacagagcagacacgacgaaggccctgggagccccagatgcagacaaagagcagacacggtgaaggcacggggagcccagacgcagacacagggagcccagacgcagacacagagcagacacggtgaaggcacagggagcccaagacgcagacacagagcagacacggcgaaggcacagggagcccagatgcagacacagagcagacacagcgaaggccctgggagccccagacgcagacacagggagcccagacgcagacagagcagacacggcgaaggccctgggagccccagacgcagacagagcagacacggtgaaggcacagggagcccagacgcagacacagggagcccagacgcagacacagagcagacacggcgaaggcacagggagcccaagacgcagacacagggagcccagacgcagacacagagcagacacggcaaaggccctgggagccccagacgcagacacagagcagacacggtgaaggcacagggagcccagatgcagacacagaggagacacggggaaggccctgggaagactccccagacgggagagcggaccccagggccggggcaggaccacctcggacgatgctgaagagctcctcgatgcgcaggctggcgtagatgcggtagaagaacctttgcacgtggcagcgccagcggcgcagggtgttgccggcctcgggagatgcgggcctggcggggccgtcctgcaggaacaccttgccgagccagccgaccacccgctcgatccactgtcaggagaacgctagtgtgagctgcagggaggcatggtgagccccgggctgactcagaggctgggaggagcctcacggccacccaccctgtcggccgggaccgaggggagcccgaaggccacctgcgtctggaggctggagcacatcaaaacctgcagggtgggtgatggcccaaaaggcgacgtcccggcccccctgcagtcttcgtgcctctcacacgcgccagtgcccacacttatcactggcagcagcaaccctagcgtgagacatgacagacacacacgacctgtgcgctgtgcctggtgggcacacttgcccccacttaaatggataaacacgcccttgagaccagccggggggcccaggcgagcacaaacctctaggtggcaattccgccgcggggcccaggcgtgctcatgccccacagacctgctacccagtggcaagaccgcacggatgttcaccctctccaccctactacccactcttgcccaccgctttggggacaccctccctctttgaaaacccaacatcacagccaatctgcacctcagtagggggactctgaaacactgaggaaaggacaggtgacacatgggaacaggatggggggacccacatggctgggcccagctcccctatggctccgggagcccagagcagagccccagaccacaccccaacagcacaggtgcctggaggccccatgtgagggtgtctcgctccccgctgtggtgcaggctggctgtaggtcagtccattagggaccggccaagcgagtccacactcaagtagggcagcaaacaggagaaggggatccattcagtggctcctctggtgggcccagcttcgccacacctgcctgaggtagccccctcgggatcctggcccgataccgcctgcagccatgggattctgcgcagatccgaagagcgcacctcagatgcgtcctcgctatcaccagggcccagaagtactggtctctaccccacatcaagacagctccagccaccacccggtctgggcccacccaggcctccgtgctctggatgcttctgaagccaggtgtcaggtttgccagaaacctactcccctgtctccagcggggcacagcccaagggaggggtcctcaccttgtggaactcacgcaggaaggagcgctcgtactcgccccggcaacggtcctccatcctctcccgggtcacctggtgcagggtggtggtcacagcctcggcactgacccgctccagcagactgagcctgtgtctagaggagagccctggccatggggcacccagagcacacaccggcccctctagcccagaacagccccatgccaggactgccctgcctgtagagtgcatgcagcacacacacacacacacacccagcacacacctccccacaatcctcagctgtggggggcggttgtaccaaaggcttcaagaagccactgggagcacagagcactcccaggctctgctgtccccgcccagctggcctctatccaggtagggacactggccttccccatgtgatcagtggcagcaggtgtggctgtcgggggccctagccttatctcctaggatcaactctgaaacgacaaccaactgcactgctaccctggccgcagaggtacagatgccactgtttgtgcctttcagtgcagtctctggtctacagtgacaaaaggactcaagaggaggatgagaaaagttgccgtgtaacttttgcagggatgagcccaacagaagcccttcacggtctccctgacccctgccagcaaaaggagcactcctttagtccacctttagtccacctaagacctctcaagtagctgcatggctacacccccgttcaatgtgacaaaaccaccacaaatggccaagggtatgacaattgctagagaactacaacaggacctgtctctcacaacaaacccctctcctctccaaactaacaagagactgcttgccctcacagtgacctgatcttcctggagagaagcagcagcaagcttctgttcacaattacagggcaaggaatgtcgacgagggtgagaatcattcctccccaggatcgacaaaaggcacagtggaattctgcagagtccaggaagtttggagttgctaagaaatttgctgctgcagacacaagccacatagggccttaccagggtcaaggcatgaatctgtgggactgaaggtgagtgacagaagagagacacctgtgtccaggacacgctgcacaggaatccctgggactctctctctgtcatgttcctggttatcaggacggctcaccagctttctgctgaggccagctggacccaggggagcagcggggaaccagaaggagcaagggcatggccatcgggacagactactcacaagacctggctgagctgatggaactgctccagagcctggcgacaccagcactgttgcttgtcactgctgcaccctgcacacagcgggctctgcaggagccggtagtaccggcgacgggcataccggctgtccagctccccttccagttccgggtctgtgcccccttcccccttcctcttactctgcatatagactctcaagaagcacccatacagacgctggatcatctcttggaaggttctgggggtgctaaagaacaagactccgcgcaacatagtgtggacttcttctcgcagcccctgagcaccagtgcccatcagcaagcccaggcgagtccatttctccagcagctctaggctacgcaggtagggatccaggcggctctccagcaggccaaaagcgtcaaggagtagcaaaaggcactggggctcatccgcagagttctcgcattgggagatggcattccagaactcaggggagatgttggcctgcagatcgttctgcagcacctccacgaaccactcctccaggaccgagtgtagcccgtggcccctcagaacctccaccgccgcccggagctcctcttcctttggcgggactgcaccgctggtccgggaagacacctggggtgcagaaaaccgtgaggcgaggggaacacaacatagaggtggggagaggcggggaagggaagaagctgagggggaggctgcaaaaactccgctgccccctgtccgtgctgcccggacgttgggccgaagctatggaagggctgtcagcggagctgaacgaaacgaaacggaaaggtggtggaaaatggcaggacaggacagaggcggatgatggacagagccgtatgaacccgagggtagcggccccaaagcgcgtacggtcccggaaactccgcgcggggccgcccctctcttcccaggcctcaccagccccagcgcagccggcggcaccaggccggtgctcacggtgttccaggccactaacaactcctgtccgggccgggagtcgctgtccccctccgccaccacaactgccgccgccatctgcacccaccgactccgagattcgctcggcgcggcgcgcggcgatgacgcacgtctgcacgcgcagccatgacgcgcacaaggcgctcagcgatgacgcgctagttcggcgcgccgtgggggagtcgtgcgcaggcgcggacagcgctgcttccgcggcggttggggtggtggggccccgggcggcgttgaccatgacccagcagggcgcggcgctgcagaactacaacaacgagctggtcaagtgtgagcggcgcagccgggacggggaggtcgggagggccgcagggccgggttcccggctcgcagcggggtgcccctggacccgcctcgctgcgggcatcgcgcggctgagcagagccctccgtgccggaggccgggtgtccgtggcccgagccctcgctggctcgcaggccccgcgccgggcgctcgggggtggtgcctgactctggcttcctcgggtggaaggaggcccgccctccgccgccgcgctcctgccctgggcccacagcgccgcccctcccggcccccaggcatagaggagctgtgccagaagcgggaggagctgtgccggcagatccaggaggaggaggacgagaagcagcggctgcagaatgaggtgaggcagctgacagagaagctggcccgcgtcaacgagaacctggcacgcaagattgcctctcgcaacgagttcgaccggaccatcgcggagacggaggccgcctacctcaaggtggagctcgggaggccaggccgagcatcaggggataggcacggcaggggtgttgccacggcaaggcgtcaggaccggctggggctcccggctgtgggcagtctgtgcctcgctggcatttcgggcaggggcagcgtggccaggcccattgaggaacccaggctgctgtgggagtgactgtggggctgtctgtggggcctggggcatcctgggtcctggtctttatccggttctcgctagccatgtggttatttctgctcagtgtgaagagccaggtcttgggcagagcacccagcacgggccagtgctaacccagcctggctttgagggtggagaggaagtgttttgggtcagattccggagggaagagggccctgccaccccgtctgccagtccccttgggcttccgccttcccccacacaggatcccttggctacagcacccccagccaggtcccagcacctgagtgtgaggacag

SEQ ID NO: 2615 - DNA, 6000 bp, Homo sapiens
acatcaccacggtgggtccccagcggaggggccgtcggttccagcgcggggcgcgggtgtttctgcagcggccgccgcggggcttctgcggacggggcgggcggggcccggggttcctgagcttccggaggaggcggccgcgctctgggagagtctccacccgcccgggagcccggtgttggggggactctggttttccggggtggccgcacccccttcccacctgtcctgggcccgtgtagctccggggcgtccccggccagaccctccccgctttccgcggcctggggcggcgcctcccgcagggcccttccctctgcccccgcctgtgccctggcggccccgtgcggctgagaccaagggcgcgcccctctcccggctcccggtctccgtgcggggcgaggctcctgggggtctctgcgcacccaccgcactgacagcgcccccgcaggtcatccagcggatcttctacgccgtgaaccggtcctggtccggcaggatcacctgcgccgagctgcggaggagctccttcctgcaggtgcggagcggccccctgtcccctgccccctgccttgtccctacccctcctacctccactcccttcccttccctcctcccccctccctcctcccctcccaccccctctcccacccccacccccacccccacctccaccgcgctcccagcccacccccaggcctgtgagcactggaaccccgccgcctgcggttgggggtccacggttgatctaggaggcgggtggggccgtactgggcaccaccctgagggggagccgagccctgactcccccagagctgcccccacccccacacccgcctagggagccacccccatgctggagctccccccaccgcagagttgcccccactcggagtgccccccggccccagctgcccagtcccccccacccacggagcggccccgaccctcccagccttccctgccccgcccgcagccaggcggacttggggcatccccgcagaggccccgcgctcaggccgcctgggtcctttggcagaatgtggcgctgctggaggaggaggcggacatcaaccagctgaccgaattcttctcgtacgagcatttctacgtcatctactgcaagttctgggagctggacacggaccacgacctgctcatcgacgcggacgacctggcgcggcacaatgaccacggtgcgtgggggcacaggggcgggcgggccgcgcggacaccgagcacacccttctctcagggcctgcgggtctgcagctgcctctccttccgcactcccagctctgtgtctgcagctgcctctccttcgcactcgccgctctgtgtctgcagctgcctctccttccccagtcgctgccccgtgtctgggtccccgcgtgcgcctctgcccgaggcctctgcctgggggcgtctacagggtcagtgtgggccgctggtcctgaagctcctggcccgagggccagcagcgctgtggggcttccttgttaacacccgagcaagggcgggcaggccacacgccttccctcaggagctccaggttccagcccccaaggcctggagcagtttccatccaatcccgggctaggtggagccccaggcttagcggtcgttcatatacctccgcgggagccggtgccgcccaggtgtcctcacagcagccactgcctcccggcccctctaagagtcatccacacttgcaggaactcaaagcggcctgtggcctgtggggcttgagttttctaaaggattcctttaagtgtgctttttaccccaaaaaaccatatgaccaagactgtttccgaattacggtggcatctgttgtgtgtggtcgactcataatacgcctggttccccgaacgtgagctgcacccgtctgcgtctcccggggctggtcctgggtcgcgtggccgcagtagatccctgcgtcggacgcgcacctgagcagacgtagcattccctggatttgtcctgcgctcagttcagggagccacctgcgccctgggcccctaactagccacgaggagagcacagctccacagcgccggcccgtgtggcctgggccagcacctgcacagctgggaatcggcccagaaccaggcgctcactgtccctgtgaacccccggcccggcgcggccccagctttccgcgttcctctggagcccactctcggtcccagggcaggatgccgtgtgcggccgggctgcgctgtttctcacgcactgcggcctgaagcggggggcggcaccttggctcgtgcgtcccagggacaccggtgaccgcagggatggccgcccaggctgcgggaccttctcgtggcccaagctgacggcgacggtgctttcactcctgcctcccgttggtgaggtctccctcccgcctcccgttggtgaggtctcactccggcctcccgttggtgaggtctcactcccgcctctccttggtgaggtctcactccggcctcccgttggtgaggtctcaatcccgcctcccgttgctgaggtctcactcccgcctcccgttggtgaggtctccctcccgcctcccgttgctgaggtctccctcccgcctcccgttggtgaggtctcactcccgcctcccgttggtgaggtctccctcccgcctcccgttggcgacgtctccctcccgcctcccgttggcgacgtctccctcccgcctctccttggcgacgtctccctcccgcctcccgttgctgaggtctccctcccgcctcccgttgctgaggtctccctcccgcctcccgttgctgaggtctccctcccgcctctccttggtgaggtctccctcccgcctcccgttgctgaggtctcactcccgcgtctccttggtgaggtctccctaccgcctcccgttgctgaggtctcactcccgcgtctccttggtgaggtctccctccccccctcccgttgctgaggtctcactcccgcgtctccttggtgaggtctcactcccgcctcccgttgctgaggtctcactcccgcctcccgttggcgaggtctccctcccgcctcccgttggcgaggtctcactcccgcctcccgttggcgaggtctcactcccgcctcccgttggcgaggtctcactcccgcctcccgttggcgaggtctcactcccgcctcccgttggcgaggtctcactcccgcctcccgttggcgaggtctccctcccgcctcccgttggcgaggtctccctcccgcctcccgttggcgaggtctccctcccgcctcccgttggcgaggtctccctcccgcctcccgttggcgaggtctccctcccgcctcccgttggcgaggtctccctcccgcctcccgttggcgaggtctccctcccgcctcccgttggcgaggtctccctcccgcctcccgttggcgaggtctccctcccgcctcccgttggcgaggtctccctcccgcctcccgttggcgaggtctccctcccgcctcccgttggcgaggtctccctcccgcctcccgttggcgaggtctccctcccgcctcccgttggcgaggtctccctcccgcctcccgttggcgaggtctccctcccgcctcccgttggcgaggtctccctcccgcctcccgttggcgaggtctcactcccgcctctccttggcgaggtctcactcccgcctcccgttgctgaggtctcactcccgcctcccgttgctgaggtctcactcccgcctcccgttggcgaggtctcactcccgcctcccgttggcgaggtctcactcccgcctctccttggcgaggtctccctcccgcctcccgttgctgaggtctccctcccgcctcccgttgctgaggtctccctcccgcctcccgttgctgaggtctccctcccgcctcccgttgctgaggtctccctcccgcctcccgttgctgaggtctccctcccgcctcccgttggcgaggtctcactcccgcctcccgttggcgaggtctcactcccgcctcccgttggcgaggtctcactcccgcctcccgttggcgaggtctcactcccgcctcccgttggcgaggtctcactcccgcctcccgttggcgaggtctcactcccgcctcccgttggcgaggtctcactcccgcctcccgttggcgaggtctcactcccgcctcccgttggcgaggtctccctcccgcctcccgttggcgaggtctccctcccgcctcccgttggcgaggtctccctcccgcctcccgttgctgaggtctccctcccgcctcccgttgctgaggtctccctcccgcctcccgttgctgaggtctcactcccgcctcccgttgctgaggtctcactcccgcctcccgttgctgaggtctcactcccgcctcccgttgctgaggtctcactcccgcctcccgttgctgaggtctcactcccgtctcccgttggtgaacctttggttgaaacgtgtttgtttccgtgatcacactcgaggtctctctctccgtctgaaagctgtacctttgaggcctgaatattctgctctttacaagtcggtcttggagccgcggtcagctttgcgctctgtggatttcatgctggacttggctctgctcgacgggaaagcgtggtgggcccctaggatgggccgtgcaggggcatcggggccccggggctctcccagacccaggcgtcctctcagcttttcggtccccaccgcatccagtctcggctccggggggtggtgacgtcggggccgaggcacggtgcgggctgcccatcaaccgcattcctttccagccctttctaccaagatgatagacaggatcttctcaggagcagtcacacggtacgtacggctcaggcgcctgacggcagccattgcccctgcgaggaccccggtccctctcctcatcgttgcctgacgtgagctttttgtgccccgacagcgagtggttgtcaccccaggccctggcgaggggggcacgtgtctctgtcacgtgaatccctagtgggggggggtggcacaagactgtcacgcgaagtctgaggaagggggtggcccaggccccaggtcgggggttcttgtcgggcgctgggcctgagtgagcagtaacgaaggtgcactcctgaccctgcctggatctggggaaaaccctctggccacggggcctccacctcctccccggagaggcaggaggaggggcaggaggggggcaggaggagggccgggcccggggggctcccctcaccgaggcgcgtggacaggggctccgttcctgtgaagctctccctgacatgcatcttcgtctctccatcctggctttcgatctagaggcagaaaagtgcagaaggaagggaagatcagctatgccgactttgtctggtttttgatctctgaggaagacaaaaaaacaccgaccaggtgggttcctgctgcggcatgcgtttgtcccagtggaggggccgggagccgcccatgtgacatgtgtccccaggcggatgcctgcacgcctggtgggggctgcacggcacagggggacatgtgcacgcccggtgggggctgcacggcacagggggacatgtgcacgcctggtgggggctgcacggcacagggggacgcgtgcgcgcccggtgggggcggcagggggcaggggatgcctgcacgcccggtgggggctgcaaggcacagcggggacgcgtgcacccccggtgggggctgcctcaggggctgcaggtcacgggctgggagggcccagggcaggggctgacagagctcgccgtgccgcagcatcgagtactggttccgctgcatggacctggacggggacggcgccctgtccatgttcgagctcgagtacttctacgaggagcagtgccgaaggctggacagcatggccatcgaggccctgcccttccaggactgcctctgccagatgctggacctggtcaagccgaggactgaaggtgatgccccgtgagggcatggcccagggtgaggggacggacgggcgagagga

SEQ ID NO: 2616 - DNA, 6000 bp, Homo sapiens
ggctggagtacagcagcgcgatctcggctcactgcaacctccgcctccaccgggttcaagcgattctcctgcctcagcctccccagtagctgggatgacaggtgcacgccaccacatctggctaatttttggatttttagtacagatggggcttcaccatattggccaggctggtctcgaactcctgaccttgtgatccgcccacctcggcctcccaaagtgctgggattataggagtgagccaccactcccggcccacggttagagtctaaactgtgcacgctgcctggagtccccacctctcctcacctgaaatatgcactcggaaatgtgtttccaaaacctgcagaatgcagacccacactactttcctatttatttattcattttgagacagagtctcgctctgtcgccaggctggagtacaggggcatgatctctgttcactgcaagctccgcctcccgggttcaagtgattctcctgcctcagcctcccgagttgctagggttacaggtgcccgccaccacgcccagctaatatttgtatttttagtagagacggggtttcaccacgttggccaggctggtttcgatctcttgacctcgtgatccacccctgtcggcctcccaaagtgctgggatgacactgtgctcggctgggttttttgtttttttttgtttgtttgttttgtttgtttgttttaagtcatcgtgcggaatgcaagcggcagatataaacttgatccctctttgacctctcactgcacgcacctagctgggagctttgggtcggcgcaggaccagggagatcctacttgccaggtgcttcctctgaggcatctccaggtctggagctttagtgttcgatcaaccacccaggtctgcggggcgaaggccgactgagatccagagcatgtcatacagtgggtgagtttgcatttctgagcagctgcaggtggggcagaggctgcagaggctgtggccacacaggagacccgggctcaggtggatgaaggaaggagcttctctccctctacaaccgttgtggctccctccttcctcacctccctgggaagcgctgacccagctctttgttcctggacctacatcccacagaggagcagagtcttccggaatcttcctcgctactcttccctccccattctcgctttttattttatttttatttttattttttcgagagggagtctcgctctgctgtccaggctggagtgcaatgctgtgatctcggctcactgcaacgtctgtctcctgggttcaagtgattcttctgcctcagtctcccaagtagctgggattacaggcacccgccatcatgcccagctaatttttctatttttgtaaagacggggtttcaccatgttggccaggctggtctcgaactcctgacctcaggtgatctgcctgcctcagcttcccaaagtgctgggatgacaggtgtgagccaccacgtctggctaatttttgtatttttgtagagacggggtttcagcatgttggtcaggctggtctcgaactcctgacctcaggtgatcctcccacctcagcttcccaaagtgctgggataacaggtgtgagccacgatatctggctgctttttaaaatttaatgcttttagggacagagtctttcattcctgcctcggctggagagcggtggtgagatctcggctcactgaagcctcaacctcccaggctcaaacgatcctcctacctcagcctcccgagtagctgggaccacaggcacacgccaggatgctcagctaatttttaaatattctctagagatggggctcgccatgttgccaaggctggtcttgacctcctgggcttaaacaatcctcctgcctcggcctcccaaagtgctgggatgacaggtgtgagccaccatgcctggctaatttttgtatttttgtagagacggggtttcaccatgttggccaggctggtctcgaactcctgacctcaggtgatccaccacctcggcctcccaaagtgctgggatgacaggtgtgagccaccgtgcctggctaatttttgtatttttgtagagacgggggtttcaccatgttggccaggctggtcttgaacccctgacctcaggtgatccaccgtctcggcctcccaaagtgctgggatgacaggcatgagccactgcaatctcccggcctgccctcacctttctctccccaggacaattctggtggccacccaccacccctgcaagacggacagacccgaatgggcagggcgtccatccggctgtggagcagcttggataattgcagctggccacatcccagcaaactctgcaacacctcaggccctgccagccttgggggcccgacagcacctctttgttctcccagagcaaagcctgcacggagtgggcccccgggccccagcgcagactgaaggcgcattctgtttctgccctgagttgatttctgtcctgttggccctgggcctcactacactgtgccccagtaacctggcagagaaaggcctcttgtgcaggcattcaaaggaaaccctttcccctcaaaactgcagtgatgcttccaacagtgactcgcagctcatcgaaacacccagaatgaaaagcacgtttgttccttgaaaagacgtctgtgtccgatacatactcaaacagagaactgtattaatatattcacttccctccagaaatcacagcatcgcacacacacacaaacggttgcttcccaattaggaaaaataacttcacagaattcctgcgtgatggcgctcttctgaccaagtacactcggatttttatatccaatcacgaaacacaaactgaaattcaaatcattatgtacacaacacaaaactatcgtttatgagtgatttaaatcgggtgcggtggctcacgcctgtaatcccaacgctttgggaggcagagacagaggcaaaggcaggaagattgcttgaggccaggagtgtgagaccagcaacacctcgtctctataaacaataaaattaaaaatgagccaggcatggtggcgcatgcctgttgtcccagctgcttggaaggctgaggtgggaggatcgcttgagccaggagatcaaggctgcactcagctaagatcgcagcctgggtgacggagcaaaaccctgtctcatacgaacaaaaagagttatttaggccgggcgtggtagctcacgcctgtaatcccagcactttgggaggccgaggcgggtggatcacttgaggtcaggagttcgagaccatcctggctaatacggtgaaaccctgtctctaccaaaaatacaaaaattagccaggcgtggtggcgggcgcctgtaatcccagctactcgggaggctgaggcaggaggatcccttgaacccgggaggcggaggttacagtgagctgagatcttgccatcgcactccagcctgggcgacagagcgagactccaactcaaaaaaaaaataaaactaaaaaaagagttattttttttttttttgagacaaagtctggctctgtcgcccaggctggagtgcaatggtgtgatctcagctcactgcaacctccacctcctgggttcaagcaattctcccgccacagcctcccgagtagctgggactacaggcacacgctactatgcccggctaatttttctatttttagtagagatggtgggggcggtttcactatgctggccaggctggtctcgaactcctgacttcgtgatctgcccgcttcagcctcccaaagtgccgggattacagacttgagccaccgcgcccggccaagggttacttattgagtctggctcgatttatgcagctcagaagtaggagaacctggctcataaaagaccttgaaattactctctaacagggtgcaacaccaggtgaaaccctattttgataaaaaatgaataaaaagcggggcaagatgtaaaggaaacaggtgcatgtgtgccagacagatgataatgcagtgtttttatggatactgttaaaagcagaaacaaaaacgaccattgggtaaagttatttaactaatgtcacctccctggacgtggatgatttttgcaattttcaacgcacttcacgctcatccctgaacaccaacgtttaaaggggtccaactcctccaacctgtctctactgtttgataagcaaagctaaagtaaacggggccctttgggtcccaggtagcccgctgttattgaaaagtttgatcttttcctcgcgcgctcccgtaggacgcacgctcgctcccgagctcggcgggcgcgcaccccgcatgctcgctcgttcccggtgcctcccactgcgcaggcgcactcccgtcctccagccccacccgctcacacacctcccagcctctggcttgcgccccgcgggcagccattgcgcacgctcacccgaccggcctcccgaactccgctcctccaccgctatgcacggcgcatgctccatgcggaggttccaccctctcctcgctctggcaggcacgcattgcgcatgctcgcatttccgcagctctaggactgccacgccgccatgggccgcgcctctaaaaatcctaaacgcagaaagagctcgggcggtacggccgccacagcccctccctcgtcctcaccgcagccgctcggccccaccaaagcctcctgcaaaagctccgagggccgcggggcgcgcgtggctagcggcggcgtcgcctcgtgatgacatcgtcgcgatgacgcgacgcagtgacgtgaacgcgggcgcccttgtttgggagcgcggccggcgcgcccgttttgaagctgccctgagcagcgcgggccggaccgcgccccctcctcggtccccgcgccccgcgagtccgcgcagttcccgaggcgcgggccctgttccctgcgccgcgccccctcagcgggccgtgctcgcatcaccgaggtcggtccggggcggaccgaagcccccggggcggggcggggcgcgggcgtccgggggcgccgcgggcccagcccccgccatgccgcccggcaaagtgctgcagccggtcctgaagatgaaggtggacgagctgttcctgtactggctcagcgaggccagcacgcagcggatgctgcaggactgcctgcgccggatcaaggcgcccgggcgggaccagccgaccccgggggacggggagcagcccggggcctggcccacagccccgctcgccgccccccggcccagcgggctcgaacccccgggaacccccgggccgggccctgcgctgcccctgggcgccgcctccagccccaggaacgcgccccacgttcgaggcacccgtagatccgcagggacgagagtagtaagttactcttccttctgctaacaactgcgcaggtggctctggtcgcatagtgggcgtgtggctgcgcgatggaggctggtgggcgagcgtcagaccccaaaacggtttcatattgagtctgttccccgccccgaccccccccaccacacacatacagacaagaaagtcccacgtactgaacattccgtcattgacagttgttaacctaaaaatcacacaatttataaaggtagaaaggcttcctattttattttattttattattttaatttgttttaattttgagacagagttttgctctgttgcccaggctggagtacgatggcgcgatcttggctcactgcaacctctgcctcccaggttcaagcgattctcctgcctcaggctcccgaggagctgggacttacaggcacgtgccaccacgcctggctgatgttgtatttttagtagagactgggtttcccccatgtgggccaggctggtctcgaactcctgacctcaagtgatcctcccgccttggcctcccaaagtgctgggatttcagacgtgagtcactgcgcctggtccgttttttatttattttacaattctttggagacagggtcttgctctgtctcctaggctggagtgcagtggcgcaaacacagttggact

SEQ ID NO: 2617 - DNA, 6000 bp, Homo sapiens
tccgatttccattccaaaggtttgtggttcttgtttccttttctctcaactgaaaagcactgcaatattatagtttgtttttctggaaaaagccttcagacaaactgagtagggtcataatctttattcctagtaactaacatttaggtgggaaaaacatgtgtgagatggaagtcttattttaggcaatctcctctgtaccaataatgaaaagcaagagtctaactgaattaggtgacagatcaaaggagtgggactgctcaaagccaccctacactggggtcatgtggatcctctcccagtggcttggaacacagggacactaggtatgcctgcacatacaaactcggagtaatcagacaaaataaatatgtcccttgaaagttcagttactgagaagcaaagcattttgtttttattttttaacttttaaaaactcagacatttaagtttttcttttacttatgtgtgtttaaaggcagccacaaccatctcttgattgggaacttgcacagatctcatgaattacctaagaccctttctcctcttatcatcgtgtgtccttaattattcatccacagattaagcacaggaaatcatagaatgttaggatagaaaataaccttagccatgatgtagtcatgcctcttttatagatgaggaaaataaaatccagatattttatttatttacttaatggatgcttgcatagaatttactatttcctagacattggttaaagcactttcctaatgttaatccgtctaaccttcaaaacaaccctatgaggttggtactctcatgcccattttacagatgaagaagcagaaggtcaaaggttcattggcttactcaaggtcacatagctggattcacactcaggctgtctgttttccaaacaccctgcccttctgcctcttaccatgctggtcgtccattgctctgccctgtagcttctctaatggaaagcgattgttagcagtggagctgggactcgaaccctagtctcctgaccccatgtcttatgttcgctccactataccaaagttctacataacaagaggttagacacaccattttatacaagaggggggcttcagaggcttaattagagaagtgatgaaagctataatttgaaagagaattataggtaactatcaaataattttcttgttcacaacccttgtagttgatcaatttaaaaacatgctttctggattcagttttctccttgaagatttgaggagataagcttcatcagttagctttaggggactctaagcttccaatgcttccctgtataacagaggttatacttgtttcctaaagtgtggtccatggaccagcagtatcagcatcacttgggagatagttagaaatgcagaatctcaggcctcactccagacctcctgaatcagaatctgcattttaataagattcccagctgattcatgtgcacgttataaattgagaaacatggcagactaccccagaaagtgtcaaaatggaagcctagaagcacaccattcttacagaaaacagttgggggatgggagtactgctccacaagtcccaaccatagcaaaattatgaggcacaagaatttggtccttgactcagtacctgctcccatcttccaagttgcatttccctttcccctgcgtgtcctttaaaaagttgtcttccccagggtaccctcttgggtttattgtttattctgcatatgttaactctctttttctttcctacctgatatagtccaaacctccatttccagatgaaatttctctcatgagctccagatccatagtttcaacaatgtaccaaaaacctctgcttgggaaaccactttattgtctctagtacttctatgttaaaatactcagaactgggccgggcgcggtggctcatgcctgtaatcccagcactttgggaggtcgaggctggcagatcacttgaggtcaggagtttgagaccagcctggccaacatggtgaaacccaatctctactaaaaatacaaaaatttagccgggcatggtggcacgtgcctgtaatcccagctactggggaggctgaggtgtgagaattacttgaacccgggaggcggaggttgcagtgagccaagatcgcaccactcaccactgcactccagcctgggcgacagagcaagactcggtctcaaaaaaaaaaaaaaaaaaaaaaaaaaaaaaaaagaaaagaaaagaaaaacaaaacaaaaaatatccagaactgaacaccttgctccatccaaagcctcccacgtcctgtatctcaaatacccttaacaattccaccattgactcagcctcccaaattagacacctgctcttctaccttgatgccaaagtcttctttaaaaattataaatcatattatattactccctacttaaccttacagtgattcataatcacctgcaaaagtaggtccaaacttcttcctgtagattgcatccaaagcccagaagggtctggtttcttcctatatttcagatcgccattttttccgcctttgatccctccttccaccactgtacccctatcccctccagtattcctccagcatactaagcctgaacatgcctttcctccgtgtgtgactgctcaaacatcactccctctgtgaatcctttcctggatttctcctcctccccctttctgtgttgattttatagtttttacacttttatccttccatatttcaaacagttttgtaatgatttcttttcatatctgtgtgatagatttgaatccttgaggagagggagtctgccatttatttgtctttcatctttatgtctctagcttctagcacaatgtctgtcatttaatgggcattcagtacataatagataggtaattgaatgaatggatttagatgcctgggtgttttctttctacttgtattctattccccacatcctctccaaagatttcagcatcatcaagacatattatcctgtgtcttccttctgaagatttaaattatagtgatcaccaaatccatgttgatatgataacaatggttaagaagtttgaatatgttattttctctaagcaatacagttgtatattaatcagaatctcccagagaaagccccttagagcaggcagttccataaaaggaatgtcaggaacttctgcaggctggatgaggacatacactgagtgaacaagtctgtcaactgctctaaagacactgtcaatgccatataaaagctggccttgttcatctagcagatcatgggggtgagacagtccagtgcctctctgcccctacaatatatgaagaaaggggaagaaacacacattgcctcctggtagattaggggaggacttcttgtacatttttagcaaaatccgagttcagacccagcaattagacaaaagggtcagcaaactatggtcgatgggctacatctgcccactgcatgtttttgtaaatgaagttttattgggacacagccatacctattcacttttgcattatctatggctgcttttgcactttgatgaaagagttgagtagttgagacagacactgtttgacccacaaaatctaaaatacatactatctagcccttcctagcaaacatttgccaacccctagaaaacttttaaaaaatgatgctcttcgacttgaaatttttataatcttctgtttattgtcaataggtgctgctgattttcaaaaaatgacttagaatcctcaaataagtatacagccttatatgctgcttagacaccaaagctatgataagatttgtcagttctttgtatcagatgggttcaattcttgacatcagctaatgttataaaaataactacaaaattggttgtaatagaaccaaatctaagactctttttaataaaaaagatcaccattgctggtgagaaacctatactgaatgggtgagatgccattgcatttatctgaagtttcgtctttataatcaataatcatatacaatcctagtcaagaaactcatcttacagtccttggggattgaacactgtgaaaataaacttttactcttcggatgtgcttggattttgttttaaattaagaactacagaaatatatatcatttctagtggtagaggaaaatattgccacccagaactttctgaatgtctctttctgccctaggtccatttgtgatgaacaccaatgaagagatttctcaagctattcttgatttcagaaacgcaaaaaatgggtttgaaagggccaaaacctggaaatcaaagattgggaactagtggaaagcggaagagcaggtcttgatgtgtcctagaattttgccatttctgagattgagccattgaaggcattccatttctaaagcttatttagccggtgcttctaaagaattccacactaacgtgataacatggtttttgtaacaataaatgtaggatatttcctggcacatgcaaataaacctaatcattgtttctttaaaaatcagtgtttttcatttgagatacctaagttactaagcttctgtttaaaaagtcgttttgtgtatgtttgcctttttttgcatgtatggatggatgtttttattatttttgtgcatgtgcaggttttaaaaatcatatttgattgctttctgtgtgtcattggcagcagatgcatgagcatctgaggtcccttcttaagcaatcccactgagatacaaaggtcaaagctatgtgctggggtttcatgttacaggttatctgctttaaaataacggcagccctgaacatttgagtcagttcttaaaactgccctgctattggtagggacgcaacaggattacagccaagacttctctgcattttctgccaaaatctgtgtcagatttaagacacatgcttctgcaagcttccatgaaggttgtgcaaaaaagtttcaatccagagttgggttccagctttctgtagctgtaagcattggtggccacaccacctccttacaaagcaactagaacctgcggcatacattggagagatttttttaattttctggacatgaagtaaatttagagtgctttctaatttcaggtagaagacatgtccaccttctgattatttttggagaacattttgatttttttcatctctctctccccacccctaagattgtgcaaaaaaagcgtaccttgcctaattgaaataatttcattggattttgatcagaactgattatttggttttctgtgtgaagttttgaggtttcaaactttccttctggagaatgccttttgaaacaattttctctagctgcctgatgtcaactgcttagtaatcagtggatattgaaatattcaaaatgtacagagagtgggtagtggtgaatgttttcatgatgttgtacgtccagctggtgcagggctccagtaatgaacatggaccagtgaaggtaggtgagctcaatttttaatgtgatgaagttctttttattggctcatacagaggactttctttgccctcactatttttgaaacaatataaaaatgcagaaccatcctagtagtggactggacaggatatatcctgcatttcttggtgactgttctgtttcttagtcttattaaacttctggccatgagtatttgaaaatgctggggtgggggttggttgttttttgaagttatggtagaacatgagcagtctggaatctttttggatggagaagtttctcctcggttgcatatgcagatggcacagtggttttttaatgaaacattgatttgtttttatgactgataactttgtgggccatttattttcaggtctttgtgagcagcagaggttagtttattcgtttggtaaattgaaaattgcagtgctttctatgaacattttctatctgcttttgcaaattaccaattgctgccatccagaaaaatgttttctcagagagtgtttggttttttcgcttcttgaaaggtgtaaaattcaacactaatcaaatctttggttctgtga

SEQ ID NO: 2618 - DNA, 6000 bp, Homo sapiens
cggcctttgcattgatggtatcctctacttggcaaactgtcaagtgttgtctatgtctgctttcagtctacaacggcagagttgaatagttgagacagagactgtatgctcacaaagtctcaaatacttactatctggccttcacagaaataaatcaccaactcatactctggaagcatcctgccagctttggaagtgatcttgcagcttggaatttagtttaacagctccattcaacagagagtcacttcatttactgtgtacaaggtgctagagttggaagcaaagaaagtagacaaaggggtataacattttggaatccttctagttctgattcccactgtgactcaaattatttttttcctaagattgtatcatgaaacatttcaaaatatagaaaagttaaaaaaagttaaagcaccaatacaccaccatctggattctacaattgacattttgctgtatttgctttgtcatatatcaatccgtttatccatctctctattcatccattaattcactttgttgtcattcctattattattgctgctattgttattttttggtgcattcaaagtaagttgcggacatcagtacacttaatccataaacactagttaatgtacataacattaactagaggttgttagttattcaaattattttttaatttttactccaatactgtgatctagaaagcggcctccattcagccagaagacaaaactttacaaaagctgaaaactgagaaaggttatcagggtaattgaggtaagtatcaggggaatcattcatctaaatttctccagtttcctggttcagagatgaattggcctttcaggcctgagagtattttgcttgtgatggattctagaaagttctgtggctcaaaggaaagggtcataagctatttttttttcggagaactgccaaaaacccaagggaaagatagagaaaaacacaattatgagtttcatgcaacagctgatcacatgtagcttcttggtcagagcactggtcgatggaacagaccgtgtctgtgcagaatgctctcatgagggtggatatgggagtcacatgtgctcatcttttctggatatctttggatgtctttaaccacccagtgtatttatggccttcgtaaactagcatttataaaataatcagtccttgacttggagccaattgatttcctgggttcagtgagtctgagtctttataatatggaatatttcagagacatttgtcatctaatgaatagcagctacactgccctgaagggcaaattaacaaaatctacaagaaagaatttttgagttgatggcttgaagaagaaagaaacaaaaataaggaagtgtttcagatgtccatgtacttttttttttttttttttaatttttgagactgagtttcactcttgttgcccaggctggagtgcaatggcacgacctcggctcacggcaacctccgtctcctgggttcaagcaattctcctgcctcagtctcccgagtagctgggattagaggcatgcgcccccacgcctggctaattttgtacttttagtagagacagggtttctccattttggtcaggctggtctcgaactcccgacctcaggtgatctgcctgcctcggcctcccaaagtgctgggattacaggcgtgagccaccgcgcctggccccatgtacttctataatatgtatctttgaaaagaaattcaataagttttacagaggaggaaaatggaattcgtgaataaaaaagaaaagagtcaaggtacctaaataatgtggttgtctttaaagattataatggtgttatttggaatcatttagggaaggctttgttcattgtcatatcagcatgagttttctttatgcttcccaagattccaaaggtgatcaacagtccatctacacactcatatatttagccacctactccacatcttgatctggatgtcaatgacagtgtgaaaagtgctcaaagcttaatatacagggtcacatttctcatctcaaaacaggaccctgttacagtgaaacattatacgccctttgttcatttgtaagaattcttccctctctcacctttgtttctcctcattttaagtcttctaccttttcagacttgttcttttttcttttcttttcttttttctgcaggggcctgtaaatggaattcctgcattgctctaaccatgtacaaccttggacttagcttttacctgtaactggcttctgagagacaaagaggagaaacgttcactcctagtacacctattacagctgcagaggtagaggagacagttgcagaactagttacaatgacgataagaaacaatactttgttattccatagcacctttaatgttcatgtgtattatctcagctagccttgaactgcctaagtaaggtgatgaggacgggtttaagccccactgatattttaaaagcccagagaaaagtgttcgttcctctactaacctgttcttttagagcagggatctgcatactaggcctgcagccaaaatgagtaggtagcccactacctatttttgtatagccagagggctaagaatggtttttacattttaagtggttttacatttaagatcaaaagaaggataatatttcatgacaagtaaaaattatatgaactcaaaattgtatgaattttatgaatttatatttcagtattcataattaaagttttattgaactacagccacattcatttatttacatgttatctatggctgctttcttgctacaaaggcaaactggagaatgtacatggcctgcaaagtcaaagtatttactatctggtccttcacagacaaagttttccaaccttattttagagacaccactgtctttcctttctcaaaaccaggcaatgagccttctggtgtttagagaatagaaactgcagctatgcctgtaccactagttaataatcctagtaatcaactagatcccctcactggcttgtgccagctcctcattcttctggaaaaactctccaacgcctgcccactgtgttccaacaccatacaaactcttaaccaattatctccccactagagtgtgccttctcttcaggcaggaataaagacgtatggctgcccgtccccactcccgcactccttttctcgcaattctaactgacaaacagcaggcaacttatctatggaacaaacgattctgtagtgcttagaatgtgacaggctcatttaattctcatttcagcccgataaggctggcactattatcatcaccatcctcattttatagaggaggaaccagaggcacagagagactgagccacctgtcccaggtcatgtcaagtggtgcctcccagcggtggaggcagcactggaatccgtgccgccaagctccgccggctgggtgacagggagactacagttaaaaacagatttcccacaagaccgaccggagcgccgatcagagcacctgcccgggccacacatttcctcctggagcacagcaagtgccgcctaaattacccgagtgagcatctcttcccggcacgagaggcagggaggccaaagggccgccaagctggcctgggagaggcgtagggcggagcgagagtggagtgacattcccgagggcggagccccagggcctccgagacccgtagactcccgcctcccgcctcctctaggccgccggccgcgaagcgctgagtcacggtgaggctactggacccacactctcttaacctgccctccctgcactcgctcccggcggctcttcgcgtcacccccgccgctaaggctccaggtgccgctaccgcagcgtgagtacctggggctcctgcaggggtccactaggtgagggaatgctggcggtcagtttgcaaaatcctgccttccccagctcactttagactcctaggggagataacaagagatacttaaattgtactacgaaatttggtgaaaatggtagacggcttttctttctgcaaagcactgagatctaagtacctcatcagttgttcacatgcatacaatttaatcgtaggagtctggaaggacccagacataatctagatggggataaagatactttctggttgcttcgatgtaggtgatgaccggcctgtactgctttgagtattaagctcgtttctgcgccttgcaacctatcacccaataaatatttatcgattactattcagggaggatacattttagggtaggccttgactaagtggagggtattgtggagtagagcccttctgaataacagcagctaacattctcatagcactaactgcacccctttgaggtaggcggtcttatcattccattttacagataaaactgagccacagaaaacctcaggtcacacagctgatatgtggtgaagctgagatgcaaacctaggctgtctggttccagagtctgctttttgccaaagcacctctcttcgtttcagtaggaatctttgaaggaattgggtatatttcacttgaagaaaagatttaagggattgggggtactgtctgcaaacacttgaagtggaatagggatagattatattccttctgggatagtccattagaacctagacctcccaaagaggaaaagactttcgaataacaaactctggctataggtaagtcctgaaatatgagatacattgccaagaacagctggtccatgacttgcctatgctctaggagacttcatgagtaagctgaaagatttcttgcccaaaatgttggccctgaacttcaggaatagatgggtctttgaattcaatgaccctcgaagatctcttttaatgccaagatcttcagcatgttctggtaagagttagggacctctttgtttttctccattttctctaaggcgccacacaaacctgcccccatctgtcagcctcattggtagcaactacctcatgggtgctaccagtgaggctgacagatgagtggcactggggaaggggtgggagatcgagagaattcagtgaagtaagaaagacaaagtgttcattggagatttttagtaaggggccaacagagctgctaaagtcatgcttcacttaacgatggggatatgttcggagaaatgcattgttaggtgattttgtcgttgtgcaagcatcttagagtacacttagacaaacctagctggtataacctaggtgtgtagtaggatatatggtatagcctattgttcctaggctacaaacccatacagcatgttcctgtactgaatactgaggcaactgcaacaccgtggtgagtatttgtgtatctaaacatacctaaacatagaaaagatacagtaaaaatatggcattatagtcttatgggactactgtcatacatacagtccatatattgttgactgtgtaatgttgacctgaatgtcattatgtggcaggcacatgactgtatcgctaaccttcgcacaagattactgtaggattacatgagatagttgtaaataattggtggggtactgggcacctagtaggtatgcatacatgttcaccatcattatggttgttttaaatcacctaacccaggccctgcacatagtaagacatcaacaaattgtagctgctactattttgcgcatctaatcttaatatcatttattttgtagtccttggatgttccctcctttatgacttcttttttttttgttgtccttcctttagccctccatcctctacagctcagcatcagaacactctctttttagactccgatatggggtcctccaagaaagttactctctcagtgctcagccgggagcagtcggaaggggttggagcgagggtccggagaagcattggcagacccgaggtatgctagttgggtggctgctccttgttttcttttcagaagggactggtgggatgttgatggtgattttgggaagagggggccaagatagtcgtgagctggcctgtggagtgcataagtgcaaactttaaagtttgcaattggg

SEQ ID NO: 2619 - DNA, 6000 bp, Homo sapiens
gctactcgggaggctgaggcaagagaatcacttgaacccgggaggcggaggttgcagtgagccaagatggcgccattgcactcccgcctgggtgacagagcgagactgcatctcaaaaaaaaaaaaagataaagaggacttgagaataccagggggcgaggggatgtatttgagattttgtgtaggatggtcagaaaaggccttgctgaaaagatgacatttgagatcagacttggaggatgtaaggggacaaactgtgcaggcttggtggcgagtggggacacattccaggcagagggaccagttcttgaaagggtaccaagataggggtgtgcctggcaagttggaggaattcaaagtccccagagtgagtgtgagattgaggagggtaggagatgagaagaaaacagaatttcattgcttagggtgagataggaaccacaagaggatttcgaacaaaagagggttgtgatctgactaaacacgtctgcatgggggtaggggggatggagacagatgggggctggaccctctgggatggtctccatcttacactcccctctttgtcttgcagtactataaccaagagtggacattgtgggatcgctttgaggtacaagggctgcagcctaatggtgaggagatgaccctcaaacagttcctcgactattttaaggtaaggcccctcccttactctgtcaccccacctcagggggcgaggtgtacacggtgacttgctggcctgtccacctccatgaccctgctgttccccctccctctccagacagagcacaaattagagatcaccatgctgtcccagggcgtgtccatgctctattccttcttcatgccagctgccaagctcaaggaacggttggatcagccgtgagttggacactggccaggctaggggaggccctgtatgggttggggagcctcatcatccagctgtcccactccagttcactgcccctacctacctgcccatcctctcttgctttctgccctcctgaccctatactcccatccccctatccccaggatgacagagattgtgagccgtgtgtcgaagcgaaagctgggccgccacgtgcgggcgctggtgcttgagctgtgctgtaacgacgagagcggcgaggatgtcgaggttccctatgtccgatacaccatccgctgaccccgtctgctcctctaggctggccccttgtccacccctctccacaccccttccagcccagggttcccatttggcttctggcagtggcccaactagccaagtctggtgttccctcatcatccccctacctgaacccctcttgccactgccttctaccttgtttgaaacctgaatcctaataaagaattaataactcccacatcgcctgccctgctggttccagggaaggaagggacttcctggagctgtctggttcagatgataactcagagggctcaaccccaccacacctgccagttttctggacaaagaaaatgtaattgccacctcttcctgccctctctgcctaggaagagatggaggcaccagtgaggccatagtgagcaggtacttgggtccatgtgactgttaatttgagctgggttcaattctcaccttctccatgtcctaactccttgctctgtgaagaggaaagttacggtgaccaggctgctagggcatggccagcgtgccttatgtccttagggcagatcccctcccacctggctcaaagcactcagaccctgggcagccttttgtggtcatggttcccagcaccaggaatgcctgtgctgctcttagttcaatttccttgctgcaggggtgtcttaaacagctctgccgaatgccagtgcctgcaggcatacttcgtgatttttatggaaatacttgagaacatctgtagaggaaaagcccgttgcttgccttacgcttcccccggccctgccgccgccccagccccaggtctgcctgtattccccttgaggatcttcagcctcctactttggagaagacagctggctgtggggactgaggggtgttcatcgcttagagcaggtagcaggaggcctaacaccagccccaccgggactgcagagttaccgtgctctgtccttggtcttggctgagtgctccagacaattgaaagcaccagtctggccactgctacatctttgccttcttctattgtactggctcctggtgcctgaggagtccattcatacttctgttcctcaactaaccaataatttatctaccttacttagaaacaagatccctcactcttctactcaaacctgagtgtaaggaatagctcaacctgttctgaactggcttgattcccatcacagcctgtgcccacatctgctgcctcctgggccagtagttcctggtcctgggcacagtatatgcccttgtccacctccttctgatcattttattttcttggcctgctctgcttgggtgaccttatccttccacagtttcttcttccccactaggacgttgaggacagaggcattttccctttggtatctagtggtgatactgtcaaagggaaagtttttcccaccacaggaactttcccattattgctctagagtaccctagacactccacaccgcagtccactggccacaccactacagcagctgaggcttgaacacaactgttgtcttctttctccagtatgccagctcctttgcggatactctatagacaccttgttcactgcacctcccccattacggctccatgtcttccccaccacaactcctggatctccttgacaccttattcgtgcctgacacccttctccatcaaaacaagcttttgagtcatgcatgaatcctggttgcatcttagttgttccccctccacctcattccattttacttctgcggtttgtctaccagtctaccattgttaacaccagccagatgggagatcagggcttagcaggcgggggttgcgtcattgcaccgagccccctgcacccagcagccacaaaggatagggtgggacaaaggtttctcttgtcactgcctggaactatttgcccacctccttctgatcattttattttcttggcctgctctggcaggcattcaacaaacatttgttgtgtgctgtgtgccagtcactttctaggcacgtgagacagcagtggataaaacaaagatccctgtcctcttggggttttacgttctgctaggttgacacccagaatagattataaacacagtaagcaaattgtaccttagaagttgatcagtgctcttcaaaaggcgaggaatagagcccgatctggggatctggaatgatggcagtgcaggtaggaatttttaaatcggaaaggcttcatggagatgactttgaagcaagcacctggaagaagtgagagaatgaggcacgtggatgtgggccagcagcattccaggcaaagggaaccacagcaaatgcaaaacccctgaggctggattgtgcccgtttcactcaaacagctagaaagagcgctagtatggtggcagtgagtcaggggaagaagaggaagagatgaggtcagagaagtgatgagcctgttctatgccaaggcgaggacttttatctttgtcaaatatttccactcccatcatggcccgggaaatctcactaatgtaaaccttactgaaaatcctaactgctgtgatcaaggctgccataaagggaagcccggaagaggcggggaggctgccttggaacagggtagtgtaaggatgtgccagaaggcctgctggaggttgcagccctttgagctggacttggggatagtgtggttttccaggcagaaggaagtgaaggattaggtcggcctggtagtacttggcacacaacatgcgcccaataaataaaatggaaataaaaccgcggagtgttctacttgtgttgactgacatcaaaacaaaacaaaaaaccctcagagtgaggggaggcacgggaggggctgtgccgggcaagagaggtggcaggaaaatccaacgcacggcgcctatgcaaatactcgtgtgaggcagaaaagaggctccgccccgctcgaagttccaagcatgcgcagtagcggctcctgcgcctctaaggatccgcctctttccttctttctcagcctgggttccaccccgggaggcccgctgtatgagatggagggcgggctaaaggcgggacgagactcgattgagcgcaattatgaccaatcaccttgcggaatattcggcctatagcgaaggaggagctcagaacaaaaaggagaccccacccccgccgacggtgaaaacctatgaaacctgggcggaggcgtgcggagtcgggtagagagcgaaatcacgcctcttcagtcagccacgccctttattcttgctcggcctcgccacagagagcaaatcagattggctgggcgacaacctcaaagggcggggctgcacacgttcactacgggaatgaggtagcggtggagggggcagttgggcggggataggccgtcctagctaaggtggtaaaggccaataactcttcaggctgcctctcctcgaaaagtcatcttctcgcgaacctttaaaatgccttcctccccaagcacctcaagggactagaactgagtgcttcatttgtcttttttcctccttgcaaaagtcccgtttgccaccatggggatgtaccaagtgagaccgagtagggggaacgagtggtgattgacgcgccaggttactggccactgctcacctaggcgctagcaaacttctgccaagatcggaactgagtactaaacagcctccacagttctccctggtgccgtctccggcttggcgccgcatcctcctctgggctcgcgatggccgcgtcccctcccgctgcggacgggtcctttggtacatgcagtccgaggtgagtcccctcctttccacttcacccttccgagcgcctgcgtgcgcatgcgcggagcgcggcgcgcgcggcggttgggccgttggctgttcggccctgggatccgccgccactccgcgatcagaccgctctgtgccgcgagccgccgtgagcactcggattcaagccggcgccaacgagtccgggggcatcgcccgcagcggccaagctcatggccggctgagcgggacgccgcctccgcctcagccaccgccgccgccgccgcctcctcctcctcagccggcggcggcccgggcccagcaaccatggctgaagactactgggacgggcgcctgcggcgaacaggaggagaaggaggtcgcgcggcctcatcccgggccgccgccccaggcgccgccgcgccggccccgcggctctgaggttgctcgcgcgcccccgccggtgagcgcgtccccgaggcgtggaggctgcccctcctccttcagaacccacctcgggcggtgcccaggggtctgggctgcggggctggcaggtgcccccacccccggcgaatttcccagaatgcaccggggcggggggtcatttggggcctccctgaccttggccccgccctgggcctgtcctgggagctggggttgggtagtgctgtgggtgctaatggggacctgggggagtcaaaggaccaaagggtgtggaaatgggtgacaatggggtgaaagacttgggggggttgctgatgggggtcggagcatgtggcagtaagcctcacgccaataagtcgtgtaaggttcaaggccccgtgtgtgcttgtggaaggagggcggggtgcggagcgggtgagggacccgagggtgtataacggggggtagggtgtcgaggaagttctaagacatgctcatagggattatgtccgcagagaggcccggtgtgtgttcatgggggacagggtggcacaggtaccagaacgtgtgttggtggggtcagggctctgaggcctggtgcgtggcgatgaggccctggatggtgttaatactgcgtgtctgtccgtggggcctgcagtgtgtgagaatgcagtgtgtgcttgtgga

SEQ ID NO: 2620 - DNA, 6000 bp, Homo sapiens
atcctttacttttacagtaatttatttacaggaatctctgtaatttacaggaatctctgatctttataggaactcctagctttactctctggaaatacactgcttaccctgaacaggaagcttaatgtgattctctataacagccttttccctggccttgtcccagaagccccacctgcaccctgtacaggaaccactgccctgacccaacaaagaaacaccgacctgaatctctgaaggggcagtgtcctaactacacagaggatctttgtcctgaacccgcacaggaacctctattacccccagcaggaacctgtgccctgagctagcacagaaaatcctgcccttacactcaacaggaacctttgatttgcctctttagagtaatccaaagaatgaaccagtataaaaaacctctacactgtacaagaacctctgttctgtacttgttaaacaacccataatcagaatcaccatgaatacctgcctggagactgtacaggaacccctgacctaacccccaatggaatcacctgatctgtctgtctctagtaacacagctctgatcctggacagaaatacctggcctgagtacgctgtgatcctctggcctggccgtctacagaaaaccactctcctggcctcaaaaggaacacctaaccttaatctgtatgggaaaaaatgccttcacagttttccctctcactttacaatgtctccaacctttgtatttccctgcaaacctgccttaccaggtaacagaatcattctcctgaccccagacaggaaacactaacctgacccagagatgctcctacccctacacagtaagagtccctgtctcaatgctttaaagagaaatttctatagcagtgctgtccaatagaaatatgtgagtcacacgggtaattttatattttcaatgtagccacattaaaaagagaaaaaaaagataaaattattttcaataacatcaatatacttaactttacccaatatattcaaatattattttaacatgtaatcaatataaaaattactgagctattttaaactttttatactgagttttgtgatctggtgtacatttcacatttatagcacatcatctcaagttagactggccacatttcaagagcagtagccacacgtggctggtagctaccatataggacagcataggtctgtggagtctacggaaccctatagcagacactgctataagctcattgagacctgttcctgttcttcctgagctcactctacctattccagcctcctctgcagatagatgtgggcacatgacagagttctgaccaatggagtatgggcaaaagtgacatataccagttccaggcctgacccataaaaatctctcatgcaatcctccatttcctctctttccctgtctaccaactgaaaaccaactaactccaaggacctagaggaggacagagtcacaaaatagagtttgcctgggtccatgaatgaacagtagtaaatattcagattggcttttgaatgagcaagaaataaacatttattcgttaagcccctgaaattctgggttacagcagctaggataatttagcctaattaataataatctctccccctctctctctctccttttttttttttttttttttttttgagatggagtcgcccaggctggagtgcagtggtgcaatcttggttcactgcaacctccgcctcccagattctcctgcctcagcctcctgagtagctgggattacaggtgtattagcccggctaatttttgtagttttggtaaagatgggatttcaccatgttggccaagctggtctcaaattcctgacctcaaattatctgcccacctaggcctcccaaagtgctgagattacaggcgtgagccaccacgcctggccagtaattttttttttttttttttgagacaggatctcactctattacccaggatggagtacagtggcacaatctcggctcactgcaacctctgcctcccctcccaggctcaagcgatcctcacacctcagcctcccgagtagctgggactacagatgcacaccaccacacccagctaatttttgtgttttttattgagatggggttttgtaatgttgcccagctggtctcaaactcctgagctcaagcaatctgccctcctctgcctcccaaagtgctgggattacaagtgtgagccattctgcctggccaataataatctcttgaccgaaatctagacacctgatctcactgtctatatgaacacaagctctgaacctatacagaaacacctgtgacccagtactggcccacctgatctctttgtaggaagctgtcataacataggtctaagaagccccatcctggccacgaatggtggctcacacctgtaatcccagcactttgggaagctgaagcaggcagattgcttgagtccaggagtttgagaccagcttgggcaacatggcgagaccccatctctataaagaaaaaaaaattaggcaggcatggtggcatgcacttgtagtcccagctacttgggaggctgaggtaggaagacagcttgagcccaagaggttgaagcagcagtgagccgtgttcacaccactgcactccagcctaggcaacagagtgagaccctgtcccctgtatcaaaaaacaaaaacaaaaaaacaaaaaaacaaaaccttaatccttaacttgcacaggaacaggaacccatagtctggagctctctagaaacccctgcttgattcagtaaaggtacaatatagaaaccataggaatccctgtcctcattctgtccaggaacatttggaatgacccaccagaggtacactagaagtgacctgaccctgcccatgaatccctgtcctcacacacctcacacaaaaggaatacctctccttaggaaaaaaggcccctaccctcaatcctgcaaaagaataccagccagatagagaccaaggcctgacactacagcacagatcggcaaactatggcattcaagccaaagccagactgtgggctgttttacatttttaaagggttgttttttaaaaagagaaaaaaagaaaaatgccactgagaccgtatgtggcctgcaaagcctaagatgtttactctctgtccctttataaagtttgctgacccctgctcttcagaaacctctcttctgatccaacagaaaaatgggccttgaccctttgcaagactccctactctatcaggctgcaggtatcagaactctagaatttttttgtagtgtgttatcattgtatgtgttttctttggtgagtgtaggggtttaaaggtcttaggtctgcaactcttttgcgctgagacaaaagataggttcacgtaggaggggtgagagggaagaggcggcaggacatcttcaagaggatcagagggcaaagctactgggcggtgagaccgtcaatctgtcagtctgatgcagaacccccggactgcttatctctccggtcccagcttatagcccggtaggaaatggtggagaatgagacagggagattaggaggacaaaccggcctcctgcagagctgacatttagacatggagtgggagttgcgggggagagggggtgcctagggacagctccccagacgcacacacactttctattactgcttgggagcagtggttacccgttggagggggcagatagggagagctgctgcccatgagaactcccatcctcaaggccattctggccctgggcactattattatcacaactttccagatgaggaaacggagcacagaactgttcagcaacttgcccaaagtcacatggttaagtcccgtaacctcagtttccttatctgcaaagcagccttaataatgggaactacctcatagaattgtggtttacaacgatgcctgtcacataatacttgctatcattaccattccctgcccccactaagactccttccactcagaatattgcggcagaatattaatagctaatattcggccagtgtttcctgtgtaccaccatagtgaatattaactcggaaaatcctcacatttagcatcgtcaccacgcctattttggccgccaccaccaacgtccagtggcaacctcgctctcggcccagccacaaccagcccgcccgcgctacgtcatcacggcgcgtcgcgcgggaagtcgcggggaaaaggtaagatgccccttcctaattccctcgcttccttgcttgctctccagacaccgccgacccgaagggctcctaagtgactggacagggacggaggggcggcggctatggcatccgggacgacagcgacgatagccgaggcaagaaaaagcttgcaccgcagccctgtcgggaaccgccggcgcctgccttttacgtaggcgcagcacagctggcgtagcacgccgacgcaccgccccgtcgcctgtgagctcgcggtgtggctcagcccagctggcgtagcacgccgacgcaccgccccgccgcttgtgagctcgcgagaggtgtggctcgcgcgaggggcgcggccttgaggcacggtcccctctggaggcgggatctgggcgggcagtcgagagacgaggcccaatggaaaagaaaagcctgagcgctcgcgtccccacaggtcgccagaaacttggtggagcgagccaagggcggagtttgagaaaggggctgcgtccaatgagtggagcggtgagtacagcgcgtcgacggcggaggcgggaagggggcggaggccgaccgaaggcggctagggactggctgaagagggttagcgaaacgttagcggtcgggtctgggcagggggtggagctggttgaaggaacggggcagtcccctgaggagcggggctggttgaaacgctaggggcgggatctggcggagtggaaggtaccggtccggcccgataaggggtggagttaagtgaatcgttaagggtggagtcgaaaccggggtcggggccggggccggctgagtgaaagggtgggtgattatcccgggagataggccgaaagggcaggttcgtgaaggaatggggtctgggctgggcttagagggtctgggaatggggcttaggagagtagaaggggcggtgattggttggaaagggcaggccctaagacggactgtgtgagcccgggggctcattgctccgtgaaagggcaagaccagggaaagagaatcgtgtaaaaggggtggagtctagcgggccgggcggggccgggtagaatggccacctgagtggagggagaaggcctgagagaggcggagtttggaaggctgtggagaatcagatcgcgtaaggaatggaatctaatagagggggcggagcctggaaaagggcagagaggtggggtcctcagggcacactagccccctcacatacccacgctcctccccccacccccagaaccgcggcaggggccaagcctcctcaactatgacctcaaccggccaggattccaccacaaccaggcagcgaagaagtaggcagaacccccagtcgccccctcaggactccagtgtcacttcggtgaggccctagacccgccctgatgagggggagagggagcaagttggtcatgccctggactctgacccttctctctgattcacagaagcgaaatattaaaaagggagccgttccccgctctatccccaatctagcggaggtaaagaagaaaggcaaaatgaagaagctcggccaagcaatggaagaagacctaatcgtgggactgcaagggatggtgagcagggcctggctgcagtttagcctcgtatgacaatcaaaacccaaaggttccccaccctggacagttccctctgactcagggcctaaaatggatctgtgtctccttttttttttcctctgcaggatctgaaccttgaggctgaagcactggctggcactggcttggtgttggatgagcagttaaatgaattccattgcctctgggatgacaggtgaggctgggtcctccag

SEQ ID NO: 2621 - DNA, 6000 bp, Homo sapiens
acaatgtctccaacctttgtatttccctgcaaacctgccttaccaggtaacagaatcattctcctgaccccagacaggaaacactaacctgacccagagatgctcctacccctacacagtaagagtccctgtctcaatgctttaaagagaaatttctatagcagtgctgtccaatagaaatatgtgagtcacacgggtaattttatattttcaatgtagccacattaaaaagagaaaaaaaagataaaattattttcaataacatcaatatacttaactttacccaatatattcaaatattattttaacatgtaatcaatataaaaattactgagctattttaaactttttatactgagttttgtgatctggtgtacatttcacatttatagcacatcatctcaagttagactggccacatttcaagagcagtagccacacgtggctggtagctaccatataggacagcataggtctgtggagtctacggaaccctatagcagacactgctataagctcattgagacctgttcctgttcttcctgagctcactctacctattccagcctcctctgcagatagatgtgggcacatgacagagttctgaccaatggagtatgggcaaaagtgacatataccagttccaggcctgacccataaaaatctctcatgcaatcctccatttcctctctttccctgtctaccaactgaaaaccaactaactccaaggacctagaggaggacagagtcacaaaatagagtttgcctgggtccatgaatgaacagtagtaaatattcagattggcttttgaatgagcaagaaataaacatttattcgttaagcccctgaaattctgggttacagcagctaggataatttagcctaattaataataatctctccccctctctctctctccttttttttttttttttttttttttgagatggagtcgcccaggctggagtgcagtggtgcaatcttggttcactgcaacctccgcctcccagattctcctgcctcagcctcctgagtagctgggattacaggtgtattagcccggctaatttttgtagttttggtaaagatgggatttcaccatgttggccaagctggtctcaaattcctgacctcaaattatctgcccacctaggcctcccaaagtgctgagattacaggcgtgagccaccacgcctggccagtaattttttttttttttttttgagacaggatctcactctattacccaggatggagtacagtggcacaatctcggctcactgcaacctctgcctcccctcccaggctcaagcgatcctcacacctcagcctcccgagtagctgggactacagatgcacaccaccacacccagctaatttttgtgttttttattgagatggggttttgtaatgttgcccagctggtctcaaactcctgagctcaagcaatctgccctcctctgcctcccaaagtgctgggattacaagtgtgagccattctgcctggccaataataatctcttgaccgaaatctagacacctgatctcactgtctatatgaacacaagctctgaacctatacagaaacacctgtgacccagtactggcccacctgatctctttgtaggaagctgtcataacataggtctaagaagccccatcctggccacgaatggtggctcacacctgtaatcccagcactttgggaagctgaagcaggcagattgcttgagtccaggagtttgagaccagcttgggcaacatggcgagaccccatctctataaagaaaaaaaaattaggcaggcatggtggcatgcacttgtagtcccagctacttgggaggctgaggtaggaagacagcttgagcccaagaggttgaagcagcagtgagccgtgttcacaccactgcactccagcctaggcaacagagtgagaccctgtcccctgtatcaaaaaacaaaaacaaaaaaacaaaaaaacaaaaccttaatccttaacttgcacaggaacaggaacccatagtctggagctctctagaaacccctgcttgattcagtaaaggtacaatatagaaaccataggaatccctgtcctcattctgtccaggaacatttggaatgacccaccagaggtacactagaagtgacctgaccctgcccatgaatccctgtcctcacacacctcacacaaaaggaatacctctccttaggaaaaaaggcccctaccctcaatcctgcaaaagaataccagccagatagagaccaaggcctgacactacagcacagatcggcaaactatggcattcaagccaaagccagactgtgggctgttttacatttttaaagggttgttttttaaaaagagaaaaaaagaaaaatgccactgagaccgtatgtggcctgcaaagcctaagatgtttactctctgtccctttataaagtttgctgacccctgctcttcagaaacctctcttctgatccaacagaaaaatgggccttgaccctttgcaagactccctactctatcaggctgcaggtatcagaactctagaatttttttgtagtgtgttatcattgtatgtgttttctttggtgagtgtaggggtttaaaggtcttaggtctgcaactcttttgcgctgagacaaaagataggttcacgtaggaggggtgagagggaagaggcggcaggacatcttcaagaggatcagagggcaaagctactgggcggtgagaccgtcaatctgtcagtctgatgcagaacccccggactgcttatctctccggtcccagcttatagcccggtaggaaatggtggagaatgagacagggagattaggaggacaaaccggcctcctgcagagctgacatttagacatggagtgggagttgcgggggagagggggtgcctagggacagctccccagacgcacacacactttctattactgcttgggagcagtggttacccgttggagggggcagatagggagagctgctgcccatgagaactcccatcctcaaggccattctggccctgggcactattattatcacaactttccagatgaggaaacggagcacagaactgttcagcaacttgcccaaagtcacatggttaagtcccgtaacctcagtttccttatctgcaaagcagccttaataatgggaactacctcatagaattgtggtttacaacgatgcctgtcacataatacttgctatcattaccattccctgcccccactaagactccttccactcagaatattgcggcagaatattaatagctaatattcggccagtgtttcctgtgtaccaccatagtgaatattaactcggaaaatcctcacatttagcatcgtcaccacgcctattttggccgccaccaccaacgtccagtggcaacctcgctctcggcccagccacaaccagcccgcccgcgctacgtcatcacggcgcgtcgcgcgggaagtcgcggggaaaaggtaagatgccccttcctaattccctcgcttccttgcttgctctccagacaccgccgacccgaagggctcctaagtgactggacagggacggaggggcggcggctatggcatccgggacgacagcgacgatagccgaggcaagaaaaagcttgcaccgcagccctgtcgggaaccgccggcgcctgccttttacgtaggcgcagcacagctggcgtagcacgccgacgcaccgccccgtcgcctgtgagctcgcggtgtggctcagcccagctggcgtagcacgccgacgcaccgccccgccgcttgtgagctcgcgagaggtgtggctcgcgcgaggggcgcggccttgaggcacggtcccctctggaggcgggatctgggcgggcagtcgagagacgaggcccaatggaaaagaaaagcctgagcgctcgcgtccccacaggtcgccagaaacttggtggagcgagccaagggcggagtttgagaaaggggctgcgtccaatgagtggagcggtgagtacagcgcgtcgacggcggaggcgggaagggggcggaggccgaccgaaggcggctagggactggctgaagagggttagcgaaacgttagcggtcgggtctgggcagggggtggagctggttgaaggaacggggcagtcccctgaggagcggggctggttgaaacgctaggggcgggatctggcggagtggaaggtaccggtccggcccgataaggggtggagttaagtgaatcgttaagggtggagtcgaaaccggggtcggggccggggccggctgagtgaaagggtgggtgattatcccgggagataggccgaaagggcaggttcgtgaaggaatggggtctgggctgggcttagagggtctgggaatggggcttaggagagtagaaggggcggtgattggttggaaagggcaggccctaagacggactgtgtgagcccgggggctcattgctccgtgaaagggcaagaccagggaaagagaatcgtgtaaaaggggtggagtctagcgggccgggcggggccgggtagaatggccacctgagtggagggagaaggcctgagagaggcggagtttggaaggctgtggagaatcagatcgcgtaaggaatggaatctaatagagggggcggagcctggaaaagggcagagaggtggggtcctcagggcacactagccccctcacatacccacgctcctccccccacccccagaaccgcggcaggggccaagcctcctcaactatgacctcaaccggccaggattccaccacaaccaggcagcgaagaagtaggcagaacccccagtcgccccctcaggactccagtgtcacttcggtgaggccctagacccgccctgatgagggggagagggagcaagttggtcatgccctggactctgacccttctctctgattcacagaagcgaaatattaaaaagggagccgttccccgctctatccccaatctagcggaggtaaagaagaaaggcaaaatgaagaagctcggccaagcaatggaagaagacctaatcgtgggactgcaagggatggtgagcagggcctggctgcagtttagcctcgtatgacaatcaaaacccaaaggttccccaccctggacagttccctctgactcagggcctaaaatggatctgtgtctccttttttttttcctctgcaggatctgaaccttgaggctgaagcactggctggcactggcttggtgttggatgagcagttaaatgaattccattgcctctgggatgacaggtgaggctgggtcctccaggctgtctccaaaccacaaaaatacacacacttagagcccattagcaagaataaatcttttcttaccccagcctggatactggaagcagatgatttggggaggtagggctcacacttgaaagggttcttttatgtagctaacaaacatttattgagtgcctattgtgtgccaagagttggtgatacaaatgtaccaaacaacagacaggggtccttctctaggagcggattgatgagtaggagggcagatcattaaacagccaacagcagtatgaggtgtttaatgaagacagacttaagaccaggggattcaagggtgtataatagaggatcctaaactagtatccgggcttcccagaagcctttatagaggaagagacgtttgtactgaaacagaaggatgaaacctcccgtttgctttacttttcaaaaagaatcagcaaatccttttggctatatgttcaaaatatattcaccatctgacctctcctcaccacctccactgccaccatcatcatcactcacctagacttgcagaggcctcctccctggtcccctacttccaacctcacctctattatctgttcatgcagcaacctaaaaaaatatgtatgagttgatgtctttgttaaaatactttaaggaggccaggcatggtggctcacgcctataatcccagcactttgggggggccaaggcaggtggatcac

SEQ ID NO: 2622 - DNA, 6000 bp, Homo sapiens
tatttctccatccaccgctacgagcagggtaggttctggccccacctgaaggcctctaactggtccaccacaggtttcggccaaggccaaggatataccatcaatgtgccttggaaccaggtcagcatctacccacctctgcccccaaagtgaggcccagccccgcccttctgtcagcggctcgggacaggtggctgaacatcccccatcacactcctgtgtctgcaggtggggatgcgggatgctgactacattgctgctttcctgcacgtcctgctgccagtcgccctcgaggtcctggggatctggggtgtgttgggaggaggagtggccttgaaggttaggctgtgagggtaggtagcctcatggagtctgttcccccttcagttccagcctcagctggtcctggtggctgctggatttgatgccctgcaaggggaccccaaggtaaggcaggctccctggggcggcaggtgggttgcatggagccaggctgaccctccatgtccccccagggtgagatggccgccactccggcagggttcgcccagctaacccacctgctcatgggtctggcaggaggcaagctgatcctgtctctggaggtgagtgactcaccttcgtccctcagcctgtggatcctggagggcttaagaacgaagctttcaagtccaacaggagttcctggcccaggaattcacttactagctggacaaccttgcataagtcacttcacttctttgtgcctccgctttccttctataaaacgagcataatgtaatcacctcatatcattgtccagtgaattcagtgaggcacccttctaagttccttgttgcttgacatgtggtatgcactctcttattatcatcattattattattccctggtcatgtctggtcctttcctgatcccccttcacaactccttgccccagggtggctacaacctccgcgccctggctgaaggcgtcagtgcttcgctccacacccttctgggagacccttgccccatgctggagtcacctggtgccccctgccggaggtgagccccggtggaggaggggaaagcgggagcctcactgcccgcccacattccttgacatcatattttctccctgccctgcagtgcccaggcttcagtttcctgtgctctggaagcccttgagcccttctgggaggttcttgtgagatcaagtaggaagtggggtgtgggcctggtgtggggtggacgtgggatgagccctgggggagactgtcttcagacttcctctgactttactgggctgccttggtgggagagggtcaggccctctctctctccctgggccctggtttcaggcctcccacccctttttctgtttgggtcacctgagttccagagtatgacggggattcagattgagagggtaggacaaacgtggcctcccccttttagctgagaccgtggagagggacaacatggaggaggacaatgtagaggagagcgaggaggaaggaccctgggagccccctgtgctcccaatcctgacatggccagtgctacagtctcgcacagggctggtctatgaccaaaatatgatgaatcactgcaacttgtgggacaggtaggcatttggagggctggatgagtaggtgttgggggtccctccccctcaggcactaagcctctacctctcgtttccccactgctagccaccaccctgaggtaccccagcgcatcttgcggatcatgtgccgtctggaggagctgggccttgccgggcgctgcctcaccctgacaccgcgccctgccacagaggctgagctgctcacctgtcacaggtcagaccccggtgcctggggtgggtggattcccaggactgtggatgaggtctcaggggctggaacttgggtttcccctcctggggagctgctgcaggacttgagaggggctgaagtccctgtcttaggggtggggaccagggaggggacagaccctcctcactgtcctgcgggtgctcctctctgtgcttccagtgctgagtacgtgggtcatctccgggccacagagaaaatgaaaacccgggagctgcaccgtgagagttccaactttgactccatctatatctgccccagtaccttcgcctgtgcacagcttgccactggcgctgcctgccgcctggtggaggctgtgctctcaggagaggtgtgtcctctgtgggctggggagaggaggacctggggggaatggaaaaagagagccatctgctgtttctggaggctctgagagagtcaagcagggcctgaggaaaggggccatggggaggggcacgggagggggtgggcctagaggctgggggaataatggaaggaactggagaaagggaagggtggccaagtgcagtggctcacgtctgtaatcctagcgctttgagaagctgaggtgagctcaggaggtcaaggctgcagtaagccatgattgcaccactgcactctagcctgggcaacagagtgagaccctgtgtcaaaaaaaaaaaaaggtccgggcgtgatggctcacacctgtaatcccagcactttgggaggccgaggtgggcagatcacgaggtcaggagatcgagaccatcctggataacatggtgaaaccccgtctctactaaaaaacatacaaaaaattagccgggcgtggcagcaagcgcctgtagtcctagctactcaggaggctgaggcaggagaatggcgggaacctggcaggcggcgcttgcagtgagccgagatggcgccactgcattccagcctgggcgacagagcgagactccgtctcaaaaaaaaaaaaaaaaaaggaagaaaggaaggtgagggcaggctgtccgatcttagcaccctgctgcttcccaggttctgaatggtgctgctgtggtgcgtcccccaggacaccacgcagagcaggatgcagcttgcggtttttgctttttcaactctgtggctgtggctgctcgccatgcccagactatcagtgggcatgccctacggtaaggactccctggggaccccccaaatcctgatccttgtggggacctggatgctccccccagcccattgtttactcatgccccatggtccagctcccaggacttccttccccagaaagaagtaagggtgcagtccttacccagagaaggaccgaggatggagcctctcagtgcttatttagataggacccccagatcatgttacctgggcacttacaaaacaggatccagggtcccaccccagcatttctggcctatagcagctgcctcgacagaacccaggtctaggctcctgatgcatactccagaagacccacgaaccagcccccagcattagctgcccaaggcccagggtccagttccctagcaatgacccagaagagcccagggcccagccccgagcacttgctcaggcctaccgggcagcccttgggaaccaggatcagacttttctccttaactgataggacccagggtcctgccactcagcactaaatgcccctgcagaccccaggggtctagcccagccctcttccagggcgtgagtatcgtcggttactgaggtgctgtctcctccccaggatcctgattgtggattgggatgtccaccacggtaatggaactcagcacatgtttgaggatgaccccaggtaagggctgcagtcaggggccgcagtgtgatcagggaggcgggtgagcacctcaggggtactggagcccctaaccagccatggtccgcttcccaccccctccctggcagtgtgctatatgtgtccctgcaccgctatgatcatggcaccttcttccccatgggggatgagggtgccagcagccagatcggccgggctgcgggcacaggcttcaccgtcaacgtggcatggaacgggccccgcatgggtgatgctgactacctagctgcctggcatcgcctggtgcttcccattgcctacgaggtacagctcaggatagatcgcaggacgtatgtgacacgcctgtgcaggtggcagcctggacctgcctccttggcatgtgtgtgtgtgactaccatgtggctgatgatatgagacagcgcatgggtgtttaatgaggctaccagggcagttggtggctgtgatcaccttgtgtatttgtgcacagatggctgtacatgactgccttctctgtgtgacactgtgtgagtgactgtcttggctgtgtgtgtgagggccttctgactatgcaccaatggcccgtgtcctggctggatctgtgttgtatgtgcgtgccatcacaagtgcttgagtatgtgcgtgtgcgactctgtgcaggcaggtatttctcaccttttctctgtgtgatgggtgtgatactgtatgtcactaaatgcaaccatctctgtgacagcctgtgtgggaccttctggatgtggaaggctgtgtgtgacagcagtcactgtctggctgtctgccctggctgtttgtgtgtatgtctctgactgggaggtagctgccttccctctgtgtgagctaggaggctggtggcttgtgtatggctgactctgggagggagggaaagggtgtgagcaccgctctgtcaccctgggcgccggtgtgcatctttggatctgcatgtgcatctgactgtgcatgggtagccaggacagccttctgtgtgtgtacaactgtatgtgcaaataaccagctcttgtggacataccagagtgcatgtcgccgttgtggctgtgtggtgatggcatgtgtatgtgactgtgcaggatggctgtgggttattgtcctctttgagaaactgtgtgtgtgtacatgactagtgcagatatatagtactgatctatatggtactgtctgtgtggcagtacgtgtggctctgtgtgaccatcttctctgtatgtggttcttgcgttgccatcttctgttttggaagtgtgcaagcacctctctttggcactatgtatataaaaccctgtatcttgtgtatgtgtgtcccacgtttgaccctggggtatgtgtgtgtgaggacatgtctctgtctctctgtttttcatgtcactctcttgacgtgtcagtctgtctcatgtccccatctgtccctttttttttttttttgaaatggagtcttgctctgtcacccaggctagagtgcagtggtgcaatctcggctcactgccagctccgcctcctgggttcatgccattctcctgcctcagcctcctgcgtagctgggactacaggctcccgccaccacgtctggctaattttttgtatttttagtagagacagggtttcactgtgttagccaggatggtctcaatctgacctcatgatctgcccgcctcggcctcccaaagtgctgggattacaggcctgagccaccatgcccggcccccatctgtccctttctgccatctccatgtctctaagtctgcatctatttcttctacctctgagtctgtatttcttttcttcccttcttcattttcagtctctgcttttgtgtctcctagtctccaggttctgtgtctccatctctctgacttgcatctccatgtcttcatttgtccttttctccatgtctctgggtcgccatcacttactgcctaccaaaagcccctaccctcatgcttatacatctcttctctccctgcctcagtttaacccagaactggtgctggtctcagctggctttgatgctgcacggggggatccgctggggggctgccaggtgtcacctgagggttatgcccacctcacccacctgctgatgggccttgccagtggccgcattatccttatcctagaggtaactttctcttggtccctcttcccacagtgggagggtagtttggaaatgttggcaccatcactcaggacagtttcctgaaatctcctttgagtgtccctgcctgggattgttggcacatactgggtagtaataagaataacagcaacattaacagccttaattgagtgctcactatgtgcagagcactc

SEQ ID NO: 2623 - DNA, 6000 bp, Homo sapiens
actatatggaaagcatgtaaaagcagattgcctggcacatagtgagtacccaataaatgttaatactgtgattattgttaggcagacagaatcttagcattagcacatttcttaaatgagaataccaacctcctgtcagagtgaggcctgaggtacaatatccacatgtattaattgagaaaactgtgaagagaaatggcttgcccaactgacacaaacttaaatgtggagcttgtattagaactcaattttcctggcttccagtttagagcacttgctactacactagtgtttctcaaaatttattttattatcaataatatagaatattttaagtagtgtatggataaatatttctgcatttaataggtgaattttattgtgcattagggagaatacatactagaacatcaaacctgggatattatggataatatttcttagcatgattgtaatttttaaaatgtaagtcaatttttaaaacattgtaaaaatacatattaattaaataatagtatgcgtgacatttgaacatgattgaagactgtgaagccctgtgaattacttgaagtttgggaaacagaccatgaagcattttgccctcctgaggggtcctagggtaacattgttagctaggcaatattattatgacttaagaggtcttaactaatagaggctggttgccaggcaaccaccactcctccctcaggctcctccccagcctcccctccccaggtcctttacatcacaccacaccctgcccctcccttgatttttatctctgtgtgatgtatgagcatgctggcccctgacagaccttgttgagcttggttgcttggagaagtcagggtatcatcgtccattagtttatcttgggccccaggatatctatacccatatgccaatttttcctactcctcggcatgagtcattttttatcttaccactttccggtcctgatcttgctgtccttctgggttgtagagatctaccttgcacacacccctgtggctgcgtaaccagtcaatatcatcagacatctggaaagagaaagaaaagaaagctgaaatgcttatatatggtttttggaaaccgggtcaatttggataagaatctctggaggggttctgaaatccatttctgtgtttcatatataggtttaggctaggaactggtggggtgagcagtgggggacacattgagatgtttgaacttgatgcttaggatcattatcttttagcaaaatccatagtctcctttaatttagactccccacaccaagtatttggaatcatgagagtatgatgacctgggaatcaaatttaaaaggaaatctagtgactttggggattacatttagtgatttacttctacccaactctactaactaaatgtctctgatctccacatttctttaccccctcgagtaccttcaaaaaactccagctcacgttaccccctctaacttaattctagctaactccagttcaaccagtctttcccattacactaaagaaagtgaaattagataaatagctataacacatcactcagagccattggaaaatactaaagtcaatagcagtaaataaatagcccttttattaaaacaacatatacaatttcaatatatagaacaagattttgaatgctgagaaaacccagtctaataaccataaatataacaccgagagacagaaatctgagggaagaccagaccctgatccaataggatcaagtttaatttattttagaaagaaaaaataatctctgccaacttccttccaccatcaccccctgccaccacctcccaacccagtctggaactaaaagtaaaaaggaaatgacaaaagccagtgactgatttttgctacgtaagacctgagatttatgcttagaacacacagttaagagctcagtagacttgtttttggtatctggggcttgaatttgatttctttttaaattttaacaagagaaatcctttttgccaagtattagagggctattgaattccccctcccaccctccccactcccgctctcccttctgcccttcccctcccctctctccccactcccctccctccctcccctttccattccctccccctttctccccctcccctttctcccccttccctccccctccctccccttctctttctccctccttctttccttccaccccttctctattcccctacagcatattaataatagctattctctaatggctatcctttcacatgataatactacattcctgctctttaccatccctgcctccaaccaagatctttttgaactcttccttcaggaatctctgtgaaaccttgaaaaagttataggaaaagactcactctgaagagggagtttctttttttccaagagctacatagggaacactagcctagtaaaaaaagaggtggaggcatagagtccctcatgtgattcagaaacagcctaagtccaagtccaaaagaactgtgaaaaataaaatttatgaactcattaccttgatgatgaagttcttttagatgtttggctgaaaacgtgacacccagaagggagatgtgcccctttagatggaactgagaagtgccaagttcttgggcacctgcagttggctgccacccctgtcagctgttggaccagactgaggggccaggctttcccctgctgcctctgaccctggggtgtggcaacagagtttgttgggtcacaatgcctgaactgtcacaacctaagcaaaggtgggcatgttggcaaactcagaaacctattcccatcaaaagcacatcaggctgcctgtggtgcgacaaactttttctgttatctctatgagggtacacaccatttttctcacattttctctggctcacagtccatcaagatatcccttctcttttcatttcctgcgagacctccagaacaatctaatcatacccctactagagaatcagagttatattgcaagagatctttagatttacgtagaaacagagaaatgttgatcaaaatcttttctgggtatcccaaataaaagtatgaaaatagaaacttggaggctgcctcagcagcttctgtagtttcacctcaccattaagatgcccccttagctagtcaaaaagaagtcagatgtccctaccattgtagtatcagagtacgccatcatgtaggaccctggaatgatgttttcttgttgatttggatgctgtgatgactcttccagtctgcctcaagatactgcttttttcttcaactctccatgccctcctacagccttgactgccagctggtaccagagttacctcttcttgacatcaccgtttctatagagaacagtgacagcacaaagatggagggctctaaggattctgtgtgctctaagtggtctagcaggctctgaccttccctatgagaaataagttgtccagagaaaggctgatctagttgagacagggtctgtcttttacagactccctaggccatgaaaagacttaagctccacttaatcttttcaatctggccagtgctggtttgttggctgcagtatgtgttagagatttatccattacactttgagatgccttcatctcatcttactgagtttagccccagtttggaaatattatcccacaaccaaatgtctctcactctgcccaagtctcatctttccttgtcttttctccatgtctccactttaatactgcatgcatgtaaataaatgcatctgaattaacaatcagttgagatgatcccctaaaagagttccatattcttggttctacctccatttattctttttcctgttgcccctgagattgcatctctaactccgctatattattttgatcctgttagctcatggtgtcaaacagaaacagagcctggaatttgttagaggcggcaagacagattttattcaggccactgcagtagaggagagagacttctgatgaacagatctcaactccactgaaacaaaaggcagggtgtgctaaggaaaagtaccgaaggacattgagtgggggtgagcttggtcaatgtattggggcatctgtgtttgctaatgggtgcttattaaagttaggttccctatgttcacaatgtcaggtttataaagaaaaacataattaagaactataaagaaagaaatgaaagaaagtaaaatcaaaaaaagaaaagaaaagaaagctaagctcctaccttcccatagagacagggagacatggaccctatttttcttgatcattacattacaaagggatggcttccaggttgttgagaaagacagtcctgggttgtagaagatacatcttaaaagaagagagaaagaatttacaattgcaagttttctaaagtacatgctgtaaggaagggagtcagggcctgtagtcaggttttggcctgaacaaacagtaaattcttttggcagcaatgaactgtctcaggaaggcattttaaggggggctaggattgtcatactagggaaatggccttttggcagctttgaactgtctcaggaaggcattttaaaagggctgagattgtcatcctagggaaatggccttgagctgatagaaactacgctggtgtttgttcaagtctcttagtgtgtgtatgtattggggggcaggtggatgaaattgtgccgaaagttgcagttcttataggccaaagttgaggcctagctgagaagtgggcttagagaagcctgactaaagtttgatcatgaagagggtctttgttgcttttcctataccatccttttgtcaaggggcaacttttgatgattaaagacaaagttggagctcctgtgtctggctcatctctgtggaatatgaagcaaaggaagaaaatgtttacctattctccaagcacaagaaatcatatctctaagagattaaaaataaaacaaaacaaaaacaaaaacaaaaactctgtgtctcccagcccggaaaggaacaaccatgattcatgcctggaaaatgtcttagtaatccccagatgacaaagagagaactactatggatgattagagcactctcccagggcacctgaatcctgtcatcctggaggctaaccaggagcaggtaagggcagcatttggatgtgaaaccaatgagcaaaatgtaagggaagaatcaaggcagacctggctcagtcataggtcacggtacatttactgcctcttccttctcttctcgaggctctcaaattggtctgtactgagtagagggggtggagggcaggtgagggataagggatattcaaatagtcaaagtaaggaatatattgtattagtgtgtgaaggtgtgtgaatagtctgcacttaggtttgcctttaatagccaaatattgagatattaaacacaaaagccttggtcatcattttttttctaagcaccatcatctattttgtaaccttgtttattctacccaaacttcttctctttcacacaaacttgtgaataagagtgcaaatcaatactttaaatacactctcggtttgcatttggctagaaaaaactatgaagataataaaaatgggacctgcgtttataatataattatcatgaataatggcaaaaggaaattaaatgaagtgaaccatcagccttcatgaaatcactgtctgtctggtagtcttgctgggtgtcttccagcctcagatttagcctaccttttatgtgatgacacaatgaccatttagaaaatgggcagtgatgccaatgattatcagacatcatttactgtggaccaatataattgggaacaccacttctttttctcctgatttggttttcctgccatgagagtacacaatgacatttagagcagcttcatgcaaccatactaaagtgaaaaattagtcattttgaacatcttggcagtggaactgtataattacttctgtcaagtgtttgtgttttgtctgcattgtacatattttttctttcctatgagtgattggaggagtggagggggaaaataa

SEQ ID NO: 2624 - DNA, 6000 bp, Homo sapiens
tctctccccactcccctccctccctcccctttccattccctccccctttctccccctcccctttctcccccttccctccccctccctccccttctctttctccctccttctttccttccaccccttctctattcccctacagcatattaataatagctattctctaatggctatcctttcacatgataatactacattcctgctctttaccatccctgcctccaaccaagatctttttgaactcttccttcaggaatctctgtgaaaccttgaaaaagttataggaaaagactcactctgaagagggagtttctttttttccaagagctacatagggaacactagcctagtaaaaaaagaggtggaggcatagagtccctcatgtgattcagaaacagcctaagtccaagtccaaaagaactgtgaaaaataaaatttatgaactcattaccttgatgatgaagttcttttagatgtttggctgaaaacgtgacacccagaagggagatgtgcccctttagatggaactgagaagtgccaagttcttgggcacctgcagttggctgccacccctgtcagctgttggaccagactgaggggccaggctttcccctgctgcctctgaccctggggtgtggcaacagagtttgttgggtcacaatgcctgaactgtcacaacctaagcaaaggtgggcatgttggcaaactcagaaacctattcccatcaaaagcacatcaggctgcctgtggtgcgacaaactttttctgttatctctatgagggtacacaccatttttctcacattttctctggctcacagtccatcaagatatcccttctcttttcatttcctgcgagacctccagaacaatctaatcatacccctactagagaatcagagttatattgcaagagatctttagatttacgtagaaacagagaaatgttgatcaaaatcttttctgggtatcccaaataaaagtatgaaaatagaaacttggaggctgcctcagcagcttctgtagtttcacctcaccattaagatgcccccttagctagtcaaaaagaagtcagatgtccctaccattgtagtatcagagtacgccatcatgtaggaccctggaatgatgttttcttgttgatttggatgctgtgatgactcttccagtctgcctcaagatactgcttttttcttcaactctccatgccctcctacagccttgactgccagctggtaccagagttacctcttcttgacatcaccgtttctatagagaacagtgacagcacaaagatggagggctctaaggattctgtgtgctctaagtggtctagcaggctctgaccttccctatgagaaataagttgtccagagaaaggctgatctagttgagacagggtctgtcttttacagactccctaggccatgaaaagacttaagctccacttaatcttttcaatctggccagtgctggtttgttggctgcagtatgtgttagagatttatccattacactttgagatgccttcatctcatcttactgagtttagccccagtttggaaatattatcccacaaccaaatgtctctcactctgcccaagtctcatctttccttgtcttttctccatgtctccactttaatactgcatgcatgtaaataaatgcatctgaattaacaatcagttgagatgatcccctaaaagagttccatattcttggttctacctccatttattctttttcctgttgcccctgagattgcatctctaactccgctatattattttgatcctgttagctcatggtgtcaaacagaaacagagcctggaatttgttagaggcggcaagacagattttattcaggccactgcagtagaggagagagacttctgatgaacagatctcaactccactgaaacaaaaggcagggtgtgctaaggaaaagtaccgaaggacattgagtgggggtgagcttggtcaatgtattggggcatctgtgtttgctaatgggtgcttattaaagttaggttccctatgttcacaatgtcaggtttataaagaaaaacataattaagaactataaagaaagaaatgaaagaaagtaaaatcaaaaaaagaaaagaaaagaaagctaagctcctaccttcccatagagacagggagacatggaccctatttttcttgatcattacattacaaagggatggcttccaggttgttgagaaagacagtcctgggttgtagaagatacatcttaaaagaagagagaaagaatttacaattgcaagttttctaaagtacatgctgtaaggaagggagtcagggcctgtagtcaggttttggcctgaacaaacagtaaattcttttggcagcaatgaactgtctcaggaaggcattttaaggggggctaggattgtcatactagggaaatggccttttggcagctttgaactgtctcaggaaggcattttaaaagggctgagattgtcatcctagggaaatggccttgagctgatagaaactacgctggtgtttgttcaagtctcttagtgtgtgtatgtattggggggcaggtggatgaaattgtgccgaaagttgcagttcttataggccaaagttgaggcctagctgagaagtgggcttagagaagcctgactaaagtttgatcatgaagagggtctttgttgcttttcctataccatccttttgtcaaggggcaacttttgatgattaaagacaaagttggagctcctgtgtctggctcatctctgtggaatatgaagcaaaggaagaaaatgtttacctattctccaagcacaagaaatcatatctctaagagattaaaaataaaacaaaacaaaaacaaaaacaaaaactctgtgtctcccagcccggaaaggaacaaccatgattcatgcctggaaaatgtcttagtaatccccagatgacaaagagagaactactatggatgattagagcactctcccagggcacctgaatcctgtcatcctggaggctaaccaggagcaggtaagggcagcatttggatgtgaaaccaatgagcaaaatgtaagggaagaatcaaggcagacctggctcagtcataggtcacggtacatttactgcctcttccttctcttctcgaggctctcaaattggtctgtactgagtagagggggtggagggcaggtgagggataagggatattcaaatagtcaaagtaaggaatatattgtattagtgtgtgaaggtgtgtgaatagtctgcacttaggtttgcctttaatagccaaatattgagatattaaacacaaaagccttggtcatcattttttttctaagcaccatcatctattttgtaaccttgtttattctacccaaacttcttctctttcacacaaacttgtgaataagagtgcaaatcaatactttaaatacactctcggtttgcatttggctagaaaaaactatgaagataataaaaatgggacctgcgtttataatataattatcatgaataatggcaaaaggaaattaaatgaagtgaaccatcagccttcatgaaatcactgtctgtctggtagtcttgctgggtgtcttccagcctcagatttagcctaccttttatgtgatgacacaatgaccatttagaaaatgggcagtgatgccaatgattatcagacatcatttactgtggaccaatataattgggaacaccacttctttttctcctgatttggttttcctgccatgagagtacacaatgacatttagagcagcttcatgcaaccatactaaagtgaaaaattagtcattttgaacatcttggcagtggaactgtataattacttctgtcaagtgtttgtgttttgtctgcattgtacatattttttctttcctatgagtgattggaggagtggagggggaaaataaaggacttttaaagtctataaacattatcataaaaaaatttcagggggcaactgctaaagataagtggagtcttaggaatgttaggggttcttttataggcaggggcttaattaggcagctaaagttctgttccataaccttgcggtagaaaatgacttatggctaattttgaggggtgggcttggcttggcagtggctatttctggtcaggctcttcccttttataattatgaaatttccttcccctgatttcctagaacatttgcttattgtcaggataattcatctgacatttactaaatctggccttgtagagttaattaccttttcctattcctagattacctacattgcaagcctagaaggttatctatctctttttcattgcatccaccacaatactgggcacacaggtgggctcaagacacaaggttttggaatttttagggcagaaaacataattcagaaatcacagcgtcatgggatctgtaaaaatgaccaaaaaacttggttagctatctgagtgggcaggcttctttcccagagcagtaattgtcacactttggcgtgcatcagaatcacctggagggcttcagtttctcattctacgggtctggagtggggactgagaatttgcctggtactgtgtattacatgcattatctcaattcacgcacagccttatgaaatgcctaccactttaattataaatgactcgctggagcgcagaggccacgtgactggtgggggtgcttggcagcactggccacttccatcgtcttgggggtgggggtggcggggcgcgcgcgtgtgtgtgtgtggtgattagcatgccttttatttctttcagggtctggagatagaagagaaattccctgagaaaaagaaaagtagaaaggtatttactctgatcttctggccccatctggtggttttaagtctgactaaaaaaaaaaaaaaaaaaagcgctgattcgtgatctccccctgctggtgagaatggtggggtcaatccggccgcctctcgtaccagttgttctgaggtgcatttctgtggaagcatttccgtcattctgagacagttgggctgaggcggttggtcgcctctctctctctctctctctgttcctcatctacattttgattggtttatttttgtattgttttctttcagtttccgataggtggagaacattctgctaatagcttttcttccagtccatttgtggcttgttaaaggtacaacatgtattgtcagtcgtgacgagagctttttgccttatatattgattatatattataaatatagaagtatatcctgtgtcaggctggagatgtgggaggaaaactggctgagggaactagcctttaattagtttatttcctccctgtcaaaccaacaaacttttctggaacatctgaaaaaataacctttaaaaagtacttcaggctgaccgtggtggctcacgcctgtaatcccagcactttgggaggccggggcgggcagatcacctgagctcaggaattcgagaccagcttgaccaccatggcgaaaccccgtctctactaaaaagacaaaaattagccgggcgtggtagcgcgcgcctgtagtcccagctactcgggaggctgaggcggaagaatcgcttgaaactgggaggcagagttgcagtgagccaagatggtgccactgcactccatcctgggtgacagagcaagactctgtctcaaaagaaaaaaaaaacttaaatatacagttacttggtgacaaaatgtttatcctgccctgcagatagtgtatcagtgaatgaatgtattaaacattacagctgggtgcagtggctgcggcaggaggatggcttgaactgggaggcaaaggttgcagtgagccaagatggcgccactgcactccagcctgggcgacagagtaagactcttgtctcaaaagaaaaagaattaaatagccaggcgcagtggctcacgcctgtaatcccagcactttgggaggctgaggcaggcggatcacgaggtcaagagatcgagaccatcctggccaacatggtgaaa

SEQ ID NO: 2625 - DNA, 4366 bp, Homo sapiens
attttaaaatacccagctccaccccttcctgttaggctttcgcgtgtcgcagctgtgcacgctgattggtcctctgctggccaatcaccactgcacttcatgacggctgtagttttcaaaatcccaactgggctggtggagggtcgcaggtgtcaggttgagacggactcgagtcgctatagtaaggagctccgttcatttccttggcctctcctggtctaggggtgcgtcgatggtctttgctgtctgtcctcgatctcggtgtgaggtaggcgcctttgggcaagtactgctggctccagcgtccggctctgtcgcctgccagtgggtccttgggcgtcactccagccccttgctgaattctgttgctgggatgcgcggcgttcctgtaaggaaacttttcaatctcctgtcgatcagcagcctgtggagtgagctctgtacaagattgggcagggggagtgtttgttaaggagtgagatggcaaagcaaatgagactgggtcccagcttttagatggagcaattagtacacgtgcctgaatcagagtacttttacaaaacgtcttttcacaagtgaaagtgtgcaggattaatttcatctacaagtgcagagggatcagacatatttaagtcatagaatgctacttgcagcatgtcttttgagctacaggttgaaggatatgaagggaggatggacacgtgtcctcactctattgttaaccctttatcttcactggctcttttctgttcccaccggcaaccaccttcagctttggctttctcaccaccctctgctacgcttagaatcgtagaagatcaggtagaagggaccctagaacagcggcgcttaaatcttaacgtgcataaaaatcacctggggatattgttaatttgcagattttgatttgataggtctagtttggggcctgaggttttaaattgctaacaaatttccaggtgatgctaatgttgcttgtccattgaccacattgaatagcgaggaggctctagttccactgcttcgttttattgggtgggaaaactgggtcccagagagggaaagggacttgcccagtgtcacccagccaactaagagcagagccagaactagaccttaggcatccttcccagcccagtgctgttttattgacacaatgctgtgttctctccccagagccttgctgtctgtaacctgcctttatataaaaaatgaagttgctactacttcctgtagactgttttgatcagcttagccctgctgcccctttgtttgtttcagcaccagccctgggaggtccagtggagtctgcaacacttaccagtgtgtatgtaggggacatggaaagtctgaaaaggggaaaggattctaattttcttgcccaaggctcagggttctgtaggtggcagaagttgagagtgttccgcagagagtgtccttttatgaaaggatctttttgatagtgtcaatcccctctcctccccttctccctgggaaaattagtttacctaagtcagtgcatctgtccctcaatgcaaatgattagtgttcacgataataaatggggtatatgaccatcatttaaataaccttattttctctgagatttagttaacctgtatgttatcagctgagagttttctagcctgtgggctccgtatttctttttccttttaaaaggtaaatgtttcagagtgtgagtctttggtcatccataaaaaaaaaaattatgaggcgtaaataataatagtggagtaagtgattttcatacagtgcagttaacagtgggtgcacccaatttagctttattgctgcttggctgaggtttgaggaatgagatggaatataggtttggatttgatagaagaagaggggagtaagacagtatttattaaatgcctgccatgcatcaggttttgtacatgtaaatttgcatctgagccacacaagtcctctgcaagtaagtggtgttatagctgttttgaaaatgaggaaactgaggctcagaaatgctaagttggctggcttagaagtccagttattcaaactccaagacctgtgctcattctacctcctcatactatggcctttcactgttttggaatatttttgagtgtgatcgaagagacttcatggtattttagaaactgcccgggaaaaagctgggcagtctatgccccttaatagtttgtcctgggtagtaagttacttaactcatctgagactgtaaaatagaattgtacctgccttgcttagccttatggttttgttgtgagaatcaactgaggtaacatgtgaatgcatatacttatactggcttttcctgacctacaaaatgtttcatccttctccatccaaagcgaaacccaaatcaggctttctcctttcttaaactttcccctcaagctgcagacttttctgtttccttttcttaccagcctggccccagcctagcttttcagcctcattttaacccctccccaacatgttatttatgctccctactccagacaactaggacatccctgaattctgtatgttcatgcctctgcctgggctcggctttctttgcctggaaacctcccagtcaacttgggaacctgtttgtcattttaagtcctgatcacatgttacttcctttgtgaagccttcctccagcccctgtccccaacaagattactggctttccattatgtttcttttttcttttcttttttttttttagtttggcatgacagacacatataaattttattatgatttaatcattatttctatccttttccttgaacaaagtctataaaagaattttagttgtatttttccaggtagttggattttttaaaaaacattttgcctctatcaaaatacttcaggaatacatttttagcagtcatattaagcatcacagacacattatcaacctttacttagatttagccatatattttattggtttctttgctcaactgcttacttttcaactgttttctcatttttctgtttctcctccatcttcctttctcttccccctactccttcaccatcttcgtccttaggtaattttagtttgccctcacatctgcataattggtaaagtatagaattctaggtgaaaaatctttttccctagaaactatgtaaacggtgtttcactgccttctgtcatttggtgtgaagttactaatcattatgtttctatagcacttagtttgcgctgctataaagtgccatggactgggtggcatttagttctcacagttctggaggctgggaaatccaagatcaagttcttatgtcaaatgattttttaataagttagtttattttgctataatctcatcttttgaattttttgttccttccaggtgtctggaactggattacagtttcttctgattgaacgcagcctttgaatactgcctggcctatcgcgaatacatgtgtgtgcagttattgttttctctgtagggtcataattgctttgccaggaccccatgccttttaagaacattggctctaccagcttgcctccatactatatgagctgtcatgttcttccttgttttcaatgcaaaactcctatgtaatttgtccccagtgttgctaggcctaaactaggggctagacaacatcccagcgttcacagaggatggtaggcactgtgcttggctttttacataaagtgtctcatttaatttgaacaacaccctgcagaggtaggtatacttatctccattttacagatgaggtaactgaagcccagagattttaagtcagtcacttgcctgaggttaattgtgataaaaccaagatttgaatccagatcttcccaacatcaaaatctgttttctcctagggatgctatagatagactgggttttctcaagaattttcagagaatttatcgtgtttctggtgaatggtgttaaagagcctctttctgattacagccctgccttggacaagacgcagctgaatctctaagtgatgctactgccactaccaccccagagctccaaacctgtgcctaagaaatctcagtccagcaaaattgtgcccagtcatcatgacccatctgaaaaggttagagcaagctgtctttcccaacaatatctttggtagtctcttcctgtgttggctcagtacctatcctcacctgtgagtcttttgaaatatgtctggtttaacctgagaaagtggggaggggtggcagcccttgtattggagaatgccagcaaattagaacttggggagaaagtatggactcttcattcccataaatgcagggctcaaatgaaggccaccctccataaccctcaaaactgaacaacactcagtcctcattaatgatcatgtctatatt

SEQ ID NO: 2626 - DNA, 6000 bp, Homo sapiens
cttggaggacctcttacacacttacaaaacatttcacccaaaaggagcagaatacacattcttctcctcagcacatggaacattctccaagacagaccatatgttaggccacagaataaatctcaacaaatttttaaaatattaaaattatatcaagtatcttttctaactacaatggaataaaacaatagaaataaataaccagaatttgaaaactatacaaatacatgaatattaaacaacatgttcctgaatgaccaatgggtcaaggaagaaattaagaaggaaatttttaaagtttcttgaaacaaatgaaaatgaaagcacaacataccaaaacctacagaacacagcaaaagcaatactaagaggaaagactgtagcaataaatgcctaagtcaaaaaagcataaaaacttcaaataaacaacctaaaaatgcaccttaaagaagtagaaaattaagaacaaatcaaaccttgagttagtagaaggaaagaaataataaaaatcagagcagaaataaaattgaaactgaaagacaatgcaaaagatcaattaaacaaaaagctggctttttgaaaacatgacaaaaatctacaaaccttcagctagactaagagaagactcaaataaataaaatgacagatgaaaaattagaccggggtgtggggggcaaggggagggagagcattaagacaaatagctaatgcatgtggaacttaaaacctagatgatgggttgacaggtgcagcaaaccaccatgacacacatatacctatgtaacaaacctacactttcttcagttgtatcctagaacttaaagtaacatttaaaaaaaagaaaaagaaaaatgagacattataataacacagaaaataaaaaaattgttacagatgattatgagcagtgccaataaatttaaaaacctagaagaaatgggtaaattcctagacacatacaacctaccaagattgaaccataaagaaatagaaaacctgaacggaccaataataggtaatgagatagcaatggtaataaaatatctcccatcaatgaaaagcccatgatcttgtggctgcactgctgaattctaccaaaaatttaaggaagaactaatacaaatcctactcaaaccattccaaaaaatcaaataggagggaatgcttccaaactcattcttggaaggccagccttattcagatgtcataaccaaagacaccccaaaaaagaacattatacgccaatattaccaataaatatacatgcaaaaatcctcaacaaaatactagcaaactgaatccaacaacaaatttcaaagatcattcacatgatcaagtaggattaatcttagggatgcaatgatggttcaacatacacaaatcaataaacgtgatatatcacataaatagaataaagtaccaaaaccatatgggcatttcaatagatgccaaaaaaaattcaatgaaatttaacatcgtttcatgaaaaaaactctcaacaaaatggatatagaaggagcatatctcaaaagaataaaggtcatatatgacaaacacagctagcatcatatgaaatgggaaaaaacctgaaagccttttgtctatgacctggaacaagacaaaatgactgcttttaccacacacaaaaaaattagtttcatggggtacatgtgtgggctttttacataaatacactgcataatgctggggtttgggcttctactgaacccatcacccaaatagctaacatagtactcgataggcagtttttcaatcattcctctcttcctccctctttttggaaatcctagtgtctattatttacatctttatgcccatatgcacccattttttgcctcccgtttataagtgagaacatgcagcatttgattttctgtttctgcattcattcacgtaggataatagccttcagctgcatcgctgatgctgaaaagggcatgattttattttctgtggctgtgtagtattccatggtgcttttaccacttttttttttttttttttttgagacggggtctcgctctgttgcccaggctggatggagtgcagtggcaggagctcggctcactgcaagctctgcttcccgggttcacgccattctcctgcctcagcctcctgagtagctgggactacaggcacctgccaccacgccaggttaatttttctattttttttttttttttttttggtagagatggggtttcactgtgttagccagctttcaccacttttattcaacatagtactggaaattctaacaagagcaattaggtaagagaaagaaacaacacccaaattgggaaggaagaagttaaattctctttatttgcagataatatgattttatatttagaaaaaatctaaagatcccaccaaaaacgaactgtaactaagaaactgattttatttataaaaccaacatacaaaaatcagtagcacaaatgccaactgtgtaaaaaaagaaatcaagaaagcaatcccttttacaatgactacaaaatataaaatacctagaaataaactaaaccaaagaaatgaaagatgtctgcaataaaaattataaaacattgatacaaaataaagacaacacaaaaatagaaaagtatccatgttcatgagttggactaattaatattgttaaaatgtccatactactccaagttatctacatatacataaactcaatctctgtcaaaacaccaaagacattctttatggaaacagaaaataaacagtcctaaaattcatatggagctacagaaggatcagaatggccaaagcaatcctgaagaaaaagaactaagctggggcatcaaattacctgacttcaaattatactataaacctatggggacaggcgtggtggctcacacttgtaatcccagcactttgggaggccaaggcgggcggatcacgaggtcaggagatcgagaccatcctggctaacatgctgaaaccccgtctctactaaaaatacaaaaaaattagcccagtgtggtggcgggcacctgtggttccagctactcgggaggctgaggcaggagaatggcgtgaacccaggagaaggagctcgcagtgagccaagattgcaccactgcactccagctgagcaagactccgtctcaaaaaacaaacaaacaaacaagcaaacaaaaaacctgtggtaaccaaaacagcatggtactggcatatgaatagacaccacaaaatagagaactcataaataaatctatgcatttatagtcaacttattttcaaaaaaggagccaagaacacacactatagaaaggacactctctgtaataaatgttgttgggaaaactgggtatccatacacagaagaatgaaactagacatatctatctctcaccatatacaacactcaaatcaaaatggattaaagacataaatctaagacctgaaattgtgaagctactagaagaaaactttgggaaaaagcttcaggacattggtctgagcaacgatttcttgagtaagacctcaaagcacaggcaaaggaaaaatgggcaagtgaaatcacatcagctaaaaagcttctgcacagcaaaggaaacaatcataaaatgaagagacaacctaggtaacaagagaaaatatttacaaagtattcaactgacgggattaataataaaaatatgtaagaaattccaacaactcaatagtaaaaaatcaaataatctgatttaaaaatgggcaaaagagctgagtagacatttctcaaactaagacgcacaaatggacaacagatatataaaaagtattctaaatcgctaatcatcaggtaattgtatatcaaaatagcaatgagatatcatcttaccccagttaaaatggctattatcaaaaagacagaaaataaaaactgctggtaaggaagtgaagaaagaggtatccttgtaaattgctcgtggggatataaattagcatagccattatgaaaaacagcgtggtagttcctccaaaaactaaaactacaaattccctaagatccagcaatctcactattgggtatatatccaaaagaaaggaaatcagcatatcaacgagctatctgcactcacatatttatttgcagcactgatcacaatagacaagatatggaatcaacttaactgtccatcaataaataaatggataaaaaatgtgatatatatatatatataataaaatattattccaccatagattaagattaacctaacacttatttaacttttcagatgttagccaacatattgtttttattgtacacccatttggtttgttgtcctacaacatgtaactgaaaacatcttacttgatatagcaatctaatattgttgattattttcagaattataggatactgtgaaaaactgtaactcacaaaaaaacacacaaaaattaaaaatgacttcactttatgcgaaatagataaggtttgttaagtattgtaatcacattcaaaaataactctttaagcttaaaataagccaatacttcttcaaagcaaggtctccaaatctaaaatatgcctacataatgctttggagaaacacttaatgtatgtattcgtgagtgtgtatgcatatacagagaattatatctgtgagttatgtgattggatagaggtgtgtatttggaattaagaatctatggataggaatttctggaactgtacacagaattcatagttttatacatgtgcatgtgcttggagatatatatatatatacatacatacacatttgcatatggtcgtaaaggattcatgtctccataaatgtatacacatggtatttctatgttaatttgtatgtttccaaagaatgtgagaaatgtctgaaagatggaaaacagatggagcaagagagctgaggggaggggctagagagcttgaaggatccagccagcagagacaggaagagagaaaaggccacctacaggttccactgttgtgaattgtggaaagggaaggaggagcccaggaggggccccaagaaaagaaaggcagatctgctctgtgattagaatggaagacatcactactaagaggaaactaacactgtagtcttgtgcagaaaaagggcagagactacagccactgcatcagggactggtggcagcccaacgtggctgaggggtggccgccaccaacagggaggtagacggccagcgagcgaagcgctggggacaccgctgcagtgctctttgcctgtctcgccgcgctcctacacacgctcctcatctatggatcctaccctccccgctcttgcaagcagtcactcagcgagtcgcctgttgaccctccttcgccacaggctcacagcagaggcagcatcgaggtatccgatttcggcacgtgaggcccgcgatccccggcggtggacgccaggcagggcaaggccattagtgggcgccagaatggagagggggatgggaaggaatccagcaggagacatggggtggagttgggcgccaggcaagggtggggtgggggagtgcggtggacgacagggaaagggggtaggaataggagccagacaaggatttgaaggtgagcgccaggaagcaagggaggtaggtaacagggaagtggttaggataggcagtgggggttacagacagcaccagaggcactcagggcaggagggtagtgggtgctggtcaaggccgctttgcaggggattgggagtggatgctagtggcagtaaagggtaaagggagggcagtgggctctgagctaggaggaggtggcccagccacttctgcagagttcctaaccccagacagctctactgcaccaccccagcccttccccacagcccaaaggaacttaagagggagagcactgcgggcatgcagccaggatttccagcattgcttccaggctcctaggggaaacttaggcactagcgcagactacatccagacatggctatagggaaaagtttgccttgtggcacactgggtgtgtct

SEQ ID NO: 2627 - DNA, 6000 bp, Homo sapiens
ccgaggggccagcttgtaacctgtggcatacctgagtaaggaaattgatgtagtggcaaagggttggcctcattatttatgggtagtggcagcagtagcagtctcagtatctgaagcagttaaaatgacacagggaagagatcttactgtgtggacatctcgtgatgtgaatggcatactcattgctaaagaagacttgtggctgtcagacaaccgtttgcttaaatatcaggctttattacttgaaggaccagtgctgcaactgcacacctgtgcaactcttaatccagccacatttcttccagaaaatgaagaaaaatagaacataactgtcaacaagtaattgctcaaacctacaccactcgaggggaccttctagaggttcccttgactgattccgacctcaaattgtatactgatggaagtttctttgtagaaaaaggactttaaaaagcgtattatgcagtggtcagtgataatggaatacttgaaagtaatcccctcactccaggaactagtgctcagctggcagaaataatagccctcactcaggcgctagaattaggagaaaggaaaagggtaaatatatatacagactctaaatatgcttacctagtcctccatgcccatgcagcaatatggagagaaagggaattcttaacttctgaaggaacacctatcaaacatcaggaagccattaggagattattattggctgcacagaaatctaaagaggtggcaatcttacactactggggtcatcagaaaggaaagaaaagggaaatagaagggaaccgccaagtggatattgaagccaaaagagccacaaggcaggaccctccataagaaatgcttatagaaggacccctagtatggggtaatcccctccagaaaaccaagccccagtactcagcaagagaaagagaatggggaacctcacaaggacatagtttcctcccctcaggatggctagccactgaagaagggaaaatacttttgtctgcagctaacccatggaaattatttaaacccttcaccaaacctttcacttaggcattgatagcacccatcagatggccaaattattatttactggaccaggccttttcaaaactatcaagcagatagtcagggcctgtgaagtgtgccaaagaaataatcccctgcactgcaggccatacaaatcccctgcactgccaggacacacatttcaatccctgtatctttaacctccttgttaagtttgtctcttccagaatcgaagctgtaaaactacaaatcattcttcaaatggagccccagttgcagtccatgactaagatctaccgtggattcctggaccggcctgctagtccatgctcggatgttgataacatcaaaggcacccctccaaagaaaatctcaatggcatgatgcctactatgccccaattcagcaggaagcaattagagcgatcatcagccaacctccccaacagcacttgggttttcctgttgagagggtgtgactgagagacaggactagctggatttcctaggccgaataagaattcctaagcctagctgggaaggtgaccgcacccacctttaaacacagggcttgcaacttagctcacacccgaccagtcagctagtaaagagagctcactaaaatgctaattaggttaaaacaggaggtaaagaaatagccaatcatctatcacctgagagcacagagggagggacaatgatcgggatataaaacctagacatttgagccggcagcgacaaccccctttgggtcacctcccattttatgggagctctgtttcagtctattaaatcttgcaactgcaaaaaaaaaaaaagttaaatgaacaacatcttcaagaaatataagattgtgtaaagcaaccagatccgcaatgcatggccattcctgagggagaagaaaaagtaagaaatttggaaaacatatttgacggaataattcaggaaacatttcctgattttgttagagttgtagatatcccgataccagaaattctgagaacacctgtgagatattacagaagattaatatcatcaaggcttataattatttgattatccaagttcaatgtgaaaaaacaaatcttaaaagcagctccattgatgggcatttgggttggttccaagtctttgctattgtgaatagtgctgcaataaacatacgtgtgcatgtgtctttatagcagcacgatttataatcctttgggtatatacccagtaatgggacggctgggtcaaatggtatttctagttctagatccttttgatagactggattaagaacatatggcacatatacaccatggaatactatgcagccataaaaaagatgagttcatgtcctttgtagggacatggataaagctggaaaccattattctcagcaaactattgcaaagagaaaaccaaacaccgcatgttctcactcataggtgggaattgaacaatgagaacacatggacacaggaaggggaacatcacacatcggggcctgttgtggggtggggggaagggggagggatagcattaggagatatacctaatgtaaatgacgagttaatgggtgcagcaccccaacaaggcacatgtgtacatatgtaacaaacctgcacattgtgcacatgtaccctcgaacttaaagtataataataaataaaaaaagaaaaaaaaagcagctacagagaatcatcaaattacctatgatggaaatcccactagtcaaacagtggacttctcagcggaaacctaccaagccagtagagattgagagcctgtttttagcctctgtgaagaaaaaaaaaatgccagtaaagaattttatatcctgccaattaagctttataaatgaaaaaacgtaaagtacttcccagataagcaaatgctaagggaattcatcattgaaccagccctacaagaaatgctcatagaagtactaaatatggaaacaaaaaaatgacactgacatcataaaagcacatgtcacatgtgcacatgagcaaaactcacagatcttatctggcaattacatgattgagactacaaagcatatagctaacatcagtgtgacagaaacagaacctcatgtatcagtactaacattgaatgtaaatggcctaaatactgcacttaaaagatataggctggcatattggatgaaaaagcaagacccaactaactgttgcctaagacacccacctaatggttacagacaaaaagcaaaagggggaagaagatgtatcacgcaaatggaacagaaaactgagctactctttaaacaaaagtaaacaaaaaacaaagaagggcattatataatgagaaatataactatcctaaatatatatgcacccaacactggaagaccaaattcataaaacaaatatgactagacctaagaaaatagaaagcaatacaaaaatagtgggaaacgtaaataactcactgacaatactagacagatcacgaaggcaggaaatcaataaactctggacttaaattggacccagaccaaatgaaccgcatagatatttacacaacatttgacaatgttatgtaaatgacagaatatacattttcttatctgcatatagaacattctcccaaattaactacatgcttggccatatagcaaggctcaatacacttgaaaaaataataattatatcaagtatctaattggaccacagtgggataaatgtagaaatcgatatgaagaggaactctcaaaacaacacaaatacatgggaactaaataacttgctcctgcatgacttttgggtaaacaatgaaattaaggcagaaataaaataatatttttgaaacacaaaaatggggacacaacataccaaaactcctgggatgcaacaatagcagtattaagaggaaaaatcatggcattaaatgccttcatccaaaagagagaaaaatccccaactaacaacctaatgctccacttcaaggaagtagaaaaacaagaaaaaaaaaaaaaaaacactaaacctaaagctagcagaataaaagaaataactaacaccaaagcagcactaaatgaaattaagattaaaataattatacaatcattaaaatgaaaagtttgttctttgaaaggatagacaaaattgatagaccaccaactagattaattgagaagacagctgactcaaataaacacaatcagaaatgatagtgttgacattacaaccaatatcacagaaacagaaaagatcatcagagactattatgaacacaaactagaaaacctagaaaacatggatacttcctggacacatacaacctcccaagattgaaccagaaagaaatggaaatcctaaacagaccaataacaagtaatgaatttgaatctgtaatacaaaatatccaacaaaaatggcccaggaccagattgattcacagctggattttaccagacatacaaaaaacttgtcccaatcttacttaaattatgccaaaaaatcaaggaagaacaattcctctctaactcattctatgaaagcagtatcacctgatacaaatattatgcaaggaaagaataaaaaaaccttacaagctaacatacctggtgcatactgatgcataaatccacaataaaatattagcaaatttaaacaaacagtacatcaagccatgtgggtttgataccagagattcaaggatggttcaacatatgcaaatcaataatgtaattaaccacataaacagaataaaaaacaaacactacatgatcatctcaattgatgaagaaaaacgacttgataaaatccaacatttcttcacaaccaactaggcatttaatatacatacctcaaattaataaaagccatctatgacaaacccatagccaacatcatactgaatgaggataaggttaaagcattcctcctaagaactgaacaggatattggtggtgtccatcgtgggcagcagactaataaaggccatggcaccagcagaaatcctgaacaggaaggagatctccgcacaaataagggcgagactgaagaatcaagtcactcagttgaaggacaagtacctggtttcacaccaggcctggcaatattacaggttggcaacagagatgattccaatctttatataatgtgaagctgaaggctgctgaagagattgggatgaaagccactgacattaagttaccaagaacaaccacagaatctgaggtgatcaagtacatcatatctttgaatgaagactctactgtacacgggttcgtagtgcagctatctctagactcagacaatacactgaaggagtgatcaatgctattgcacctgaaaaggatgtggatggattgactagcatcagtgctgggaaacttgctagaggtgacctaaatgactgtttcattccttgtatgcctaaaggatgcttggaactcatgaaagagacaggggtgcagattgccagaaggcatgctgtggtggttgggtgcagtaaaatagtcagggccctgatgcgtgacttgcttctgtggaacaatgccacagtgaccacctgccactccaagactgccaatctggatgaggaggtaaataaaggcgacatcctggtggttgcaactggtcggcctgaaatggttaaaggggaatggatcaaacctagcaatagtcatcaactgtggaatcaattatgtcccagatgataaaaaaaacaaatgggagaaaagttgtgggtgatgtggcatacgacgaggcccgttcctggtggcttagggctcatgacggttgcaatgctcatgcagagcactgtagagagtgccaagcgtttcctggagaaatttaagccaggaaagtggatgattcagtataacaaccttaacctcaagacacctgttccaagtgacattgatatatcacgatcttgtaaaccgaagcccattggtaagctggcttgagtaattggtctgctgtctgaagaggtagaattatatggtgaaaca

SEQ ID NO: 2628 - DNA, 6000 bp, Homo sapiens
tcaaactcaattcaaattcatagagccagtttggcaaaagacctgtggtaggggcgtggcacccaagtagaagagtgggcggtggcagtgaaagtcaagagagccaaacccctatgaccttgaagaggaaaaaaaacaaattgtgaatggggggacatttgagaaaataaactctggggtttcaaactgggagaaaagcctgtgtcttctaaatcctgccattatctgtttgtagcttacagctacggtggtttctgggagcctcctattaatcttgtttcctgcccaatgtctttttattttccaagaccatcttgctaattctgtctcttgactaatgttattttgcaacattttcacagctgaacaaccctgacctctctatctgcatgctttaaagtcatgatggtgtttttaccatcccaccaatcctttagctcgtcctcctaaattatctggtcctatgacgtgtggtcatttttatctgtccaggatttcaaggtgtactctcaacagtaaaggctccacaaacatccgttgattgatagtagagtttataatctagttggggagacaatatgccctcatgaaatgaaaagccatgtaagcagaagcacaaagttaaagaatacaagccgggcgcagtggctcacgcctgtaatcccagcactttgggaggccgaggcgggtggatcactgaggtcaggagttcaagaccagcctggccaacatggtgaaactccgtctctactaaaaatacaaaaatcagccaggtgtggtggcgctcgcctgtaatcccagctaccagggaggctgaagcaggagaattgcttgaacccaagaagtggaaggtgcagtgagccgatatcgcaccactgcactccagcctgggcgacaaagcaagactctgtctcaaaaaaaaaataaataaaaaataaaaatacaaactgagttcatagaggttcaggagatgcaaattggagaagtggcctgtcaggttggactagtcaggaaaagtttccaagggcaggttagttttgagctttgaattgtaaatttaaggaggtgatggacatgagttggtggagaggtggaccttttcaaacaaatgcacaaagagagacaatgcaagatttaactcaggccaggacaggtgcctgccccaccctgccatttccctgtctcagtaactctgcatgatctgccatcatagctgtttcagttagaagagatctccttgtgacctagtgccacaaggctctctcctctaccaaattcaccactcatgcagcacttatcaggcacccttagctggggtgaaggaaaaaggggcatgtgcagggaatgtttgcaggcatcgtgagcaactatgtctcatctctctagtctggacctcagatgggaatatatggccttttgtatacacctaggtaacaggtggaggacaaatgcatgttggagcagaagaaggcaggaatatggagaaccaatatggctattttaccatgatcaggctaatatcactttggaggcccaatgtgctgccaccgctgaaaaatcctgggttgcatggatatccttctgcacaggaggaaggccgcatcatcacagaacacaatagaaacactgcaagtggcagacaagccaaattacagtccctgcccctcagaggttgctgtctaacagttggaacagggccaggcaaaaaatgcataggacatgtttatttaaaagttgttaaatgtccaaatgctatttgtgatacttcatttaataaatgatatttgccgagcactgtggctcacacctgtaatcccaacactttgggaggccaaggcgggtggatcaccagaggccaggagttcaagaccagcctgaccaacatggtgaaaacccatctctactaaaaatacaaatattagctgggaatggtggcaggcacctgtaatcccagctactcgggaggctgaggcaggagaatcgtctgaacctgggaggtggaggttgcagtgagccgagattgtgccattgcactccagcctgggtgacagagcgagaccctgtctaaaaaaaaaataaataagagctcacagtttactgggagagacagataagtaaacaaataattacaatacaatatagtttgtgctatataacataagactgcacaaagtgcttaggaatgcagaaaaaaaaggagaactaatcacacctaagggagacagggaaggctgaataggagttttccaaaataagagacgtggagaggaatgacaagagggatgatatcccaggatgcagagagaaaggtataaaagggcatggtatttccaggaaatagtgtgaaactctgcttgtaacttagtgtgcaggaaaggtgtgaagtggcctgaatctgaggagcctggcatgccttgcgagggaatttgaactttatcacacaggcaatggggaaaatcagaggaagatttaaccagggaaattacatgatcaaaaaaacaaaatttatagccaggtgcggtggctcatgcctgtaatcccagcactttcagaggccaaggcaggtggatcacttgaagtcaggagttccagaccagcctgagcaacacggtgaaaccccgtctctacagaaaatacaaaaattagctgggcgtggtggcacatgcctgtagtcccagctactcccgaggctgagatgggaggattgcttgagtgcagcaggtcaaggctgcagtgagccaagatcacaccactgcattccagtctgagtgacagagcaagaccctgtctcaaaaaagaaggaaagaaggaaggaaggaaggaaggaaggaaggaaggaaggaaggaaggaaggaaggagaaagaaagaaagaaagaaagaaagaaaaagaaagaaagaaagaaagaaagaaagaaagaaagaaagaaggaaggagaaagaaagaaggaaggaaggaaggaaagaaagaaagaaggaaggaaagaaagaaagaaattatacgatcgcatgtaagttatataatcccagttctgcctcgttgggcaagtcaatctctgagcattgttagtgtcttcatctataaaatgcggataatagtggtacctacctcatggggttgaattgaggagtaaatgattgaggagtaaatgaactaatgttcgtaaagcaatttgcacagagactggcacataataagggctccataaattttagccataattaccagacatgtttcttagaacggtaaccttgctggcagctctgaatataaactgtagtgaggtaaagactgatggaaggagatccaattaagatgatactgcacctttttttttttttgacagggtgttattctgtcacccaggctggagcacagtggcatgatcttggctcactgcaacctccacctcttgggttcaagcgactctcccacctcagcctcccaagtagctgggactacaggtgcgtgccccacaccaggctaatttttctatttttagcagagatgggtttcaccatgttggccaggctggtctcaaactcctgacctcaagtgatccgcctgcctcgacctcccaaagtgctgatattacaggcgtcagccactgcacccggctgatcctacaatttaaatgcagttataaataggtcttgaactgggatttggatgtagaaagttacggagatgaagaagtaatgggtaattacctctaagctgctgcttggagcttgggagactgggtagatcaggactaccataagtcaaattcagagataagggtagccagaggataggggtgcgggtgcaggaacagataatgagtttggacctgttgaatgagaagtgaagccgttggagatgtgaacctggagaatatcggtgttgaagggaaagccagaagagccagtggaggaaactgattggtaagtgagacctcactgtcagtgggaactgcatatggggggatgaaggcgggtggagggaggaggaagggggtgaggaggaacaccaccgtgggctaaccatttgtttatgttacacaagccccccacccaactctccaacgtgcatacatcctattttctagtcagttccttgcttcttgcttcttggtctcctgcatctttaagagaataattttttcccttttgccgtctcctaaatgaaggagggaaagggctagcacctctcaatctggtcacctacacgactctgaatcacaagggagacaatggaaagggggaaagggcgaaaaacgattcttaagaaaagaaagagtccgcgacgacttctaataattaaagttccacctcgttatatcctgccacgccgctctcctgccgccgtatcgggctcctggccgcgaagcaggacgggagatgtagtcctcaagagtgaccagggtggcacgactgcagaactcggtttcccgactggctttcgaggcgcgtgcgcagatggctgccccggcgagtggtaaacagagacgtcaggagggggctgctgcttggagcaaaacaaaagggaaacccggggggcggggggtggggggggttgataggggaatcggtgcgggaataagggaggccgcagccgcggggacccggaccctagtaagagtggcgagaagggaagaggcgggggaagggggagtcaggggaggggcaagtgacgcgggggagcggggcgtgggggagggcagcaatccgggtggaggaaatttgggaggagtgtccggggggcagcaacttaaaagggggagggaactgcggctaaggagacgttcggtgatgggagcgcaatatatgaggggatacagtgcctcaggtttaaaagagcaggaagctgagtgagaggttgcagaaaaagtgtcttcgctcggcagaggttacaggtggcatctcagaaagagctttgaggctacaggctgtagtcgggaaggggatcggagaactgtgtgaagggacagcttagggactagcgtcctgggactagggggaagttcgcgactttctgaagactggcaggaatgtgcctcctggccctcgatgcttcccccctgaggggaggcatcgtgagggactgtggcaggcttcactgaacgctgagccggggaggtccaactccacgtatggatccggggaatgagaattcagccacagaggctgccgcgatcatagacctagatcccgacttcgaaccccagagccgtccccgctcctgcacctggccccttccccgaccagagatcgctaaccagccgtccgagccgcccgaggtggagccagatctgggggaaaaggtacacacggaggggcgctcagagccgatcctgttgccctctcggctcccagagccggccgggggcccccagcccggaatcctgggggctgtaacaggtcctcggaagggaggctcccgccggaatgcctggggaaatcagtcatatgcagaactcatcagccaggccattgaaagcgccccggagaagcgactgacacttgcccagatctacgagtggatggtccgtactgtaccctacttcaaggacaagggtgacagcaacagctcagcaggatggaaggtaattatgaccctcttaccttcttcccaacaccatctaccccctggaccccctagcctcccttacttctactctggggccccttttactacctcccacccccaccccctttgggaagcccagagatccaccttcaatctccagttagacaaacatttacttagtacatagtatatgccacactcggtgcttgatgctgaaggatcacagatgaataagacactgtccctgccctggagaaaattgaattctctgctcactgctcaatattcgcagcactttggcttgggctgccccaaacacttattcccacagagaagtctttatcctatgtacagcaggaactgtgtggattccccacatgaacctacccttccctcctcccccacctcccaccccaacaccttttctccc

SEQ ID NO: 2629 - DNA, 6000 bp, Homo sapiens
agtggcttttcacaggcacagtcataccacactgaatcttgaactcctgagatcaagcaatcctcctgcctcagcttccaaagtagctggaattacaagtgctggccactctgcctggttacaattctttttattgctgaataatattccattatgtggatatcctatactttgcttatctattcatcagttgatggacatttgggttgtttctactgtttggctattattaacactgctgtgaacatgtacaaagtttcgtgtggacatatgttttaattctcgtgggtagaaaactatgagtgaaattgttgggtcacaaggtaaatttatgtaaaaccattttttaaaaatttttttgagatggagtctcactctgttgcccaggctgaagtgcggtggcatgatctccactcactgcaacctctgcctcccgggttcaagctattctccttccctagccttccaagtaactggaattacaggcatgtgccaccacgcccagctaatttttttgcatttttagtagagatggggtttcaccatgttggtcaggctggtcttgaactcctgacctccagtgatccacctgccttggcctcccaaagtgctgggattaaaggcgtgagccactgtgcccggcctatttttaaaaacatttctttttgagatagagtcttgctttgttgcccaggctggagtgcagtggcgtgatctcggttcactgccaaccgcgattctcttgccttagcctcccgagtcgctgggattacaggcgcccgccaccgcatccagctaatttttctatttttagtagagatggggtttcaccatgttggccaggctggtcccaactcctgacttcaggtgatctgcccacctgggcctcccaaagtgctgggattacagaagtgagccatcgtgcccagcctatttttattttttaaaaaatttttattttactttctggacagaacagtgtgaatatataaaaccatgttttgaatcaagaatggtatctttaggttaggtgtggtggctcatgcctgtaatcccaacactttgggaggccaaggcgggaggactgcttgagctcaggagcccaccctgggctacataatgagaccctgtctctaccaaaaaaaaaaaagaatattatgttatcttttatatttataggacctgaagtctccttccacatcctacaagcctctacctctcattgaatctgctttttctcaagcacaagcatccaagagacaatatgttgtactaaataactttttttgaggcagagtctcgctctgttgcccaggctggagtgtggtggtgcgatctcagttcactgccaacctccatctcttgggttcaagcgattctcttgcctcagcctcccgagtcgctgggattacaggcgcccaccaccgcatccggctaatttttgtattttcagtagagacgaggtttcaccatgttggctaggctggtctcaaactcctgacttcaggtgatctgcccgcctggacctcccaaagtgctgggattacaggagtgagccaccgtgcccagcctatttttattttttaaaaactttttattttactgtttggaccgaacaatgtgaatatatgaaaccatgttttgaatcaagaatggtatctttcggctgggagcaggctgggagataaaaaaaaaagaattgtatctttaggttaggtgtggtggctcatacctgtaatcccaacactttgggaggccaaggcgggaggattgcttgggctcaggagttcaagaccaccctgggctacaatagtgagaccctgtctctacaaaaaaaaaaaagttatcttttatatttataggacctgaagtctccttccacatcctacaagcctctacctttattcagtctgcttttcctcaagcacaagcatccaagagacaatatcgtactaaataacttttttttttttttttttgagacagagtctcgctctgttgcccaggctggagtacagtagcgcgatctcggctcactgcaacctccacctcccgggttcaagcgattctccagcctcagcctcccaagtagctggggctacagatgtgcgccaccgtgttggctaatttttttgtatttttagtaaagatacggtttcaccatgttggccagcttggtctcaaactcctgacctcaggtgatctgtccgcctcggcctcccaaagtgctgggattacagccgtgagccactgtgcgcgctgctacgtaactatcataaactacattaaaaagcattccaagctgggcgcggtggctcacgcctgtaatcccagcactttgggaggccaaggcgggtggatcacctgaggtcaggagtttgagaccagcctggttaacacggtgaaaccccgtgtctactaaaaatacaaaaattcgggtgtggtggtatgctcctatagtcccagctactcaagaggctgagactggagaatcgcttgaacccgggagaaggaggtcggcagtgcactccaccctgggcaacagagtgagactttctcaaaaaaaaaataagaaaaagaaagaaagatcatcctttcgcattctcccaatataactgatttaggcaagggacatcaatgaatgctaaaaccacattgggtgcaaggtcaatggggaaaagaatattcacaatttattctgcagaaggatgggctcagtaccaaaagactgaaaaaaaaaaaagaatattcacacaatctctaagtacctgtggattacttagtaattacacagggttgtacctttgtgatggagcaatctggtggtgactactttatcaaggtgatgaaatttagcatcaccaatactaggacaacactgtatttgacagtgtaccttctgatggctgataaaatatttaacctgggccgggcgcggaggctcactcctgtaatttccagcacttgaggcgggcggatcacgaggtcaggagtttgagatcagtgtggccaatatggtgaaaccccggctctactaatcatacaaaaattagccaggggtggtggcgccgagatcgcaccacagcactttatcctgggagacagagcaagagactccgtctcaaaaaaagaaaaaaaaaaaaaggccgggcgtgtggtggctcacgcctgtaatcccagcattttgggaggccgaggtgggcggatcacgaggtcaggaaatcaagaccatcctggctaacacagtgaaaccccgtctccaccaaaaatacaaaaattagccgggcttggtggcgggcgcctgtagtcccagatacttgggaggctgaagcaggagaatggtgtgaacccaggaggtggagcttgcaatgagccgagatagcaccactgcactccaccctgggcaacagagcgagactacgtctcaaaaaaaaaaaggaaacaagagaaattcggatcatggaatgttttcaagacaacttgcctggattcttccaaatatttagtgtcatgaaaaacaaacaagaaggcaggtgattctggactaaaggaagatgaccaaatacaatgcatgaaacgtgaatggatcctagtattggaaaaaagggagaatgaggaagagtgctatgatgtggtaaagaaattatttcagtctatattatcataatatgtgaaaaaagcaaggtgaaagccggggtgttggctcatggctgcaatcccagcactttgggaggctgaaacgggcagattgcttgagcccaggagtctgagaccagcctgtgcaacatgacgaaaccccgtaaaatgttccaactaggacaactggggaaatttaagtgcggactcttccttaaataatattgacttacttcctaaagttgtgataaaggtactttggttccatagttaagatgcttatttttaggagtgaagaacaagatgcccataaatggtttagaaaaacaaaaatcctagcaaaatgttaaccattgtgagtctaggtgaggggtcagctgttcattttactaaactttcacattttccgaaataaaacgttgggggaacaagtattttttttgaggcgggctggagtgcagtggcccgatcacaggtcactgcagactccaactcctggctcccacctcagaccccccaacagctgggactacaggcactggccaccacatctggctaatttttttgattttgtgtatggatggagtctcgctttcttgtccaggctggcctcatactcgtgggctcaagcgatcctcccacctcggcctctcaaagtgctggaattacaggcgtaagccaccgcgtccggtcaaaaaatcaatttctagggaaaaatgtcaactcaaaacaagtaacctgcatagctcgggaatgcctgtataatttacgtcaagtctctccttgggacggaccggtgaaattgcacgcagcacaaagaccggctcttacccttacttccgggtattgtggtacaggaacccgaggttgcctgcgcgtaagccacgtgactcgagcagctccttctgattggaggaagagccactgctctaattcggtgccgtgagaaagctcgcgcgcggagcagtgggagcgggcgggactgaatattttctttgaccaaccgctttccacatatccatcctcctgatcccgtagcgtcgaatcaaaagccgttagtaaagtagttacttctttctcttaggatagccggtctttccgggttttcccccccttccccctcccctctccccacttccccctccctttcccctctgttttgagcttccggtagaggctggtagggtaagggagctcagtaagtcacttctgggcgactgttgttttatttccggtctatgggacccggctgcgatttgctgctgcggacagcagctaccatcactgctgccgccatcatgtcagacacggacagcgacgaagattccgctggaggcggcccattttctttagcgggtttccttttcggcaacatcaatggagccgggcagctggagggggaaagcgtcttggatgatgtgagggggtgggcgtgggggtagggctcggggggtggggctaagcagaggaaggaggtgcggggaggaaaggagagggtgctcaggcagcgagaacagggcgcagctaacgccggggaggaggatcccgtcctcatgggtgcgggagcaacgtggcgtgggagtgatcgttctgggggagagtgggcagaagagagcgcgaggcgagcccggggccaggggcgcagggaatagtggctttggagctagcgctctgccgaccagacagtaggacacatgctggtttcgcctactgagatggcttcccacccgtaacctgcttggagattcttgacactgcctgcccctctgacatcgctgccctgagatggctctatagagccagaggactggacaggacctgcctcccgctcgtttggttccggcctcaggcttaggacaatggggtgttcctagcacccgagcgggcctcctggtcacagtgcgccttttaggtggctctcccagcgtcttcactgactttcgtgaaatagtgtcctgcgccctagtgaaactaccctgccttcacttaggcccgttttcttgaggagtgaagctgtcggccgctgtggcccctcctgtgccgcaggcgcatgcgaaacagggaccgaacgagccccgcctcgacgcctccaatcccactgatccccctgcctcggccctcgttccgagaacgaccgttccattcattcagtcttggcagtagttatttgattcgtcttctcttgtagtatactttaaagtgtgggcgatgcagttggctgtggtgctttaataaagatctgatcgatgcggagtttggtagatgtatattacagttctcgaacgtgttgcttgttttggcacactgcacagtcatttttcatgtggatttgtgactttgtcgtggaccagggaaataagtcct

SEQ ID NO: 2630 - DNA, 6000 bp, Homo sapiens
tatgtatttttttttttttttttttttttgagacggagtttcgctcttgtcacctaggctggagtgcagtggcgcgaccttggctcactgcaagctctgcctactgggttcaaacgattctcctgccttggcctcccgagtagctgggattacaggtgcccaccaccacacccagctaatttttgtatttttagtagagaccagtttcaccatcttggccaggctggtctgaaactcctgacctctggtgatccaactgccttggcctcccaaagtgctggaattacaggcgtgagccaccgcacctggcctcatctaaaatattttttaaaaacttagacattgccttttttatctctagaagtttatctttttaaatatctcctgtatctctacttaacatgctcaatttttcctccaccatctggaatgtggttataataaccatttattatccttgtctattaactttatcacctatgtcatctctggtcagttcctattgatttttctcctcatggtggattacattttcctgcttctttgcttgcctgttaattttctattggaggccagacattaaaaattttaccttgttaggtgctgggtatttctgtactactgtaaatatgtgtaagctttgttctgggaagttaagttatttggaaacagtttgacctttttaaatgcttgcttttaagctcttgtttgtttagttgatttttaagccaggatcaaaaagtagccttttaatctaggactagatttgttgctctactggggaagtattctacccagtgttttatgaagttttcccacccacaatcaggctggtgggaacacaaactattctggtccctgtgtgatctttgagtatttttctctctaatcccttcaggtggttcttcccttagctttaggtggtttcttttttttttttttttttttttgagacggagtctcagtcttttgcccagggtggagtgcagtggcatgatctcggctcactgcaacctccacctcccgggttcaagcgattctcctgccttggcctcccgagtagctgggactacagttgtgcgccaccacacccagatcatttttgtattttttagtagagatggggtttcaccatattggccaggctggtctcgaactcctgacctcatgatccacccacctcagcctcccaaagtgctggtaggtagtttctttgtgggcatgcactgaccaatccccagctgaagacttaagagacatcctctgcagatctccagagctttctctctgtgcagctatcttttctccagttttctgtccagtgaactttagctaccttggcctcctagtcttccaagtctttcttcttagctcagagagactgctaggctctgcctatgttcctcctctctgcactgtggcctagaaactttctccaggcagtatgctagggcactcatacgactcatcttgtgctggacacggtggctcacacctgtaatcccagcactttgggaggccgaggcaggtggatcacctgaggtcaggagttcgagaccagcctggccaacatggtgaaaccctatctctactaaaaatacaaaaattagccaggcatggttgtgcacgcctgtgatcctagctactcaggaggctgaggcaggagaatcgcttgaacctgggagatggaggttgcagtgagccgagatcgcaccactgcactccagcctgagcaacagagcaagactctgtctgaaaaaaaaaaaaaaacacacacaaaaaattcatctagtttgtttctctcctttcttttgtcactatcatatgccgcctgatgtccagtgtctggaaaccattgttttatatagtctgtcccttttgttgctattgttttaggcagtagggtgaattactcaatcttggccaaatgtagaagtccctctgcctctttgtgatactggggtttaagatgtcagaggtcaggtttttctggtcagtgagagtgtggccctgagagagggggctgaaatggaatagaaaataaagttcctggagtgaaggcagaataagaaatgtaaggctaggctgggcgcggtggctcatgcctgtaatcctggcactttgggagaccgaggcaggcggatcacccgagactgagagttcgagaccagcctgaccaacatggagaaaccccgtctctactgaaaatacaaaattagctgggcatggtggcacatgcctgtaatcccagctacttgggagggtgaggcaggagagtcgcttgaaccaaggaggaggaggttgcggtgagctgagatcacaccattgcactccagactgggcaacaagaatgaaactccgtttcaaaaaaaaaaaaaaaatgtaagcctaaattgttaagtgagtcattcatggggatgctcaacaggcaaactaagtgggaacagagctggtattacagacagagggatgaggatggcaaagggcctggaggaataaattagcagtagcatcagagaattacaaaatatttcttatagctggaatataaagtacgtaagaagctgctatggtttgaatgcgtcccttctaaaattcagttgttgcctttatgataatatcaagagatgggtcttttaagaggtgattaggccatgaaggcctctccctcatgaacaggattaaggccttcagaaaggagaaaagaggctttttaaaaactcttttccctcctcctccaccccctccactttcccctcctacttgttccaaaaataaataaataaataaaaatttgcccataaaagtttctggatgggaaaaaaagaggcttcacagagcattcagtttgcttgccctgccacctctgtcttgtgaggacacagaattattttccttcagaggaggcagccctcaccaacaaactaacatgctggctccttgatcttggacttcccagccttcagaactgtaagaatacaaattcctgttctttaaaaattacccaatttcaggtattccgttatagcagcacaaaacaaagacagaaatcatgtcaggaaatgaaatagacaggtgactatatttgaaggatcctgtctgttatactaaggaattggatttttttttttttgagacggagtctctctctgtcgcccaggctggagtgcagtggcgcgatctcggctcactgcaagctccgcctcccgggttcatgccattctcccgcttcagcctcccaaggaattgaatattttcttaaaggcagttgagaaagtcaagaaattgacaaattatactacaaagctatggtaaccaaaactacatagtactggcattaaaaacagacacatagaccaatggaacagaatagagaacccagaaacaaatccatgcatctacaacgaacttcattttctctttttttttttttttgagacagagtctcactctttcaccaggctggaatgcagtggcacgatctcagttcactgcaacctctgcctcccgggttcaagtgattctcctgcctcagcctgccgagtagctgggaatacaggcatgtgccaccatttttgtatttttagtagagatggggtttcgccatgttcgccaggctggtctcgatcccctgaactcaagtgatctgcctgcctcggcctcccaaaggactgggattataggcgtgagccaccaagctgggtttttttgttgttgttgttgttgttgttgtttttttttttttttttttttttttagattagtcaagtgaagcagtgagagtggagaaggaacaaagaaatctgtagctggttgtgatcaattagttgtaaacaccactgcactccgatcagccagcccatctttttcataggcagaatgcgacagaagaagcctggagcaggctgtggggaagcgggagcctcgggagagagcccaatccagttaaggcaggaggtagaagggaaagttcagtgaagaaagccaggatgtacgggagtttgtttctcactgagcaggggttccagtggttatagtggaaagggctccaagaaaagcaaacagtgggaaaaacaggttcaggtgtgtgtggaggaaagggaagcatctggggctctgacattagttctgacctcttttccaatcttgtgaaggtggcagcacctcctgtattgtcattatttctttaacggcattctttttaaactgtttaattcaaacctatatttgtagtttctaaaatgttgataacagaccattttgttgttacacatgtctgccaacgaaaacaaaaggcaaagagaatcactcccatccctataaaaggaatggctccttttctaacattctttttttttttttttttttgagatggagtctcgctctgtcgcccaggctggagtgcagtggcgcgaccttggctcactgcaagctccacctcccaggttcatgccattctcctgcctcagcctcccgaatagctgggactacaggcgcccgccaccacgcccagctaattttttttttgaatttttagtagagacggggtttcaccgtgttagccaggatggtctcgatctcctgacctcgtgatccgaccgcctcggcctcccaaagtgctgggattacaggcgtgagccaccgcgcccggcctctaacaacattctttaaaaatatacattttacacttcctgcacctcagcaaaggtggcaatgtaatcaacacactggcttattttgttctcctcactattagacgcatgtccccaaactacctgttataagccctgttttttttctggacttctcaagggctttgcccatcgttctttccccggcatctggaacagtaccacttgcgctttggtttatggttgagactcacacacgagaagcggaaccactcgatggggcattcgttgtcgcagcggatcatctcccagtaggagggctcgctggggtcgatggggaggtctgcgggggacgcctgccgctacgccttggccatggagctctgcttcttcttagaggtctgggctttcttctccttgggcgtgcccgaggtgacgtcgtcgtggtcgcggttgctggacgcgttctcacggttctagttgttgcgctgccgccgagaacgctttgctgttggacttctccgcctgcgcgtccgcctcgcccctgggcctgtccgggccgaccttgccgccgtcgcgctgcgtcgccctgctcctgctgcgggtggaacggctccacgtggctgtctacctgccgcgtgaggctctccaccagctccaccctctggctcttgatctggatcttctgatcgcccggctcctagctgcggatcagggcccgctgggcgcagggtggcacccgcggcttctgcgcgcagtccgtgtcgcggcggaccttctcatagcacttgtccaggtccttcagggtctcctccaggaaagtctccgtgccgcaagcccggctaactcacgcctccccagccatgtgcggccgcaccctccggtctgcagaggtgtggcatgtgacggtctgcgagccggtgtcgcgggacgccggggcggggcgggccgcccaagctgcagcccaggcccccagcccccagccctagcctcggcccggcctccggcattgctccgcggctggaagcgcaatgcccttctcactgtgctccactgcaagtatttttactttcattttaactttttttttttttttgacagagtctcactctgtagcctaggctggagtgcagtggcgcgatcttggctcaccacaacctccgcctcccgggttcaagcgattctcctgcctcagcctcccaaatagctgggacaataggcgcgccatgcccggctaattttttgtatttttagtagagacagggtttcactatattggccaggctggtctcgaactcctgacctcgtgatccgcccgcctcggacttccaaagtgctaggattacaggcgtgagctaactcttacttt

SEQ ID NO: 2631 - DNA, 6000 bp, Homo sapiens
tacttcttgagggaccggtgcttcaaatactcacatgtgtggccctaaaccctgccacttttctcccagaggatggagaactaatcgagcatgactgccaataaattatagtccagacttatgccacccgagaggatctcttagaagtccccttagctaatcctgaccttaacctatataccgatggaagttcatttgtggagaatgggatatgaaaggcaggttatgccatagttagtgatgttaacagtacttgaaagtaagcctcttcccccagggaccagcacccagttagcagaactagtggcacttacccgagccttagaactgggaaagggaaaaagaataaatgtgtatacagatagcaagtatgcttatctaatcctacattcccatgctgcaatatggaaagaaagggagttcctaacctctgaaggaacccccattaaatatcacaaggaaatcatggagttattgcacacagtgcaaaaacccaaggaggtggcagtcttacactgctgaagcgaaagtcaaagggttgggggggagagacagaaagagagagacagagaaagaaagagagacagcaagtcaaagagaaagagagaaagagacagaaagtcagagagaaagagagcgagaaagaaagagagagaggaagagacagagagacaaagagcaagtcagagagaggaagagagagagagacagaaagtcaaagagagaaggaaagagaggaagagaccgacaaagaaggagtcaaagagagaggcaggcagaggaagagacagacaaagaggcagtcaaagagagagagaggaagagacagagacaaagaaagagtcaaagagagagaaagagacagaaagtcaaagagaaagaaagagagaaagagagagaagtagtaaagaaaaaacggtgtaccctattcctttaaaagccagggtaaatttaaaacctataattgatcattgaaggtcttctccatgaccctacaacactccaataccaccttactgtcagtgtaaacaagagtgtagcccgaaagcactgaggccactgacaacccgtagccttcctatcaaaaatccttaacccagcaggtttcctaacagggaatcttaattaattaccacacaaaggtccgaccagatctaggaggaactcccttcaggacaggacaatagatggttcctcctgggtgtttaagggaaaaagacacaatgggtattcagtgagagataaagaaactcttgtagaagcagaattaggaaaattgcccagtaattggtctgctcaaacatgtgagctgtttgcactcagccaaaccttaaagtacttacagaatcaggaaggagccatctataccaattctaagttaatatggactgaacgaggttttattaatagcaaagaaaaattaaaatcccaaacttacaaggttttcaacaaaagtaaagtttgctgaaagttaacagtgtaacatgtattatcctaacttctaatcttatggaaatcagaccctatcagtgcccctcaaagctcaagtccatcagcacagggccatacaaccaatactcctacttatagggttagaaatggccactgctacaggaactggaatagctgtacttcattatctacttcattatcctactaccacacactctcaaaggatttctcagacagcttacaagaaataacagaatctatccttaccctacaatcccaaatagactctttggcagcagtgactctccaaaactgtcgaggcctagacctcctcactgctgagaaaggaggactctgcaccttcttaggggaagagtgttgtttttacactaaccagtcagggatagtatgagatgctgcctggcgtttacgggaaaaggcttttgaaatcagacaatgcctttcaaactcttataccaacctctggaattgggcgacatggcttctcccctttctaggtcccatgacagccatcttgctattactctccttaggggcctgtatttttaacctccttgtcaaatttgtttcctctaggatcgaggccatcaagctacagatggtcttacaaatggaatcccaaatgagttcaactaacaacttctaccgaggacccctggaccaacctgctggccctttggcctaaagagttcactaaagaggacactacaactgcagggccccttctttgcctctatccagcaggaagtagttagagcggtcattgcccaattcccaacagcagttggggtgtcctgtttagagtggggattgagaggtgaagccagctggactccctgggtcgagtggggacttggagaacttttctgtctagctagaggattgtaaatgcaccaatcagtgctctgtgtgtagctaaaggattgtaaatgcaccaatcagcactgtgtaaaatggaccaatcagcactctgtaaaatggaccaatcagcaggacgtgggcagggccaaataagggaataaaagctggccaccccagccagcggcagtaacccgctcaggtccccttccatgcagtggaagctttgttctttcactcttcacaataaatcttgctgctgctcactgtttgggcccatgccacctttaagagctgtaacactcaccgtgaaagtccgcggcttcattcttgaagttggtgagaccaagaacccaccggcaggaaccaactctggacacaatactatgcagtcacaaaaacaatgagtagctctatatagtagactcacttggaaagatatacttccaggatataccctttcagggatgtccaatcttttggcttccctgggccacactggaagaagaattgtcttgggccacacataaaatacactgacagtagctgatgagctagctatatttttttaaattgccaaaaaaactatttatttatttatttatttatttattttgagacagagtctcactctgttgcccaggctggagtgcagtggcacaatctcggctcactgcaacctctgcctcccaggttcaagcgattcttctgcctcagccttccaagtagctaggactacaggtgtgtgccaccacgcccggctaattttttgtattttagtagagatggggtttcaccatgtttgccaggctggtctcgatctcctaacctcaggtgatctgcctgccttggcctcccaaagtgctgggattgcaggcatgagccacgacgctgggcccaaaaatctcataatgttttaagaaagtttacaaatttgtgttgagacgcattcaaagcagtcctgtaccgcctgaggcccacggtctgcggattggacaagcttgcctcaagtggaagaagcaaggtgcaaaacggtgggcatataatgctaaaatttgtttgttttgagacagggtcttgctttgtcacccaggctggagtgcagtggcacaattgtagcttactgaggcctcaaattcctgggctctcaaatagctgggactacaggggagaatcaccaagcctaactaatgtttaaaattttttgcagagatgggggtggaggtggaggtctccctgtgttgcccaggctggtctccagctcctagtttccagagatcctcccacctctgcctcctaaagtgttaggattacaggcatgagccactgctcccggtggaggtgctgtttttcttaactatgaatctggagtatgtcacagaatttaccaaactttctgacctctagtgccttacacagggttgaaaagcacttccacaagtaaccagcaaagcgcttctacagaacaacgcctgggcaaaagctgaaaaccttgcgacatttctacttcttccaactgaaagcagagattctggaagagcaggaaagatacaacagcagtgaatgcagagctatttgacagtgtctgagaaaacaatctggccttttgggccatgacttaagacattgtaacaaggttttagctacagagagcacatttcataagggctagagcgtgtttgcttggagacatgccaatcagatcacgtgagttttaagcagaaaacaaagtaagagttagctcacgcctgtaatcctagcactttggaagtccgaggcgggcggatcacgaggtcaggagttcgagaccagcctggccaatatagtgaaaccctgtctctactaaaaatacaaaaaattagccgggcatggcgcgcctattgtcccagctatttgggaggctgaggcaggagaatcgcttgaacccgggaggcggaggttgtggtgagccaagatcgcgccactgcactccagcctaggctacagagtgagactctgtcaaaaaaaaaaaaaaagttaaaatgaaagtaaaaatacttgcagtggagcacagtgagaagggcattgcgcttccagccgcggagcaatgccggaggccgggccgaggctagggctgggggctgggggcctgggctgcagcttgggcggcccgccccgccccggcgtcccgcgacaccggctcgcagaccgtcacatgccacacctctgcagaccggagggtgcggccgcacatggctggggaggcgtgagttagccgggcttgcggcacggagactttcctggaggagaccctgaaggacctggacaagtgctatgagaaggtccgccgcgacacggactgcgcgcagaagccgcgggtgccaccctgcgcccagcgggccctgatccgcagctaggagccgggcgatcagaagatccagatcaagagccagagggtggagctggtggagagcctcacgcggcaggtagacagccacgtggagccgttccacccgcagcaggagcagggcgacgcagcgcgacggcggcaaggtcggcccggacaggcccaggggcgaggcggacgcgcaggcggagaagtccaacagcaaagcgttctcggcggcagcgcaacaactagaaccgtgagaacgcgtccagcaaccgcgaccacgacgacgtcacctcgggcacgcccaaggagaagaaagcccagacctctaagaagaagcagagctccatggccaaggcgtagcggcaggcgtcccccgcagacctccccatcgaccccagcgagccctcctactgggagatgatccgctgcgacaacgaatgccccatcgagtggttccgcttctcgtgtgtgagtctcaaccataaaccaaagcgcaagtggtactgttccagatgccggggaaagaacgatgggcaaagcccttgagaagtccagaaaaaaaacagggcttataacaggtagtttggggacatgcgtctaatagtgaggagaacaaaataagccagtgtgttgattacattgccacctttgctgaggtgcaggaagtgtaaaatgtatatttttaaagaatgttgttagaggccgggcgcggtggctcacgcctgtaatcccagcactttgggaggccgaggcggtcggatcacgaggtcaggagatcgagaccatcctggctaacacggtgaaaccccgtctctactaaaaattcaaaaaaaaaattagctgggcgtggtggcgggcgcctgtagtcccagctattcgggaggctgaggcaggagaatggcatgaacctgggaggtggagcttgcagtgagccaaggtcgcgccactgcactccagcctgggcgacagagcgagactccatctcaaaaaaaaaaaaaaaaaaagaatgttagaaaaggagccattccttttatagggatgggagtgattctctttgccttttgttttcgttggcagacatgtgtaacaacaaaatggtctgttatcaacattttagaaactacaaatataggtttgaattaaacagtttaaaaagaatgccgttaaagaaataatgacaatacaggaggtgctgccaccttcacaagattggaaaagaggtcagaactaatgtcagagccccagatgcttccctttcctccacacacacctgaacctgtttttcccactgtttg

SEQ ID NO: 2632 - DNA, 6000 bp, Homo sapiens
acacaaagggattatggggattacaattcaagatgagatttgggtggggacacaaagcctaaccatatcgggaggcaaagtttatctttctaactcttctagtgagctagctcctgctgggttcccttctattacttttttggcaccccctttcccataccctcactcctcccaccatagaaatccaacagatctacaattattggcaatggcccggccttcaaacttctccttcaatatcctaccaaaccttaccagtcctgtatcccaacccatcagggctagattttcaagataaaccagtggtcttcaaacttcagcataaatcagaatccactggagcacttgttaaaatacagattcctgggtcccatcctagaagttctgattcagtaggtctcgggtggggcccaataatttgcattttttataacttcccatatgctgctgatgcttcaaaggccacattttaagaaacactggaaagaaactaaagcaaaaccaggggcagcaggtgataatgcagaattgaggaaagggatctttagttcattttgactcagccccttcacagagtttctgatttaattggcactgtctggatttggtgaatcccggatcattttccctgcttcaccttgtcttcctcctccaactttcttctctttcttttcttttcttttcttttctctctctctctccccctccctttcttttttttgatggagtctcgcactgtcacccaggctggagtacagtggcacaatctcggctcactgcaaccttcacctcccaggttcaagcaattctcctgcctcaagtaggtgggactacaggcatgcgccaccacacccggctaatttttgtatttttagtagagacgggggtttcaccatgttggctaggctggtctcgaactcctgacctcaagtgatccacctgcctcagcctcccaaaatgttgggattacaggcatgagccgccacgcccggcccctcctccaactttctgatcttatttttcagatggttctcagggcttctccacttgagactgactctaccatctttctcgttctcctatcacaaagccacagtttcaggacaaagccctttcctgacctcttagctccatttcagtgccctcttctccctccctgcccctgagttgcttgctgctcctctatccagtattagcacccccaactccagcagtgacctgtggaaagctgggctccaattagggcccactcttatctagcaggggtagccatttctgctcccaggcagtagagtctggctccacaaacattggcatgctaatgacagccacctgcttgcccctgggaagtctctgtttgttgcagcttctttaaggacatggaaatactgaagccacctcatttacatgcttctgttcattcctttactcaacaaacattgattgaacacctgccagacaccatgctgggcccaagggaccccacaaggaaacatcaaacatgagcacatacatgttcatggaagcgcccgggagtcccaaatgactcttcataaaggggaatcttttggcttcactcatcaacgaggacagacattcaaggaagaaaactcacgaactgaccactcatgagccctcttgcctcctcagcccttccatctcccctgttcttgggaaggtgacccgggacaaagactgaaaggcatgatttcaggccgggtgcggtggctcacacctataatcccagcactttgcaaggccgaggcaggtggatcacgaggtcaggagttcaagaccagcctagccaagatggtgaaaccctgtctctactgcaaatacaaaaaaaaaaaaaaaaaaaaaatagctgggcgtggtggtgggcgcttatagtcccagctgcagcagagaattgcttgaacccaagaggcagaggttgcagtgagtagagatcacgccactgcactgcagcctggatgacagagcactccgtctcaaaaaaaaaataaaaaaggaaaaaaaaagaaaggcatgatcccagagagtttccaaacctctttattgaaatgaatgttctgattcacacgtctcagtcgtcggcccactgcactgagtgagataaggtatgtaaagctagtgagctaacacctctctccatattgacacacatacactcaccatgcattgaaatacactgacacaccaacacatgccaacacacacattgacacacagatatacagacacacagctagcacacactgacaatacacacgaacacaccgacacatctactcacacatcaagaccaacacacacactgacccacaccccaccgaaggaggctggaggcccaggccccaggagggacttgtagccgcaggtgggcaggtattggaggaaccaaagggtcccaggagacttgaattaagcacttagttcaggtcttcgaggttcagcgttttggaggaggaggacgcagtgaggttctggtagtctctagggacaggagggccgaatggggcatatggatgagacaccaaggattccgtgctcaggtgcccccagcgctgggccggtaagtacggagcttcagtccgcgaggagtgctaaggcgggcggggcagtgcgtgggggattctcccgggagacccgcagccctccagtcccctcccgttccggcagcagctttctgctctggcttccaaattctccccttttgtcccaccaccacccaaaccccaagtccagatcggggctagtgacctcggggcctttcagtccaccacgccctagcctttgccagggaagagccctgtcccagacacccagcctggaagccgccagtcacctctgactccccgcccccatgcggttggggcccaagcctcaccgtggttcctcagatatagcactggtcccccgtgtcactgccaacccagtccagggctcaggccctgccccaaagctccagagagtctgaaagactccagctgcccctcttccttgccaccgccatccgccctatggcctgcgccttctgtctcgcggagctcctctgcgctgatccctgattttgccaggctcttctctttaggccgctcctgggtctccagcacaatgaaggcgcacagtggcgctccctgaatacttggctcttcatgactgtccttactgctattccctcactgtgtctcttctttcttctccccgcccccctcgcacgcatccaagttctctgccctcagcttaatagagtgcctcctgactgcgaggccctgcactcggccctgggatgcgtttgctgagtccttgttctccaggcgcacagggtacatacataaagggcttcccgagagagtgtgagaagctccatccagcaggtggaaccaagtgccaggcatgctcttctttggctactccattttcttgtcttccctgacttctccgagaccagggcctctggatcgagtcccttcttcctctctctccctggttccttcttttctttttccctctctcctgcctcctcctcagctgctccagccttgggcctttacggggtcatcttccatgctccattggggccccctcttgggcccgggtttcctccatagccttgtcatcccctcccccatctggggtccctctggcgggcccaggtctctctcccacaccagggaacctgcccttttgaggagtggaatgtactgtccctcccgctggggcctcgggcatgccaaatctgccagcgtgctccagtgacagggagctagcaagaggccagtcccaagagagaggggagggcgccaaggccggagaagtggagaggtgcccacgagagaggacccgcggaggtgggccacggggataaggagggcgggcgggcgcacccctgccttcggaagttctctcctctgcgccctattggccgccttgtcccgggctgaatgagggtcaaggagaaatcagggggcgggacagagtgactggaggccgctccccgtcacccgcccctccatttcgctccatagagctgagaaccttcatctccagcccttcctctggtactagaaggggtgggtggtcttgctgagcgtctagggctgggtcggagagaggaggcgtgggttccgtctgtactaggtacccaaaggtggtgagcttggctccacgaaattacagcccacagcacccaaggcttggaaaccccagggcagaagcagcgtctcaagacctctagcctcggaccccacatgccacagctcagctcagttgccgggctgcagtgcggctccccccacgggccccctttctaagctctactgtggagcggcaggtgccgcaggcctccccggtacctcggccgcagctgcgctcccgggccatggagggagggagacacgacagtggggcatcgagactccagcggccaaggcgcacccatctaagcaccttgggatctcggtggaaaggaaggggggtaacgggggccgggaggagaactgcagagctcggccgctgagcagagtatgggaggggggaggggcgggggctcccttccagccttcggggtctggggacttagggatgtaaaggagagcaggggggtgtgacaattcagcagaggtcgggacgtaccacggagccaagtggcggggggggcagaggacgtggtcaccgaggggagcccccgccccccttcgtagaagcctatggctggggttgcaggaagaactggaactggtctggccatagggggaagcggcgcgttaaatccgccccctctccataccctactttcaaggggtgggcggtagaggggaggttggggttggagcagcggcgagggggcccctcccttgcacctccccccaccggacttggtcgcgcccgaagtgtaacactttctctttgtcggaggagctcctctgtttcctgtgcagtagctcccgttgcggcggcacccgtggcagccctggcggacgcaggagcgatggcagcgaccgatatagctcgccaggtggtaagtgcagagcttgggtgccagggccggggccgagggcctggtgagggtcaaggagacctggccgccgccgccacatcgcgaggagggcagtgggcagcatccaggagccaagggcacggtgggacttctgctcccggggtcagcagctcagtccctcagcctgtcccggaaaacggtggtggcgcgcggggggcggggggcggcaggggggcaggcaaaacctgcgggccggcggctgaacttgcattgcccaagagccgcagtgagcgccaccgcctccctcgctgcagctgcggccccacggctggggcgttgccgaatgaatggccgtaggagccgccgagccctccgggtccctggcaccctggccttgccgcgcccctgcgcacggctgcccgttgtgacccgggaccgcacaggcaaagaggcgcggggctggggttagcctggggcagaaggcggtgagtggcgaggggggcggggaggtgactggctgggatagggtttctctatatgcattacatatgtgactgcgtctgtgtgtgtatcggtgtgcgcgtatgtgtgcacgcgcgcgcgctcgtgtcttcccgggcgggcggcggcggcgccggggttctgtctgtgacccaaagaagtccgcgtgtttctctgagtgtgctcacctctgtggtgtgtgtccgaacgcctctctgtctgcttgtgctgtgtgcctctgggtctcatttgtgcgtcagtgtggggtgcagttggctggcctgtaggtggctggctgcgtattttggcatgttttggagcgggcctctgaggatctgtctcgggtgcatgttcagtgtaactgggcttgtgtgccaaaacctgtggagctggcttctttctatggagactcaggaaaataagtgtgagactcgcaaaagcggtgccgtctctttttttgttggcgaccgactctgggaaaaaaaaaatcttcattt

SEQ ID NO: 2633 - DNA, 6000 bp, Homo sapiens
acggtggtgcacacctgtaatcccagctactcgggaggctgaggcaggataatttcttgaacccaggaggcggaggttgcagtgagctgagatcgcgccactgcattccagcctgggcgacagaacaagactccatctcggggaaaaaaaaaaaaaaaaggaaaagaagaaaagaaacatcccaaacacacagagaagttagaaaataatgtaatgactgtccaaaaacccctcaaatttagaatcaacatttttaaatatttagggccatgtaaactttcttccgtgttgtatcaccaatagagctaggtaatagggttttgttttctatgtttgaggtacgatactacctttagtgggtggtggtaggaacgcctgaagcagagacctcaaagggaatcaaagggtaactgccacgtgatgatagcaaaaccagagtgcagcagcaatcttttccccacctgaagacagttgctctgagacagttgacccagaccaaccccagctaactttgtagggcaaagttagcccctgaaagttcacttgggagaatgaccactacctagattgccactagagaaagcttcattgttcacattgtgggactagttcaagccagaatcatccagatgctcttggtatgggccggcatttacggtctggatcccagaatgcaacattgaaaggaacagctcattaaaagagccagcacatgcagcttttggggcttgccctgtgccttggttaccttggacaagtcatggaacctctcgaaatatatattaatagcagcccaagccacctcatagtcagggggtgaggtggggcatcacaaggatcttctatagttctttaattatttcacagtgtccacaatttgtcattccaactagactataagcttaaaagccacgaacttttttttgttttgttttttgagacggattcccactctgtcgcccaggctggagtgtagtggcacgatctcggctcactgcaagtgccgcctcccaggttcacaccctcagcctccacagtagctgggactacaggtgcccgccaccacgcctggctaattttttgtatttttagtagagatgagatttaaccatgttagccaggctggtctcgatctcctgactttgtgatccacccacctcggcctcttttttttcttttttgagatggagtctcgctctgttgcccaggctggagtgcagtggtgcaatcttggctcactgcaacctctgcctccagggttcaagcgattcttctgcctcagcctcctgagtagctgtgattacaggcacgcaccaccacgcctggctaatttttgtatttttagtagatacggggtttcaccatgttggccaggctggtctcgaactcctgacctcatgatctgcccacctcagcctcccaaagtgctgggattacaggcatgagccaccaagcccagtccgatcacgaacgttttttaaagcctgctacctttttttgtccagttgacaagggctaaccatagtgctggccacatatcagtcaatcaagtaaatatggacacagtggagaaatggtgttgtcacaccaaaccgtttgtggtgttcattcaaatgggacggacttgtattatgtgcaccagaattgaacttccaagttggctgcgtgcaatgtaagccctacccaacaacttgaaggcttgttttagtcactaaggatgtttacccacagtgactctcaactgattctagaaagaacacaccccccacatacatacacatacacacacacacacacacacacacacacacacacacacactagggcacttactcgcatggtaccacgtctcagagctcattaaaaagaattcctggccgggagcagtggctcatgcctgtaatcccaacactttgggaggctgaggcgggtggatcacaaggtcaggagttcgagaccagcctggccaacatggtgaaaacccccctctactaaaaatatcaaaactagccaggtgtggtggcgggtgcctgtaatcccagctactcgggaggctgaggcaggagaatcgcttgaacctgggaggctgaggttgcagtgagccgagatcatgccacttgcactccagcctgggcaacagagcaagactccgtctcaaaaaaaaaaaaaaaaaaaaaaaagaattcctaagctagccacacttaggtttattctctagtcttctgttcccaaaccctgaatacatgttccttggaggaaacaagcagcaaccagatgtccaaggtctcctgagttaactccgtcttccctggtgaattacaacttattgcagacacaaaggagaacagagagacaaatgacacataaacaggagcttcactggctgggggaggggggcatggagagtgacgtcagttttcccagaaacccatttatcacgataacaaggtctcgagtgcttaggctgctctttcagcttcagaatctggcgtacaattatgttcttcatcatacagtatggcaaggccagccagagcaaactggagccatgcaaagcaaaccaagtggccctaaagcaccccctcacccccatctgcagaacaaagggcatctctaggttgcctgagttgtgcctgaggtgaaacacacacaaccttctggaatgttccccattgcaacatctgccctgcaatcctaatccaggcaagagaaactggtgagagtatggaggacaggtcgatgcaaattcattagctgacatgaaaaatcattagcgtcatttttggatggagctagtgtaatcccagagattaattcctctacttcagctataccatctctgaaatgcaggtaaccaggagcagaaaagccacagcagaaaagagggagccctcaaaacactaaagcaataaacaacgagagtgccaatcttgggggaagaaaattctctcaaattgcatcatcacagagaatgtcccctgtctactcctggtccttccacaacatgactgcataaagtgctctgtgctagggtgtgcagggggtggaggaggttccgaagaaatgatcctgcccttccaaacagggacaaaagagacattaatacatattctgtagagaaaatattatcagattctggcttcagattttgtaaaatcaatttcaattacaccaaatacctagaggctttttttttgtactgtagttgcattgcatgaactattttcctaaataagtaagctacaaggttgaaaaacatttttatgtggttcagagattttcgtcaagtagtatgtggtgtcatgggatttgacctacctctgtctcccactccttcctcacctcggggtgctggtgggcttattaaagtcccagatacccatggatgaatagaatagctagggtgtcccccccaaatggaattcatcgccctttgcaaccaaacttctggtttaaaaaacaaacatggagcctcaggtcacttcaacatggtttctctgcacatcccaggctggaaaacttcagttctttaaatgaagattttttttttcccagagtcggtcgccaacaaaaaaagagacggcaccgcttttgcgagtctcacacttattttcctgagtctccatagaaagaagccagctccacaggttttggcacacaagcccagttacactgaacatgcacccgagacagatcctcagaggcccgctccaaaacatgccaaaatacgcagccagccacctacaggccagccaactgcaccccacactgacgcacaaatgagacccagaggcacacagcacaagcagacagagaggcgttcggacacacaccacagaggtgagcacactcagagaaacacgcggacttctttgggtcacagacagaaccccggcgccgccgccgcccgcccgggaagacacgagcgcgcgcgcgtgcacacatacgcgcacaccgatacacacacagacgcagtcacatatgtaatgcatatagagaaaccctatcccagccagtcacctccccgcccccctcgccactcaccgccttctgccccaggctaaccccagccccgcgcctctttgcctgtgcggtcccgggtcacaacgggcagccgtgcgcaggggcgcggcaaggccagggtgccagggacccggagggctcggcggctcctacggccattcattcggcaacgccccagccgtggggccgcagctgcagcgagggaggcggtggcgctcactgcggctcttgggcaatgcaagttcagccgccggcccgcaggttttgcctgcccccctgccgccccccgccccccgcgcgccaccaccgttttccgggacaggctgagggactgagctgctgaccccgggagcagaagtcccaccgtgcccttggctcctggatgctgcccactgccctcctcgcgatgtggcggcggcggccaggtctccttgaccctcaccaggccctcggccccggccctggcacccaagctctgcacttaccacctggcgagctatatcggtcgctgccatcgctcctgcgtccgccagggctgccacgggtgccgccgcaacgggagctactgcacaggaaacagaggagctcctccgacaaagagaaagtgttacacttcgggcgcgaccaagtccggtggggggaggtgcaagggaggggccccctcgccgctgctccaaccccaacctcccctctaccgcccaccccttgaaagtagggtatggagagggggcggatttaacgcgccgcttccccctatggccagaccagttccagttcttcctgcaaccccagccataggcttctacgaaggggggcgggggctcccctcggtgaccacgtcctctgccccccccgccacttggctccgtggtacgtcccgacctctgctgaattgtcacacccccctgctctcctttacatccctaagtccccagaccccgaaggctggaagggagcccccgcccctcccccctcccatactctgctcagcggccgagctctgcagttctcctcccggcccccgttaccccccttcctttccaccgagatcccaaggtgcttagatgggtgcgccttggccgctggagtctcgatgccccactgtcgtgtctccctccctccatggcccgggagcgcagctgcggccgaggtaccggggaggcctgcggcacctgccgctccacagtagagcttagaaagggggcccgtggggggagccgcactgcagcccggcaactgagctgagctgtggcatgtggggtccgaggctagaggtcttgagacgctgcttctgccctggggtttccaagccttgggtgctgtgggctgtaatttcgtggagccaagctcaccacctttgggtacctagtacagacggaacccacgcctcctctctccgacccagccctagacgctcagcaagaccacccaccccttctagtaccagaggaagggctggagatgaaggttctcagctctatggagcgaaatggaggggcgggtgacggggagcggcctccagtcactctgtcccgccccctgatttctccttgaccctcattcagcccgggacaaggcggccaatagggcgcagaggagagaacttccgaaggcaggggtgcgcccgcccgccctccttatccccgtggcccacctccgcgggtcctctctcgtgggcacctctccacttctccggccttggcgccctcccctctctcttgggactggcctcttgctagctccctgtcactggagcacgctggcagatttggcatgcccgaggccccagcgggagggacagtacattccactcctcaaaagggcaggttccctggtgtgggagagagacctgggcccgccagagggaccccagatgggggaggggatgacaaggctatggaggaaacccgggcccaagagggggccccaatggagcatggaagatgaccccgtaaaggcccaaggctggagcagctg

SEQ ID NO: 2634 - DNA, 6000 bp, Homo sapiens
ttttgtttgtttttgccatttgaatttgtaagagacttccaactgcagcatcctgaaactgatggtttcagttccaataaggtttaatgcaatatttgaaaaaaaaaaaattttttttttgaggtggagtctcactctgtcacccaggctggagtcagtggcacgatcttggctcactgcagcctccgccttccaggttcaagcgattatcctgcctcagcctcctgagtagctgggactacatgcgtgagcgaccatgcccggctaatttttgtattttaagtagagatgggttttcaccatattgaccaggcaggtcttgaactcctgacctcatgatccgcccatctcggcctcccaaagtgctggaattataggtgtgagccactgagcccgactgaaaaaattttaatgtaggacagcgaccagtatctccaaacaagttcctgtcattttcacatacacatcaaagacaggatattttcttaaaggattaccatgtccttacttttaaaacatttatgctgtaccaggaagaaactgctgcaaaaaggccaaactgtttttttggtttaattactaaagatgaacatttttactttagcatcaagattggtaaaccgcctcctaaatacctacatttctgtaagtcttgaaggattgtaagcactaatggcatgcatgtctgatttatatattacaaaataaaaattaattttcaaagaggttgactcttaactagtttgcttagccagttaataccatgccttgagtcagagatcagacagagtcaccttatagacaagctattgtcatagagaaatctggttaacaatccattgaaactgatacacacatttagaagatatatcaaagacagagtaaaaaaacaaaatggtaaattccacatcagctatctctacttctagaaaagcaattcaaagatgatgtttttctattaactaatattagcattacttcattggtatagggcaatataatcagaacagaaaggagttatgtttgtaggatttttctctgtcagcatctatatttataagaccccatttagataattcagtacctttaaagcaataacaatgtcatgtccctaaaatgcacaatttatgtaaatagtcaggttttgcttctggtataattcctaggtttaaaacttttttgttaggttgaagaacaagcaagcactacagaaagagtatttcaagacagacagtatcaaattgatgctgcaattgttcgaattatgaagatgagaaagacacttagccacaatctccttgtttcagaagtgtacaaccagttgaaatttccagtaaaggtaggtacttctgtgttttcctattgagcgtgttataaataaaagaaagtacattagattttcagacacaaatcttgcaaacataaagcgtcatgaccatttagagagagaaaagttttaatttcccatgttgatgcatatgatttccaaaaaaaaaaactttgttggcatatgtgggcagcagtgacaaaagggaaaaataacagaaaagcctggatacctgaaagtttaactgctaaatgagtgtttgaaattttcaagtttattcactatatttcttttgaacttcttggttggttatttacttcttttcctcttgaaataccatggtatttattgaaataccatggtatttgacagatttagttattgtggattgagttaaatctcctgtttagttagcttatataagagatcatctgttaaaaaccatacagataactagtcatgattaagcatctttttgaaaagtgtagtgatagttctggtaaactgaaattggtcattaaatggaaacgttccattgtgaatgaccaataataaagtcacttaatgtgatgttgtactggccttttttccaagttttaggaggtagatagccaaacccttggatgataaacattgatagagtttgaatagactgctagctattagggttcttatgagctttggactttcataaatcacttcaccatgctgatcttgtttcctcttttgtaaaactgagataataatagtacttaccttgtaggattattgtgaggtttaagtgagatcatgaatgtaaaaatcttagcactggacctggtacataataagcactcggtagctcttagttctaataaggtaagcattttcttttctccaaacctaatatcgcactcctcattaccaccctctcaccctcatgctctgcttaatagtcatttcacctcaagccagagagatcactgatgctggggaaattaggggatcgctgtagttaatattgtgctgatattctaggtctttcaccataattaagagaagtcatctgatttcccaaccttgggattactggataaaattttcactgctgtatcagactacttcccctcttttcccctcttgaacaagtggtcattttacttatcctgaaaaactttctattagcaaacaagattatattatatttacagactagatacataagatatatagtggaattttgtcatccaggagcttagaatgcaatcatgaagataaagctacaagctttcttgattacttttaaatcacaggatgcagaaatccaagtcacttagatgcactaaaccagaaatatgaagatctaaattatgaggtacttcatttatcaagccatttcatgtagtttttttttgagatggagtctcgctctgtcatccaggctggagtgcagtggcatgatcttggctcactgcagcgtctgcctcccgggttcaagcaattcttttgcctcagcctctcgagtagctgggaccacaggtgcgcacaatcacgcctggctaatttttgtgtttttagtagagacggggttttaccatattggtcaggctggtctcgaactcctgacctcatgatctgcccacagcctcccaaagtgctgggattacaggcatgagccactgcacctgtccagtattcttttaaatagtgattttttttttttttgagatggagtcttcttgctctgtcacccaggttggagtgcagtggcgcgatcacgtttcactacaacctccacctcccgggttcaagcaattctcctgcctcagtctccctggtagctgagactacaggcgcccaccaccacacctggctaattcttgtatttttagtacagatggggttttgccatgttagccagtctggtctcaaacttctgacctcaggtgatccacccatcttagcctcccaaagtgctgggattacaggcatgagccaccacacccggtctaaatagtgatttcatcagtacgttttaaatcttaatttataaaaatgaagccaactaactcttgcccaaagtaaaggtgtgcttcatgaactatcttgacaaaactagtattctgtgtccttaaactaccttacagtgctcatgtgaagttacaataaatgtagtcttttgtatttaaccacgcgaagggtagctgcttctggcatgacctctttaaaatagaaaagtaatagaaagtattccgtaacaatatgacaaggatgtgacagtttaatgtatgtatagtatatagtacaggttgaacacctttaatgagaatccaaaatctgaaatgctctaaaattggaaactttgaatgccaacatgatgccacaggtggaaaattccacactttacctcatttgacaggttgcagtcaaaactttgtttcatgcacaaaaggtataaaattatcttcaggctatgtaaggtatgtatgaaacatagatgaattttgtgtttagacttgggtcccatctccatggtatctcactatgtatatgcaaatataccaaaatgaaaaagtcaggaccaggcatggtagctcacacctgtgagtactgggattccagtactttgggaggctgaggctggggggattactccagaacaagagtttaaggtcagcctgggcgacatagcaagaccctgtctattaaaaaaattaaaagctccaaaaaaaaatcaaaaatcaaaaacacttttggcgttaaagaatcttcaacatacctgggcacggtggctcatccctgtaatcccagcactttgggaggctgaggcaggtggatcacctgaggtcaggagttcaagaccagcctggccaatatggtgacaccccatctctaccaaaaatacaaaaattagccaggcgtggtggcttgtgtctagtcccagctactcgggaagctgaggcagaagaatcacttgaacccaggaggtggaggttgcagtgagccaaagtggtgccactgcagtccagcctgggtgacagagcgagactccgtctcaaaaaaaaaaaaaaagaatcttcaacgtgtataaaacattttttaacctggtttattttcatgatacttttctctaaaaaagagatttaaataaataaaaattttaaaaaaggagattaaattcatgagccgaaactgttgtctttttaatggggtattaactaaatgggcttgagccaatgataatgaactttacattgaaaatttgccttctcttacagcctgctgatcttaagaagagaatagaatctttaattgaccgggactacatggaaagagataaagaaaatccaaaccagtacaactatattgcatagaatgttggccttgcagcatttggtgtcatatgcagtagccagtggataaactaacctgttgattcaatattatttgactccttttttactaccgatgaccaaatgaagcagtgtaattaatggaaatagttgagtggactttttctcagtggttaacatgcccattttaaagagtaatacttacctttaagaagaatgttgttgaactctttgcatgttatttagtatgatgtgcagaaaacacttaagaacgtacctggtcttcatgaattcctctttggaactgggaaagagatccctgtggctattaaaaaggggggagggttcttacacaccattaattatgaagcaaaaggtttatttgcttaaaatgtcatttaaagatacttaaactgcatgcaaactttatttactgtacagagttctggatgtatttatcaaatagaaaaaccacccttgacttggttgttcacccgttttgtgatttcccttgaaaagagaaatgaattgtcatagctattgatattttactaggtgatgttctgttacactgaaagggatgttttttaaaaaaaattatttggaaacaagttttcaagtagggggacagttgcttacataatatcttgtatattcacatcctaaaaattttcatttatgagtatgggatgtgtgtatatggcttagccccaagttaactgtgctgattaacaagtacttataaaaatagctaaagtagaaaattaatgatcagttgtactagaggaacatcatagaagagaaaaatccaactctttatattaaaaatgaatacaataagaaaattgcaaaagagaccaaaatgaacgtgttttgtaaattgttacaggagcaaaaactttgcaactagttttcaacatactttagactttaaatgttgtttggacagttttgtcttcaacttggaccaattgtagattgttacaggcttcctaggatttagcattcctattttctctaccaaagttttttttagaagcatcccaactcttctctttgttgataaataagcctttcctgtcatcttcattttaacttgctaaaaccctagatacaaaggtcctccctcatttttcccacagagcccctgtttgggaatttgagattctgtgtcatgctggttttcctttcagaattgcttgaaatcgagttctcttagccactggacacctagttttcaggagaatgtcccaagattgtttatatatacaaaatggcaaaagtactgtttttcgaattgataattcaagcaaaggcttctctttactgtcactgattttt

SEQ ID NO: 2635 - DNA, 6000 bp, Homo sapiens
attacaggtgtgaaccactgtgcccagccgttttttctgttttgttttgttttggtttttgctttttgttgttgtttgtgtttttttaatgcattctcagaaacatcttcagattctcctgggcaagcagtctctcccattcctaaggaaaatcccacccattggataggaaggcttccaggagtgtctgtctagtggcaagccactggtatgagatatctggagaggacctaaagcaccccagatggctataactgtatggcgtcctacattacacatcttgattccccaagcaccctggggaatccctgtgatcaaaaaggggaaatgggttacactctgcctttttagggagatgtccacagaaataaaggaattgacattgtaaaagctagctccctgtctttgtttgtatttcttcctttacacatatacttacctttataaacagcttggttaaaggtggccaataataactacacttcatgtggcaacattgtaaagtttaattaatgtttctaaggtatgagttgaactcacaagatgaaagatcctaaatatggaatatgtgttaagtgcccagtctggtttagtctgataatggctataattgtatggtgtcctacattacacatcttgattagtgtggctcccgtgagttcaaccttgaaaatgtattttaatgttgagaatgtgtttaacgttgattggcaaacatttgggtgtacagaatatacgcttatgttcttcaactagcctcaattagttggttcttgatgtaaaagatattttacaaaccaacttggaaggtttttgtttttttttgagacagactctttctctgttgcccaggcaggagtgtagtggcacaatctcggctcactgcaacctccacctcctgagttcaagcgattcttctgccttatcctcccgagtagttgggattacaggcacctgccaacgtgcccagataatttttgtgtttttagtagagatagggtttcaccatgttggccaggctggtcttgaacccctgacctcaggtgatcggcccgcctcagcctcccaaagttttgggattacaagcctgagccacctagccttgttttttgtttgtttgtttgttttttgtaacaaggtctcactctgtcacccaggctggagtgcagcagtgtgagcttggctcactgcaacctctgcctcaggttcaagggattcttttgcctcagccatttgagtagctgggattacaggtgaacaccaccatgtccggctcatttttgtatttttagtggaaacggggtttcactatattggccaggctggtctggaactcctggtctcatgtgatccacccatgttggcctcccaaagtgctgggattacaggcatgagccaccacgcgtggccagatctgtgctttttaaaaccaacatgtaactcagaagactgaagggcttagataaccatgtgagatagggaactattattactagaatgtagttaaatattaacaggactcagctatcatttaggttagtagaaaagtttatctttgtatggcaaaagcagctttctcttatctttatgtccattccctttcagttgcactaatatttgtaattttttaaaatggctagcacttcatataccctcctaaagattttaactacatgaattagaacaaccttgttcattaaatcctgaaaatgagtcagttaatcctcccttataaagacacagcattattttattcacatgcaatgaaatactcaattcaataagcatttaccctgcatttacagtggttcagcattttgtgaactgtgagacacgataaaggaaagttcaatgtattaaggtgtctttcctggccttaagagtttactgtttctatttgggcagcaagaactatatggtaggcccagcactttgggaggctgaggcaggcggatcacttgaggccaggagttcgagaccagcctggccaacatagcaaaaccctgactctactaaaaatacaaaaaaaattagcaggcgtagtgatacatgcctgtagtcccaggtactcaagaaggctgacgcacaagaatcgcttgaacccgggaggcagaggttgcagtgagccaagattacaccactgcagtccagcctgggcgacacagcaagattctgtcttcaaaacaaaacaaaatgaaaaaaactatgtggtatattcaaaacagataggagtgcttccatctgtctcctttcaggcccccatctcccttctcagcggttctaagttccattagagccttgctttcagcaggctgtcatcaaatagcaatgatattgtctaataatgccaaaggttgatttgcattttaatcagggacttttcaagacacaaaaacaagtgggcctgtttaaacaaagttagaaagttgatttatttgcagggttctgattcacctatcacaaggtataccatacaagctgcttttactccactcacaatcctgtcacccctggtttgtaaaagctctgcttgctggattgtctccctgctatctatgatcgcctacagagtagactccaaattcttggcttggtgtgccaggcacttttgagcctcatcttccttactcccagccagacatcctacttcccagcctcactgcactttccatgtttccataaacaggcctggccctttcactccttgctttgcccttgtttccgttccccagaatgcctttcatcctgttccctcttctctttttggcaactcccactttgagacacagcataaacataatctctgtagaactcttcctattccagatttctcccaaatttcttgttttgcctcttctgacagcactttgtatatatgtcatattattgttatggaaattagttttgaaactatcttcccctactggcttctcaagggcagagaccttgcatagtcttaccatacatgctaactgaatgcttttgcagttagaatgatcaacaggttggcaaatttagtttttgatattgtgttacctccctctgagaatgccccaaggttaagtaaaaactcccaacagggaatttacaaggtttattgttgctaatttaaccaaacttaaagattttttaaatcaataatcaattgtaaagcatggggtcatgaaacacattagtagaaaacactgacttttgccgatatggttctaaaatgtctcctttgggacagcgtgtaaactgagatttggcaaaagaaggaagtgggtcttagctttgttgggtctataaattactgagttaaggactgatagagtgggggttaggacgatcctgggcatagtgctgggtgggtgaggggttagttacctttccatttcttcgccttagaatacacacttaatttggccagccagcttagaaaatgctcctggtagtaagataaaaggatttacagctacatgaaagagaaaggcatcaaaattcaggccttattcagccttgggtctgtggtgccttgagataaaagagaaacaatttataccggcaccgaattaaaaagtccttttcttcctatcttagctcgttttcttctcctttcctatcttaacatagggacattcctctccagcagcgggcataatggcatgattatgttttcctctatttagggttactcccctagccttgcaaccactccttattctttcatctctttcaaagtttctattctcccggacccttacgttttattccgtccctccctctctcctcctcttcctcctcctccgttttcccagctagctcactccgcccctcgccgtcactaccttccctcccccgaggctccttcccgctcctcccgccaccccccccaccccctcgccttcagaaagctccaatcaggagctccgaaggtgtctcgaaggcccgccccctcctcctatccacttttcttccccccaatttctccctccccccttcccccccccactcaagtcctgcggacctgggggcttcgggatctgggcgctatgaaaagtgtctgcccagtcacttccggtaagggcgctgcggcgcgaagcttcccgcgggaccgttaaggagggagtgggagttcccggtgggccagggaaggaaggcgctgccaggaaaggggatcgcgaaggggagcgggagcaggagcgaactagcgcgagcgtctggggcactttagccgcccctttccagccgccccctcacgcgcgagctcccccgccccccgggcggctgcagcgcttccctcacccccactccctgaggttgacaccgcccctccctcggcgccgcgtgaccggaaatggcgccatctttagcctcttgtgctattgacaataacaagccctggttctttccccctccccctttcccccaaccacagcctctcccctcccagggagagggagaaaaggaggaggagctgcagcctcacagactcgctgagtcgctcctgcagaaagggggggagagagatcgaaaagcaggggagggggacggcacggccgtttacctgtctgcctcctcattcgctctcccccctcgttctgctcactcctggtgtcagcctatccgccttcccaaaccctcccattcccccggtgtagccccccccttcactttccttctcgtcctctgtgtttctcctctcttctttcttcccttccccctctagcattgctaccttctctcctacacgcacgcaggcatataaacgtaggtttttgatgctcctctgcctgttgaccccgctattttcatgtttccaacaggtttttcttcccccagtccctcagctgctgctgctgctcaggaggtcagatctgccactgatggtaataccagcaccactccgcccacctctgccaagaagagaaagttaaacagcagcagcagtagcagcagtaacagtagtaacgagagagaagactttgattccacctcttcctcctcttccactcctcctttacaacccagggattcggcatccccttcaacctcgtccttctgcctgggggtttcagtggctgcttccagccacgtaccgatacagaagaagctgcgttttgaagacaccctggagtttgtagggtttgatgcgaagatggctgaggaatcctcctcctcctcctcctcatcttcaccaactgctgcaacatctcagcagcagcaacttaaaaataagagtatattaatctcttctgtggcttcggtgcatcatgcaaacggcctagccaaatcttctaccaccgtctctagctttgctaacagcaaacctggctctgctaagaagttagtgatcaagaactttaaaggtaaccaaggccaaaatccataatcacctaataaggatttgacactcgaggggtcacgtgctctatttatgttaatatattaaacagtttggaggtggcctaatgttttatgcataatcaatgaggtggaggggaggtccttttttggtggagggttcattttccgggggtggttaggatccttgtgctgaagcatacaccgggtgtttctgtgcagtattttgaggtctttttcaacctattgtatttaatctgttattccttataacactgacaatcggtatgattgatccggattttgcaggtgagaaatttgtattctaaagaggtttatttatttcaggtgcatagcgagccttggcattgctgggatttttatttttatgcttcagtaggccacattatccaatgcctagaaatgcaggtagcaatagtgatctttttatgctcaaataagatttataattagatttatactgtattcatgaaactcatttggaaggaatatttgaagaaaaatttatgttctctgcatttctttccaaaggtagggtttgaaagtgaaaaacattgtgtatacacagaagtagtaactctgtgtaccactagtctaaagataggaacaattactacatctattttttccatcact

SEQ ID NO: 2636 - DNA, 6000 bp, Homo sapiens
acaacctctctcccacaatttacttcactcactcaccagggccatcagcagatacaccagaatgcatatacctttatttatatatttaaaacaaaaataggattagtcaatagacattgggctacaactggttttatgcctcacttaatgtatcacagactcctttcagatggatacatacggcgccatcattttctttgtaatggctgcagtgttctactacatggatgtaccataatctatttaggctttcttatcttccccccagttctctcctcctcatcctctcaacagagttatagcaacttttggataaactattatgtgtaaataattaactgatgagccacataatatattataattacatttcctttcttaaacatttgcttttcctggatttaacaattgcctctccttttcatttgcttcatttttctatggtgctctgtggagttgtgcagtgcataacttatgcagttatatatggcagccctgcctgtacctatggctaagtcatcccgaactatgaaacagagctcctttatttttcctctagggtgaatgaggggtgagggggctgggtttctgagaagagagccagactttcaatataattttatagacagttaaattaatagatgatctatccattccattttattttcttagatgcctctgtcttcctatttcaatatcctgtgtcagatcatctgtttcctggatgccatgtcttcctctttcttggtttgccctttagttttagtggagcatgtcttctagtcacttcttgtgagtgtgtgcatgggaggaaaattatttaagcactgcatgactgaaaatgtatttattctaccttaaaactcaactgatatgttgactgaatatagaattctacattggaaatcatattcactaataattttgaagtatggttccgctgtctttcagctttactgatttctattgagaagccaaatgccattcttattcttgatcctttgtatggaaacttttacttcttcctacttctggaagcttttaaggtctgctttaatactttgaaattttacaatggtatgcctccatgtggggctctttctcgctcatgcttcatgttttatgaatataacacttttatctttctgcatatactggagtagaagcttagtagggctttttttaacgttttttatttatttatttatttatttatttatttatttatttatttatttatttggagacagtgttgctggagtgcagtggtgcgatctcggctcactgcaacctctgcctcctgggttcaagtgattctcctgcctgagcctccggagcagctgggattacaggcgtgcgccaccacgcccagctaatcttttttatttttgtagagacagggtttcaccatgttggccaggctggtcttgatctcctgacctcaagtaatctgcccaccacagcctcccaaagtgttgggactacaggcgtgagccaccgcgcccagctttttaaaatgtttttatttgttcttttcattgtttatattttctcccacctccccttttctgttttttggcttttgtttcacttctggttttcatgttggtactttccttgagttgtttgaaatctttagtgatttgttcatatttaagagtgaggcactaaaaagctggctggaagttctgaatgcctgggagaaggggtgggctttgatgtatggcaattggatagcaggatgctttttggttgaggtacctgtaccagtagactattctttgatgtggctcaattcttcagagaaggatcctttaaatctcctatctgggatataagactgcctgcttatattccaggaactagatatgagaaatagaatcccagactttattcctcctattttcagtctagcatactctactttccctacttgtctctaagtctataacctctgtggttcattttcacttatttgcattttagtctattttaaaaacgttttattgataaataacatacagaaatgcacaaatcattggctgggcacagtggttcacgcctgtaatcccagcattttgggaggctgaggcaggcggatcacctgaggtcgggagtttgagaccagccatgaccgacatggagaaaccccgtctctactaagaatacaaaattagccgggtgtgttggcacatggctataatcccagctactcaggaaggctgaggcagatgaatcgcttgaacccggaaggtggaggttacagtgagctgagattgcatcattgcactccagcctgggcaacaagagcgaaactctgtctcaaaaaaaaaaaaaaaaaaaaaaaaagaaattcacaaattataagtgtactgctcaatgaacttttacaaataaagctacataatgagcatccagatgtctcttgtttagtttctacaaataatagacctcttttgctggagtaacatatgtaaagcacttagaacgtccatgggatttatgatgagtgcttctactggggctagctaaaataatttagtcacctatccatctgctttccatctgcctttctttctttcttttctttttctttccttttctttttttcttttttttgaaacggggtgtcactttggccgaggctggagtgcagtggcacactcacggctcactgcatctttgacctcctgggctcaagcaatcctcccgcctcagcctccctagtagctgggactacaggtgtgtgcccaccatattgagctactttttgtattttttgtagagatagggtttcaccatgttgcccaggctggtctgaaactcctaggctctaagcgatcttccctcctcagcctcgcaaagtgctaggattataggcttgagtcactacacccagctctaagcagtgttttcatgtagcatttaccactcctagtttcacggaaggtaaagtctacattccagtttctccattttcttgttttcaggtgatttctgtactttactatcttccttacaaaatttttaattttgatgtagtcttacctgttaatggatggccaaaaggcactggataaaaatcagcagctattccttataaatgagtgcaatgagtatagaaagtacaatgagaatagaaaaaaaactttttttttttttttttggccatggtctcgctctgttgcccaggttagagtacagtggcgtgatctctgctcactgcaacctctgcctccccaggctcaggtgatcctcccacttcagcctttggagtagctgggactacagacatgcaccaccatacccagctaattttttgtattctttgtagagactggttttaccatattgcccatgctgctgtcgcactccagggctcaatccacctacctcggcctcccaaagcgctggaattacagacatgagccaccacacccagctagaaaagagctttctaaacacagtaaagagtatcgaaaagccaatagaaagcatcataatcaagtcacgtcccctgaaattcaggaataaagcatagatgtccactacagtgttttgaaggctctggaatgtgacaaaacaagaaaacaaaataagctgtataaatctaaaagaaagagaaaagaggaaaaagtatatttatagatatgattatacacattgagaatccaagaaatgtaacttaaaaacattaaaactaataagcctatgtagtggatatctgctattttgctttgcccagcattccttcctctctgcttctagcaacagcattcttcttcctttgggtacctgctcctactttatcctttcaatatagtcctggtaggacaggcaatcacaatagtcccctccgctgcctgtggctgggcacctaacccaggatggactaatcataacatcataatcataatatccaaccccattggactcagtggtagctccaagtggtaggcatgagacctggcccagagatacaagatctcccttggaattttccaaatcaaaggtaaagaagtaattttctcttttccttggatattgaactgtaaggatgtgacccagagaaattagtagccatgtcgggtctctaccatgtaagagtcttagagaattaggcgatacagagagaagcagagatgaaagatgagacggagtgagagcctagataccatttgagtccctcgatctagttggttctgagatctgccctattcttcccagttacgttaaccaataaactcaattttcctcttaagattattcaagttgggtttctgtcacttgcaaacaagagtcctaatacaagccagatgcaaaataaatatatagaatcccatcatttccatttttttccttttcaaagtattattaaatagctcccttttattttccaatatttgttataaaaatgttcaaacatgcagaaaagtttaaagaatttttacaatgaacatcaatacacccaccacctagattttaaaattaacattcttttgttatattccaataattttctcttattctagtaataacagaactagacattatgtgtgcatatatatatcccattcacaacagtgtgaaacaccaacagacacagactaaagccttaacaaaacttgtctctcaagacaaagaacccaaaaaggagcaatctagcaatcgagaaaattttagatagctaatctagtcaagccaaatgccatgggaaaaaagaaaaaatgcagactcacccttacccaagccagcaatggcggaacaggagcctagacttcggctcttagaaggctccagttcccatctcccatcccccaccttttcccgctcagcagagaccacgtggagaacctgatgcccctcaccctccccatggaggagacgtcagcactaccctgatgcaccacccctccccatgagggtgacgtcagcactacccaattgtgaagacacaatccctccccagcagttcagtttagaaactgccagtcttggtatagaacaacctaggcttatctgtttaagtcccataggtagtattattagagaataacccaggctttgggaactgtataactctgagatcgtttgaaattttcgttttgtttttcttttggctccaaccaggcctctgttgttagactaatggggtttcccctgcagagattggtcagccctgcagtctatcatcccggaaggtgttaaatacacatgaaagccagcctcggcgggcagaacctagcccgccgaaagggcgggcattgctaaagtgttttcaaaaggtcttcccaatcctctgctttagacagctcggaccttagatagaagaacacaacggatcctccagtgactgacggtgagctaaaatgcccttttgagatttcggaatgtggggaggatcttgtttaggaacttattgaaggtggacctggttatgtacctggttatgggtcacaagacctaagcaaagccacatttttaggcaattttaagttattctcaatgttgtgctaggtttcgttattcccaaatatttataagaggtatgttaaaagttacagcctttattcacctgtgatgcggataacttagggaaaagctcgttagagtcatagttatttgtggtgaagatcctacccagcaaagtggtgatcacaagatggccttcaacaaccatagcactgcagcttaaagaagaggcaggaacagaagaaaatttgtgactgattcagatcataagtgagatagtactttgaagaacctccagaaatagctggaggacactttgaggggaatctgttttgttgacattcaagcccgtaggagttcaagccattgtaatttaaaatggcatgtcaggcttccaatttaagagaatcttaacaaatgtgttttccctgccaaatcagcttgaaatgacagaagaaaaaaacgagtaaaagaatagcactaaaattgcaagggttagcaaggaaggatgtgattagcagaccaaaa

SEQ ID NO: 2637 - DNA, 6000 bp, Homo sapiens
ccaccacgcccggctaatttttttgtatttttagtagagacagggtttcaccgtgttagccaggatggtctcgatctcctgacctcgtgatccacccacctcggcctccgaaagtgctgggattacaggtgtgagccaccgcgcccggcccatatttgcaatattaataaatatatacttgttttaatggtgggcataggactattgtatgcccaccattatccaatgtatctattgtatggatgtattataatttctttactcagtcccctgatgatgaccatttctattgttgtcagtttctattacaaagctataatgaaaatctttctatatatatttctttataatttgtatgagcatatctgtatggtaaactcctagaaatggaattgctagatcgattttacatttaactgctccgagatactttcaactttttctccagtttttaaaatttttgtagagatggggttttgctatgttgcccaggctggtctcaaactcctgggctcaagtgattctcctgccttggccttccagtgttagaattgcagatgtgagccactgcatccgaccttttaaaaatttttatttttcagtttttttttaaaatttactctcccctcaatgatatatgagagttctcagttctttaccaacactaagtattatcaacattttaaatctctggcaatctggtaggagagtttgtatttaatttgcatttattttattttattatttttttgagacagagtctcgctctttcgcccggctggagtgcagtgacacgatttaagctcagtgcaacctctgcttcctgggttcaagagattctcgtgcctcagcctcctgagtagctgggactacaggtgagctaccacgctcagctaatttttgtatttttagtagagacggggtttcaccatattggccaggatggtctcgagtgatctgcccgcctcggcctcccaaagtgctgggattacaggcgtgagccactgcgcccggccttaacttgcatttcttagtggcaaatgaagttgagcactattttatgtatgtattagccatctgtatttcttatttcttttttttcttttttttatttttgagaaggattctcgctctgtcgcccaggctggagtgcagtgacactatctcggctcactgcaacctccgcctcctgggttcaagcgattcttctgcctcagcctcctaagtaggtgggactacaggtgtgtgccaccatgaccatctaattttttgtatttttagtagagacggagtttccttgtgttagccaggatggtctcgatctcctgaccttgtgatccgcccgcctcggcctcccaaagtactgggattacaggcgtgagccaccgcgcccggcctagccatctgtatttcttctcccacaagtagactatattctttgtccacttttctactggagttttaaattttaccatattgattttgacagttctccgtatcttgaagaaattagcttttttcatccatatagcaaacattttctcacagtttctagtttatcttttgactttgtttctggtgtcttggtatacataattttttaatttctgtggacttaaatttatttatctacttttaggtttctgggttttatgtttagaatggtgtttaaaaatataaaaaatgggctggcgcggtggctcacgcctataatcccagccctttgggaggccaggcgggcggatcacgtgtggtcgggagttgaagaccagcctgaccaacatggagaaactccatctctactaaaaatacaaaaattagctgggcgtggtggcgcttgcctgtgatcccagcttactcaggaggctgaggcaggagaatcgcttgaaccctggaggtggaggttgcagtgagctgagatcgcaccactgcactccagcttgggtgacagagcgagagtttgtctcaaaaaaaaaaaaaaaaaagaaaataaaataaaatataaaatatatatatatgctgtccagaggagaagactatctggaaaacctaatttataatcagaagtctgttccatttgcatggagttaaagcaaagagatctgtgggatgttttagtccgtctatggtaaacctggaggattatctttgttgtactgtggcatatgaatttcttgtgaccagaacatttctgcatcaaatagtgtcttgccttttatatagtatcagaggtttgtaagttttaactattcaactctcctttttcactatttcttattaggcacccaaagcttctgcctttacaatattatctcataaaggacatgttacaaacaagattaaaattattttccatcagttatttcatttttcattatttcatatttcgtttgatggcattttctccctttgtcctcacattcaaagggtgaattgtttatatttttcagtaccccatgaaataaactccacttcttatgataggactggggcacctagcattctgtacatattgaagtcttgataagtatttttttgaaagagctctaacaaaaaaaatggttactgtaaaatattcttaaatattagtaaaaatttgctacaacatttatttctgatgttataccagtttgttattaatcttcagtggtatttttcacaaaatcagagctaatttgctaaacagaagaacttttcagttttgttctaagcataaaattgtttaaaatctcagttgctacatagataattaactgagaatacaaatttataaaatagataaaaaactatttgtaccatgtaccataaatgtgatgtttggagcagaaaatcagtagttttcagctaatactaagacaggaaatcatttaatatcaattgagattaaattggcacaattgaactaaattaatgtaaaaatgacttggtacacggcccaatttttctattacttcaagtggaattttgcattaacttatataactctgtaaattttccactactctctatttaatgttctagctgcatcattctgtaacttgaatctattaaaaactgtatagcattctaccaaagatggtctataaaagaaatggaaatttattttgaatagtattccactctccagagctttagaggtaagtaaaaatgtctcagattttacttcttgttattgatattcagatgtttctgtttaacttttattgtccagttgattaaatatactataactctttttgtaaagttgcagaaaaaacaataagcacagaggatgggagagaaactaacaagagatatggaaggaatataatttaaggactgaaaataatcgttatattacattaggaatgtttcagaagtgatatcggggtgaaagcttcatgatttacacggggctcaccctatttctcagttggaaaatttgttttgttattaatacgttttatttcttttcttctaattgaaatgtaatttaatatttaagaaatattttaaccaaaatttcaaaaatggaacagaaacgaagacttcttaagcaaacactattttatgaatctacgaacttctataacagcaatggagacactgcaataggtcacttcttcctgtccaaggaaaaagcggcgctttggaggggataggccctcctcgagtttttctcccccgagtaaagagctcttggcggtcaaaggtccaatacactggattcgaaacaaacaaaaaaaaagggtgacaaagattttagttaacaggggtcggaggagcagaaagggtcttttcgcacttcaaacatcttgggggagggatgggaaggcaggatgcgaagtaacctaaattcccaaccatttcgcgtggttgcacccgcccaggaaggcagtggatgcgcgggggaggcggggtaggtccccctccactccttttgcccaaatttcgatttccctccacttcgctcggtcctatctcttcccccgccccgagagtggcgaacaaattggtcgagcgcccggcctagcctagtagtccagttctttaggactcctagaacctggagatacagaccacgttttctcggagacgggaccagtgggctgtaaagcaaaacaatttttctttcttttccagggctaggtcttactggtagagaatcagctcgctctctctccacacccgaagcaaaaagcaaaacaaaaccaacccgtattccgcccccgatctagcccaagtagctccattaaaccatttaggatcaggtgccagagttaagcgacttgggttcttttggtgggaaggggtagggacaagggggcatcgaaggtacgggaactagggccacaggcccctcacaggggtgtgtcagaagaggggacttcgaagggtgatgcccgactgggctgccaccttagcgcctcgcgaggggcggaggggcccggggaacgagtcccggagcgaacccagccagcctctggattcccacggcccagggctccgccggacattcctaccgccctcccctcgacaccccactaaagacagaagaaccgcggctcgatcgggtccgcggcggaagcgcggccaaacgaatgagtaagtcaggcgcgggcacggcaccttgtttaccccactcggcggcgcgcccctgcgggcgcctggtttgcgggcggcgtcggagacgctgaacccgggagtcagtcggccacgattggtcggtgactgggaggaggacgctgggtgggagggctgggagccaggcgttgcagtggcaactctctgccgctagatgccgctccctcccaacgggagccgggcgcgggttcgtggccgacagatggcgcctgcgcgttccattcgcctccaagtcgccgaagagcgaacaccccaaacaatcccgaagcgccaccaaaaaaaaaaaaaaaaaaaaaaaaaaaaaaaaaaaaaaaaagaaaaaaaaccccgccggatccgaccgccactttcaaaaccccccaccgctctagaaccgcgggagcttccgtccctgagtagaattcgagggtgtaaagaagaggaaggggaaaaatatcttgtaccagcccaggggtgaagaagcccccggcctgagaaagaaggaggagtgggggaggcgaacagtctcgttgctgcctctgtgtacgctgaggggggaggtaagttataaaatggcggaggcgaagcttctagaagtttggaggggcacccggagggcgcttggcccaccgtgaggtgtgtatgattgaaacagggcgagagagaggagttgggagggaaagaggttgggcactctgttgccattgaatttcccctctgctttcttcgcccccatggggggcagccatggaacggggggcagagtccaggcgggaggatctttctcgcccccgcggcgccccccgccctcctttctcccttctccccccaagtcgctaccccaacacttccaaggaacttccagccccccttcctccctacctcctactcctagagtggctttctaccgcagggctcttcttttcgactaccctcgctgaagattttctcttccttccctcgcccaactctccctcggggcctctacggagaccccccccccccatgggtggcccaaaatggagaacgcggagcagcgcaagatggaggctccgcttctctgtgtagcagtagatttaggttccttttctccggcaggctcctaagcctaggagagcccgaactggaggtggggtggggtgcgagccgtagtcgggggaggaaagccgggaggctgtggttggggtgggggagagcgcggtgtcgcggtgaggggaaggcagagagcaaaatggtggtgctgggaacctaggggggaggggagaaaggaggctcagttgtgtatatttgggcctcggaccgagggaggcgagggaaaatctactctgatcacacccctccctcgtgccccctcccttctcccttcccctcctcccttccctccctcccccctccctc

SEQ ID NO: 2638 - DNA, 6000 bp, Homo sapiens
atttcttttttttcttttttttatttttgagaaggattctcgctctgtcgcccaggctggagtgcagtgacactatctcggctcactgcaacctccgcctcctgggttcaagcgattcttctgcctcagcctcctaagtaggtgggactacaggtgtgtgccaccatgaccatctaattttttgtatttttagtagagacggagtttccttgtgttagccaggatggtctcgatctcctgaccttgtgatccgcccgcctcggcctcccaaagtactgggattacaggcgtgagccaccgcgcccggcctagccatctgtatttcttctcccacaagtagactatattctttgtccacttttctactggagttttaaattttaccatattgattttgacagttctccgtatcttgaagaaattagcttttttcatccatatagcaaacattttctcacagtttctagtttatcttttgactttgtttctggtgtcttggtatacataattttttaatttctgtggacttaaatttatttatctacttttaggtttctgggttttatgtttagaatggtgtttaaaaatataaaaaatgggctggcgcggtggctcacgcctataatcccagccctttgggaggccaggcgggcggatcacgtgtggtcgggagttgaagaccagcctgaccaacatggagaaactccatctctactaaaaatacaaaaattagctgggcgtggtggcgcttgcctgtgatcccagcttactcaggaggctgaggcaggagaatcgcttgaaccctggaggtggaggttgcagtgagctgagatcgcaccactgcactccagcttgggtgacagagcgagagtttgtctcaaaaaaaaaaaaaaaaaagaaaataaaataaaatataaaatatatatatatgctgtccagaggagaagactatctggaaaacctaatttataatcagaagtctgttccatttgcatggagttaaagcaaagagatctgtgggatgttttagtccgtctatggtaaacctggaggattatctttgttgtactgtggcatatgaatttcttgtgaccagaacatttctgcatcaaatagtgtcttgccttttatatagtatcagaggtttgtaagttttaactattcaactctcctttttcactatttcttattaggcacccaaagcttctgcctttacaatattatctcataaaggacatgttacaaacaagattaaaattattttccatcagttatttcatttttcattatttcatatttcgtttgatggcattttctccctttgtcctcacattcaaagggtgaattgtttatatttttcagtaccccatgaaataaactccacttcttatgataggactggggcacctagcattctgtacatattgaagtcttgataagtatttttttgaaagagctctaacaaaaaaaatggttactgtaaaatattcttaaatattagtaaaaatttgctacaacatttatttctgatgttataccagtttgttattaatcttcagtggtatttttcacaaaatcagagctaatttgctaaacagaagaacttttcagttttgttctaagcataaaattgtttaaaatctcagttgctacatagataattaactgagaatacaaatttataaaatagataaaaaactatttgtaccatgtaccataaatgtgatgtttggagcagaaaatcagtagttttcagctaatactaagacaggaaatcatttaatatcaattgagattaaattggcacaattgaactaaattaatgtaaaaatgacttggtacacggcccaatttttctattacttcaagtggaattttgcattaacttatataactctgtaaattttccactactctctatttaatgttctagctgcatcattctgtaacttgaatctattaaaaactgtatagcattctaccaaagatggtctataaaagaaatggaaatttattttgaatagtattccactctccagagctttagaggtaagtaaaaatgtctcagattttacttcttgttattgatattcagatgtttctgtttaacttttattgtccagttgattaaatatactataactctttttgtaaagttgcagaaaaaacaataagcacagaggatgggagagaaactaacaagagatatggaaggaatataatttaaggactgaaaataatcgttatattacattaggaatgtttcagaagtgatatcggggtgaaagcttcatgatttacacggggctcaccctatttctcagttggaaaatttgttttgttattaatacgttttatttcttttcttctaattgaaatgtaatttaatatttaagaaatattttaaccaaaatttcaaaaatggaacagaaacgaagacttcttaagcaaacactattttatgaatctacgaacttctataacagcaatggagacactgcaataggtcacttcttcctgtccaaggaaaaagcggcgctttggaggggataggccctcctcgagtttttctcccccgagtaaagagctcttggcggtcaaaggtccaatacactggattcgaaacaaacaaaaaaaaagggtgacaaagattttagttaacaggggtcggaggagcagaaagggtcttttcgcacttcaaacatcttgggggagggatgggaaggcaggatgcgaagtaacctaaattcccaaccatttcgcgtggttgcacccgcccaggaaggcagtggatgcgcgggggaggcggggtaggtccccctccactccttttgcccaaatttcgatttccctccacttcgctcggtcctatctcttcccccgccccgagagtggcgaacaaattggtcgagcgcccggcctagcctagtagtccagttctttaggactcctagaacctggagatacagaccacgttttctcggagacgggaccagtgggctgtaaagcaaaacaatttttctttcttttccagggctaggtcttactggtagagaatcagctcgctctctctccacacccgaagcaaaaagcaaaacaaaaccaacccgtattccgcccccgatctagcccaagtagctccattaaaccatttaggatcaggtgccagagttaagcgacttgggttcttttggtgggaaggggtagggacaagggggcatcgaaggtacgggaactagggccacaggcccctcacaggggtgtgtcagaagaggggacttcgaagggtgatgcccgactgggctgccaccttagcgcctcgcgaggggcggaggggcccggggaacgagtcccggagcgaacccagccagcctctggattcccacggcccagggctccgccggacattcctaccgccctcccctcgacaccccactaaagacagaagaaccgcggctcgatcgggtccgcggcggaagcgcggccaaacgaatgagtaagtcaggcgcgggcacggcaccttgtttaccccactcggcggcgcgcccctgcgggcgcctggtttgcgggcggcgtcggagacgctgaacccgggagtcagtcggccacgattggtcggtgactgggaggaggacgctgggtgggagggctgggagccaggcgttgcagtggcaactctctgccgctagatgccgctccctcccaacgggagccgggcgcgggttcgtggccgacagatggcgcctgcgcgttccattcgcctccaagtcgccgaagagcgaacaccccaaacaatcccgaagcgccaccaaaaaaaaaaaaaaaaaaaaaaaaaaaaaaaaaaaaaaaaagaaaaaaaaccccgccggatccgaccgccactttcaaaaccccccaccgctctagaaccgcgggagcttccgtccctgagtagaattcgagggtgtaaagaagaggaaggggaaaaatatcttgtaccagcccaggggtgaagaagcccccggcctgagaaagaaggaggagtgggggaggcgaacagtctcgttgctgcctctgtgtacgctgaggggggaggtaagttataaaatggcggaggcgaagcttctagaagtttggaggggcacccggagggcgcttggcccaccgtgaggtgtgtatgattgaaacagggcgagagagaggagttgggagggaaagaggttgggcactctgttgccattgaatttcccctctgctttcttcgcccccatggggggcagccatggaacggggggcagagtccaggcgggaggatctttctcgcccccgcggcgccccccgccctcctttctcccttctccccccaagtcgctaccccaacacttccaaggaacttccagccccccttcctccctacctcctactcctagagtggctttctaccgcagggctcttcttttcgactaccctcgctgaagattttctcttccttccctcgcccaactctccctcggggcctctacggagaccccccccccccatgggtggcccaaaatggagaacgcggagcagcgcaagatggaggctccgcttctctgtgtagcagtagatttaggttccttttctccggcaggctcctaagcctaggagagcccgaactggaggtggggtggggtgcgagccgtagtcgggggaggaaagccgggaggctgtggttggggtgggggagagcgcggtgtcgcggtgaggggaaggcagagagcaaaatggtggtgctgggaacctaggggggaggggagaaaggaggctcagttgtgtatatttgggcctcggaccgagggaggcgagggaaaatctactctgatcacacccctccctcgtgccccctcccttctcccttcccctcctcccttccctccctcccccctccctccctctcttcctcccttcctagagagggaacaacattcatgtgacgggcccctctgcttctcccccgccccatcatctccagcgcgtggtgggggaactgctggggaaggcgattggcatcgatctctccatcccttccgaggcccgacttcggtcagttttcttcgggcaacaattttctaaattggctggggtctggcggtgttggcccccgcgcgcagaccttgccccgaagggggccctgcctgcctggcatgggcggaggggggaagggcgggagtggaaggctgtttgttggggggttttggcgccacttttgttttagttttagtgctgcttttcattcccacccccacccgcactgtctttctcaaggcacgaactgagctgatccttgccccaggtaggcagcctgtgcgttttcactccacacttttattcttgctcggggtcgactttcttttttcttctcccctggatccggagatctgcggacggcgattttgggacgaaaagggtcggatgggccgtgggagagagaaggtgtgggaaacagcatcaagtagttccgcaaaactttgagccccgttcccattttcttttggcctagaattgtgaacgtattgttgatttcggcctttttttccccccgtcgcgagaatgtcttgttttgcctttagttttttataaaccgctgtactttcgacatttagtttccgctcccccttggtgcatatgtcattttatttttaatccttaactgtaatgggttatcgtgtgattttcgtgcttcagtgctcggctttaatttttaatattgtattagtagtttcatccggtttgtgagactttctcttccgtggcctagaatgttttttatgttgttgcctaccacccctcttccctctccctccttctttctcttggatgtagtttttaaattgagggccatggtgttggattaaatggtaatttacagtttacatgatatatctattggaaacttttgatctgtaaggttagatttaaagtaaacgaggcgcttgtgttggtttgcaatggttccttaaaatgcgcgggccaccccct

SEQ ID NO: 2639 - DNA, 6000 bp, Homo sapiens
ccttaattggttattattgggttttgtcagttatttttcttaagtacctcttatatcagtcccctgtgccatattctccttgacagtgccttgattcgggtcctcctcagttttcacatgggctgttgcaaagcctttaagctgatattgcagtcccgctgctcctttatgcctcttgtggggtcatctttctaaaaatgcagatctgatattctcacttatcgttctaagtcttttattgatttttttcccccccattgccattaggaagaaaattctagctcctcagcctagcaaacaaagccttttatgatctggttcccttgccatcttaaccttggccttttccttacatgtattctatgctctagccatatcaaatcttgtagttccactcagatacactatgctctttcctgactccataactttgtataagcttttttctgccagaaattcccctttatttttcctcctagtaaagtctttctttgatactaattctgacattacctgtggaatttttgctgacttccacagatttttttttctctccttctttaactgtttgtacacactttattgtaataattaccagacttgtgtagtgagataggatattacatgccctggtccttcactagactgaactccctgaggcagtgatgatgttattcattcttagttctgcccagcacaatagatatttagttttgtcaaatgaataaatcatttaaatgccctgccatctccctttttagaatctacccattttatgttccttgttcctcacacctactgcctcaggtgacggttataccatcctcaaaggcctgccttctatgtacaatttctaccattcccaccttgccctctcctacctcataatctgctttcagatagcttttagaactattttgacaaactaattcacactaacatgtttactaataaggccaaggggccgggctcagtggctcatgcctgtaatcccaatactttggaaggccaaggtgggaggattgtttgagcccaagagcttgagaccagcttgggcaacacagtgagaccccatctttacaaaaactaaaaaaattagctgggcatgaagatgcatacctgcggtcccagctactcaggagggcgaggtgggaggattgcttgagcccaggaggttgaggctgcagtgagctgtgttcacaatactgcactccagcctgggtgacagagccgagaccctgtctcaaaaaaaaaaaaaaaaaaaaaaaaagtagaatctgcttcaattggtcttaagtgtggcctgagattctgcactgctaacaaatgctgtcagtgcttcaggtctgcaaaccatactttgagtagcaagactttatagtacctaatgacctgttgcactcataagtctatagtttaactgcacactgaagtttatggttttcttgataattaatctaacagtatgtatcatcttagtttgttaaataaaacatggaggtagtgattgtgatgaggggtaaaggaatattttcaagcaggtgcgatgaaatgcatttattcaacaatttattacatcagaagttggtgctaaagcgaataagacactccctgtccttaaggaattcatattctagtgcaccttgactatcactttgaaatgaaaagtatggaaggtagtagctgagagtttgggtgacagacactgtgctaggtatgatttattttgatcctctcagcaaccgtgtgagaaaggtaatgggaatttccactttcataccatagcaagctgagactgaagagatcatttagtgactttgctcagttatacagttagcaagtgtccgagtagtaatttgatgccagttccttttgatttaataatctcatgctgtcttctactgttgtgcttcccaaaactaaaatccccatttggatgagaacaccaacaaaagtaattaagaaatcgaaatggttaactgtgatcaaaattaatatgggcagttaggatcaccattttttaatgtatttgtctaatgtcaggagaacttttaacattcgttttcttagttacatactagatttgcaaaaaggtgttcttcagattactaaaataatgaaacagcaatattaactatgtgtatctatttttgacatttaacatttagagaaaaataggggcctaatagtcattttttatttatagtgattttatagcattctcatgtatattgaatgttacaactgaggggcttttatttattcttaatttgataatagtttagctgcttctgctacaaaaattaggaaaattagcacatgtacttataactgtagttttatagcattaccacatgatggcagcagtcacataactgaatgctcagtaatctttaaaggcttaggtgtctttagaagtctttgaccatgtaattttttttttaaagttaacagtttattttttaaatatacactaaactatactccatactgtcttaaccataacttaagaaatggaataatggaaaattttgaatgtcaaattctgtttgcctttatacaataccccacatctgttcttactgaagcccataataccggagtcatctaaacagtagcaaaattgggatttaaattctttaatgtccagttctgagattctccaattctaagggaagtaactcaaagcaccctaatgtagacacttcagtttgttactaaataaattgtaaaaatatctttttaaacacttaatttttaaacatgattttctaaataaatcataaaaaatatctttttaaacacttaatttttaaacaagattttctaaataaatcgtaaaaatatctttttaaacatgattttcacattatccaggagtggtaatataaaaactctgaacatattttgtgttgcatatacataaaattctagatttatggtgtagctggttttatatttggacacaaaattggtttataccattttgataacagttgttttctgccagaattgccaaaatacactgaagtttgatattaaatatgtttaagtatttattaatgttaacatcagaaacaggcagagtttgtgttggcacagaaaagaaagtgtcactactctcattctcttgtgttgagattctcttattagaattatttatagtataaaattggtaaagaagggctccatgtaatggagctaatttaatgttctagtaagagaatctacttataacctagtctgtacaaaacaaaaagaatctcaagtgtttgggtgctttctagtcaggcactctgtttggaaagaacttgagttcgtcttcatcccatactcaatactaaattgctaattaagattttgtactttcattcatcatcagaccttttctaccgagattcatagagtgttatggtaagaattggcctttaaacattatctcggtctttttggtggaaacgttctaaccacccaaactctgacttgaaccaaaaaaggagaaccctgaagcatgcgggaaggggagaggacaagggattagtagtgtggtagttactgtgaatggacaggtaagaaattgggtgcacgagtcctctttgttttcattacttgggattccaaacactacttgataattcattataaagaggctgcaatcagatacttgtttctggatctgcaaatacacagtttcttcagctcaaaacaatacatgagttctatgacttttgttcatagaacttataagagatttaacttacaagtaagagctctttgtaatatttcagctcattacatctggctttgatatcagttcttaatagcttattatagtattctaaaatattacttaatgggcataagtgctagaattttaattgaacaacctaacttttagtatatatactaagagtcacatgccattcttgtttagtgaacaagggagagttgctccattcatcatctgcttttacttttagacaagtaattattagattttacctaacattcctttctcagttggagtatatagaaagcatcaatgtaagtcattttgcccagattttaccttacccttttgatttcttaaaatttgtagttctgttccattcactttggccagattttctaaagaaagcttcttgctttctacatacttgaattgttcttagattttttttggtctgcatactcaaatgcctttttgaaaaaccatatccacttcccagcacaaatagccaagtttgcaagactttcttaacccctttccaaggaacctgtgccagaaatatatgtgaagaagcacattcatttattcatttaacaaatacctatgttgagtgcctatgtttagggtattatctagacattagtggtacatataagcataattaatccaaggttcctactttaattatatgtgaggtaagtagcatcttgattagtcctgatgttatttcattatatatcatggtcaatttaattttagaattatacatctgaagagaggggaagttttcaaagtggttttattagcatgttatttaacataataaagtattaatgtaatatttatggatatatttaaagaaatgaatgacttttaacgagattttctcccctctctctctctcattaggttcttggagtgtcaatgttttaataccagtacacaattaaatctgtggtgaagtcattttctaagtggaagaggaaattttaaagtgtggtagatacagtgaaattctgtacagatttttctctaaggagaatatgacatgcttatgcttaccaagatcaagtgcattgaggggcagttttgtttgcctgaataaacgtaaaggacaagtaaacaatttgatgataagctacagtttttcttagaaagtaaatattttatttatgcgctgttagttggcttttgaatcgattatttcatgcttttttttaaaaaaaaaaaaaaacaaaataacaatctgaagaggcatttggtacagatatgaattctcttacatttatttactggttgtactaaataatgatgacctctgctggatttctgtttacatccagaaaacaatgttaaggatgtatttattcccctaccctgaagaaagtgtaggatagaattgtttttagcattctaaatttaaatgcttaaaacgtcaatcaacaaaactttgttttaaatattgtaattgtggagaaaagtaaacttataagcagaacttttacaattttttcatctaaaagtattttaagatatttttaaaatccaagagcttctctatacttttcagaaatatccagatgcagtgaactgccagaaggtaaccagtctcaaacatgcttatcccattatcaaccctgaaagtttgcttgtcctttaagataaaaatgtaatgttgtgatattccttccagtaatgccactgtattttgtctccaaataaaagaagcttattgtagtatgtttgcagaaaaattctaaacaaaaattatacagcttattagagtgtgggaatagggatctaaattttaaataaaattatatatatatataaattggtgctgattttataattgcgcagtttgtttagttttttcttacttttaaattccaacttaaaattatgaggtttcagaaatatattgaaagtttaacaatgtttaaaaatagaaaagcatgagtgttcatgctttaaaatgatttttaaatttgtattttatattgttttatctatctgtctttgcaagcagtcttcaggttaaagatacttctaacaggttacagtacatttcctctgtatgtaaattagatgggataatagaattcataacccataatattctttgaaagctaagctttaaacttcattttatgtcctttcacaaataaattagtttaaaacagaaagtggctacttgccattttgacatcaactcattttgcgaggcttaggcagctagacatcgtttaaaacaaaatattaacttatat

SEQ ID NO: 2640 - DNA, 6000 bp, Homo sapiens
tctaaatgaagatactgaggcacagaaaggtgtagcaactttccccaagccacacagcaaggatttggcattcatctggttggcaggccaccttctgacccactaggacaagctaccttcccttttattgggctaaaatgtgtgtgactcctttgccatgagaggttaggaaaagtctcctcctaaatctgtcctcctttcttcttctaggtactgagaggttgctttgctctgtaggactagatgaacctttactttgctgagccctgggcaaactcctgggtgttattttcattcgtgggtagttgttagatcattgtttttgtggggcaaggagggttggatttcctactctgccattttgctgatgtcatcctacattttattttttactgatttagctcaggggtatggcccacaagtggactgcctatttttataaataaagttttattgaagcacagccacactcatttgtttacgtggtgagtattatagcttctgtacaatggcagagtgagtagttgaaatagagactgtacggtgtctgcaaagcttcaaatttttactatcgatctcttaacagaaaaagtctgctgacctctgctttggatcatgactgaaaattatacattatgtgaaaatttactattacagcaatgaataactgatttttgctgaaggtgacaaaaattaattttgtggaatacaaaataattcctgaaatatgtatgtctttacattattactcatccatatattgctagcccataagaacactcagacatgcagagtcataattaaactcagtcatctttgatattttgctttcaataatattaaaaccatcactttacacatatcgattttgcttttataaaggtatagttgtcaaaatagaagatagaacatatttaacaattttttttgctttgacttataatttttaattatcaggcatatgctctgtttgtattcttgttctgggcctcttaaatgttagagtgggaagcctggatgaggcctggtaagcatgtcaacacttagatgtcaggagccattttttgctctgttggggccttatgttctgagcaaagcctctgagaagttctaccaatgcttaatgagttcagcaaagcctacctgtctgcagctaccacagggcagtgagaaaaaaaccagcagagcacctgctatgaactaaattgcatcctctgaaaattcttatgctgaaacccaaacacccaatttgactatatttggagatagagtctttaggaggtaattaaaattaaatgaaatcataagagtggaatcttaatcttataggactatgtgtttataataagtgaaatcaatctttctctctctctctctcctttcgctttttcatgtgagaaacacagtgaaaaggtagccatctgcaagatagaaagagggtgctcaccagagaccaaatcctgctagaaccttggtcttagactttcctgcctccagaactgtgagaaaataaatgtatgctgtttaagccaccagtctacagtattttgatatggtaatctaaatacaataagacagattttggtattgagaagtggggtgctgctgtaaaaaatacctaaaaatgtggaagtggctttagaactgggtaatgagtaaaggctagagtcttgcagcacatcctagaaatatggacatttagggcaatcttggtaaggtctcacagagaaataaagaacaagatactgaaaactggaggaaaggtgatttctgttatatggtggcaaagaacttggctgaactgtgtcctagtgttttgcagaagttagaacatgaaagtgaagaaattggatatttaactaaggagatttctaagcaaagtgttgagggattggcttggtttctcctgactaattatagtaaaatgcaagaagagagagatgaattaaagaaggaattgttaagcaaaaaggaaccagaacttaacaacttggaatattctcagcctatccatattgcaaaaaatgaaacttgtcctgaagagaacactaaccctacagctggacaaccatttgatgaagagattgtgggtgggactcatgagtataatcagccatctcagcggaagccaggaatagaagtgggattatatgagcaaaaacactagtttgaactaaaggagacagagaaagctacacagaatgaaggaagacttttgaagttcttggattctcaggagcagaccatttacctatttggctgctaattgcactgttattcaaggaaaaataagaataaccatgaaggcatttatagataatcagggctgacacttctaccacaggcccagggggcaaggctgtttctacctcagtttcaaagggtgataccacctctccagtttcagtgggccagggtgaccccgccctgtgcctcaggggcaaggcagcctttatagacaatcctttgggctggaccctctctgataactgaaggggcagggccctagcagagccatgaaagtgacactgccacccaagtggtgggtagagtgtttaaccaaagaggattattattgagccttaagatctcatggaattcgccttgctaggttttggacttgcttgggactcactaccctttcttccttctgatttctttcttttggaatgggaatgtctatcctatgcctctggcaccattgtattttagaagcacataactagtctggtttcataggttcacagctagagaggaattttgtctctggatgaatcttaccttagtctcaccaatatataatttacatgatatttagatgagactttggacttcagactttaagagttgatgctggaaagagtgacgactttggggactgttggaatggaatgaatgcattttgcatgtgagaaaacataaatttggggcgaaccagaggggttaaaactctctccttaattaaactttagacaggctcttctaagccctctttttgacctcatccttgctaagtctagttttagcaggagtttagcttaagtcactttagtgagaatcccctgctcttgatatccaatcaccttcaatatctgatcacactcttcttccccacccttgatatctgatcaccccagcctacctttagcaagaatcttgttaagttggtttaacaagaattcatctacccttgatgtatcttcttagtaatttttcatccactgaccactttgctctgctccttggctataaatcctcttgcatttactgcatttagaattgagcccagaccaggtgcagtggctcacagccgggcgtggtggcgggagcctgtaatcccagctattcaggaggctgaggcaggagaatcacttgaacccaggaggcggagattgcggaggttgcagtgagcctagatcgtgccactgcactctaacctgggtgacagagtgagactctgccttaaaaaagaattgagcccagttctatcctgaggtctttttgccccattgccatagttcctgaataatatctgttttacctcttttattactgtccagctctggttctgttaggcaaatgctatagactgaattttgtccccctacccaataaaattcatatgttgaactcctaacccccaatttcactactctttcactactgtccagctctggttctgtttagcaaatgctatagactgaattttgtccccctacccactaaaactcatatgttgatgccctaacccccaatttgactgtatctggagatagggtctttaggaggtaattaaggttaaatgaggtcataagggtgggtcccaaataggataggatgtgtccttgtcaaaagagatctctccaagccctgctgccatgtgaggacacagtgagaaggcagacatctgaaagccaggaagtgagccctcaccagaaaccaaccctgctggaaacttgatcttggacttctagcctccagaactgtgagaaaataaatgtctattgtttcagccacccagtctatggtgttttgttacggcagcccgaggtgagtgagacagcacctctgtgtatctgaggctgaggtgtatgcttgtgtgcaatcacatgcattatttccagagtcgaggtgctagaggaagttggtgtggactagagaagcaggcctgaagacacagagcctgtgtggcatggttattaggacttttggtgagtaaggcagagttgagaccaacggtgggagaaagagactgccacaggcctctgcttctgctgggctttgtcttgttctctctttagatttctttctcattggcaatgtgtgtagcttccaaagtgaggtgtaggctgtggacttagtctattgattgtaccacagcccaacaaataaatgatactgtatattgttaactcctttttcccatctctatctactcaggaaggcttagtgtagctgtttgggtagagagacaaaaactggattcttccacaataagcttcttgaccagcaggtgaagaaataatccttgcaagagcccagatccagcttcttgtgagacaatggctgagaagaaatgatagacgggcctgcagaggcctacacgtctgattttcatcagtccctttaggatgtgctatggtttaaatgtgtcctccaaaagttcatgtgttggaaacttaattaccattgtaacagtattaagaggtagggccagaggaggaaaggctgaaggcgtgaaaaggcacgcaggcgcactgcacggaccgcccccctgctgctgcgcacctcacgtggcgcatgttacgccaggtaccacacgccacgtactgcacaccacgtaccacacgccacgtaccacacaccacgtaccacacgccacacacattatgccacgcacgttacgccacgcacgttacgccacgcacgttacgccacgcacgttacgccacgcacgttacgccacgcacgttacgccacgcacgttacgccacgcacctcacggcagccctacactcggcctggaagaattgtttttcttctctggaaaggtgaacatttatagcatttatttcccaaatctgttaacatggcaaaatatgtcagtctcactgaagctaacgaagaactcaaggtcttaatggacgagaaccagaccagccgccccgtggccgttcacacctccaccgtgaacccgctcgggaagcagctcttgccgaaaacctttggacagtccagtgtcaacattgaccagcaagtggtaattggtatgcctcagagaccagcagcatcaaacatccctgtggtaggaagcccaaacccacccagcactcactttgcctctcagaaccagcattcctactcctcacctccttgggccgggcagcacaacaggaaaggagagaagaatggcatgggcctgtgccgtctttccatgaaggtctgggagacggtgcagaggaaagggaccacttcctgccaggaagtggtgggcgagctggtcgccaagttcagagctgccagcaaccacgcctcaccaaacgagtcagcttatgacgtgaaaaacataaaacggcgcacctacgatgccttaaacgtgctgatggccatgaatatcatctccagggagaaaaagaagatcaagtggattggtctgaccaccaactcggctcagaactgtcagaacttacgggtggaaagacagaagagacttgaaagaataaagcagaaacagtctgaacttcaacaacttattctacagcaaattgctttcaagaacctggtgctgagaaaccagtatgtggaggagcaggtcagccagcggccgctgcccaactcagtcatccacgtgcccttcatcatcatcagcagtagcaagaagaccgtcatcaactgcagcatctccgacgacaaatcagaatatctgtttaagtttaacagctcctttgaaatccacgatgacacagaagtgctgatgtggatgggcatgacttttgggct

SEQ ID NO: 2641 - DNA, 6000 bp, Homo sapiens
gaggttcctccaaaaactaaaaatagagctatcgtatgatccagcaatcccattgcttgctatacacagaaaagaaaggaaatcagtatattgaagagatatccgcattcccatgtttatggcagcactgttcactacagtacatatacacaagggagtaatatttggccataaaagagaaggaggtacagtcatttgcagcacatgaacaaaactataggtcattatgttcaatgaaataagtcaggcacaaaaagacaaactgtatattctcattatttgtgggagctaaaaatcaacacgattgaattcaaggagatagagcgtagagggatgcttatcagagaagggtagtgagggtggggagaaagtggggagagttaatgggtagaaaaacatagaaacaatgagtaagacctagtaattgccagcgcaatggggtgatagtagtgaaaaaataatttaattgaacatttaaagtaaataaaacagcataattggattgtttgtaacacaacggataccaaattgatgtataccccatttaccctgtggtaattattacctatttcatgcctgtatcaaaatatctcatgtaacccataaaaatatacacctataatacacccccaaattaaaaattaaaattaaaaaaactctaaatttatgtagggttcatcaattaacctaaatgctacacttatgattttctgtgaagttgttaaattttattggtaaatttattttaattgatattttggtatgatatgttacaagttacattttgtttaccatttttttcatactctttgctcctgtaaaaaaagcaagaatcatttttgtacagtgatcttttatctgacaagcacatgtactgatttatagattaggatgcttatctttaattctgattttttttttcataaacagtctaataatctgttactcatggaaacactattttctacattaacatccttactgcttttatatctgctatatattacttcactggctactacctttattagacaattgaatagaaatttgtgatagcaggattctagtttggttactaatctcaaagcagaagtttcaaattttcccaggtaagtataatatttactatcaagagttaaataaaattttacctagtttgctaacattatcacattaaaaaaaaccctgttattttaggttaattttagatgtatggaaaaattactaagatagtgcaaaaagttcccaagtattccacgtcatacccaccatatataggacaaacataatttgtcactgatgatgttaattcgatcaccacggcaacgtagtgtttgttcagctttcttcagggtaaagtcacattatttttcccctgtgtcatactgccatcctgggaaggacagggagacccaggaccaaccagtagtcaaatgaggcctctgagggagaactgcagagactccctgcccacaaagaggaggatccacagaatccagcttccctcctgctgtcagccatgggaggccctggggcatgctggcccactgtggtgtcccctgacttcttagagggtagaaagaggagagggctgtgctcaagtgagtctcacttcagatcatgagaggggaagggactcaggctcttccaggcatccccaggatgacatagaggaaggactggtgagacatcccttccaagaaacagaaggacacacaaaaccagcccctgttttcacccctgagaggccttgggcagggccctcaggcagggatgctagggcttttcacttcctcttggcttggggtctcatggaaatgggaaccttgatctgaagatcatagtctctggacagcaagggaagggactctgaggccccgtcaggaataataattgcaggaagacagagtcttgtccatgccatttcagacacagggcaccggagccctgccatgggctttggaggccctatcctattgtggatggatgtgattctccctttcttctaccttgcaggtctcagggatgggaggggcttattcggaggtgaaagactcagatgcacagaggcagggagcccagggagtttcaggagtccaggcacagcctctcaggaaggctggaagggaatgcccatggctggtagtgcccctcccctgcccccatgcctgctgccagctctggaggaccccatcagggtccccagatgtacaactttctaatttccattttgggagtctgccggaggggaagttttctctgaggagggcagtttcagttaagtggagagaggagccccaggactggccactcaacaagaagagaattctgtggaaggacagtgacctcccaacacggaggggaggcccagatcacgcccagtcacaacctgctgtaacacctggagaaaggaggtgaccaggagagagcagagaggtgggaagaaagaggtgggctggggagtgacaaagaaaaggtggagggggaccataaggtaagcaggaagggctagaaggaggcagggaagtgggcaggaagaagtgggccagccacgtggaggtggataggaagaagtggaaggggttggggaagtgggcaggagtgggtggaagggggtgaagaggtgagccataatgggtggaatgggtagggaggtgggtaggaaagggtgggagggagtggggagatggacaggaaccggtagaagggggcggaaggtgaacagtaatgggtggaatggagtagggaggtgggcaagaaaaagtggatggaggtggagaggagggtaggaaagggtggaaagaggtggagaggtgggggcggatcctctgcagagaggaggcccccctccccgatgctgggtgtatagcgctctacacccaggagaatggctgacatctaaaacactgaaacatcaaatgttgacatgcatgttgaccaccaggaactttcagtcattgttagtgggatagacctggaggaatcatgaaagcatattgctaaatgaaagaagaaaatctaaaaaggcttcctagcataccacattctggaacatgcaatgatgaatacactaaaaatattactggtttccaggggctgagggctggggttggggcaaggggaattgattcattaggtggaacacacaggagctctaagatggtgaaacaattctgtgggacaatacaatgatgaatacttgccattacacccttatcgaaatgtataatatccccatcgttaagagtgagtcctgatgtaaaccatggacttaagtgtgaggtatcaatacagttccatcagttgtagcaaacatgtcataataatacaaaatgtaaataaaaagatagactttgtgtgtgtgtgcagcaatcagggcagggcgggtggtgtagattatgtaggaactctaattctgatgaagatttctctttgtatttttgaattagcaatgctctaaaaatgaagtttattcatctataaaacgatgcaaatgatttgaatagacactttacgaaagggaatatagcaaacggaaaaaaagcatataaaaagatgaccaatgtcatatgtcattaagaagaggcaaacaaaaaccaaagaaggttccaatacatgcttatgagaatggctaaaacctgaaaatctaaaatactcaatgtaagagaggatatagaataacagaaattctcattccttgctagttgtgataaaaaatagtacaggcacacttttaagtcagtattttatgaagctaatcatatgacaaattggaaaagttaaaagtataggaactgaaaacagaagacagttgctaggagctttgtagaagtgcggtgattgacctcaaaagggatgcacaggagaagtttaggcaggtggaactggtcagtatgatacttggttggtagatatgggagtccatgcattttccaaaatacatataacttcacattctagttaaatctgatgtgtgtatttaaaactttaatcacgtattggttttttaaagggtcacgggttgctgaaaagacagtggtttttttcagggactaggataggaaaagaagcaacaataaggaagcctttaacacagggtatgggagagatgacactaatttcactcacagcagtaaagtggaaaaacttggaatggaatttagaggtcgaaggaacaaatgttgctgtctggacaggagaaggaaggagtataggctcttttaggagtcataccttgagaaagacagaggggcattcccaccccatttcagagggcagtggaggcctgccttagggctaggaggccctatcccactgtggatggatgtgattctccctctcttgcaccttgcaggtctcagggatgggaggggcttattcggaggtgaaagactcagatgcacagggtcaggcatcccaggcagtatcaggagtccaggcacagcctctcaggaaggctggaagggaacacccatgactggtagtgcccctcccctgtccctgctgccagctctggaggaccccatcagggtccccagatgtacaattttctgacttccattttgagagtcagcagaaggggaggctgttgtctctgaggagggcagcttcagttaagcagagaaagaagtcccagaactggccaaaaaacaagagagatgtggaaggacggtgacctcccaacacggaggggaggcgcagactgcaccaagccactccctgctgacacccctggaaaaaggagagtggggtgtcaaggactggggaggtgggagtgaagaggtccgcaaggcttagggagtgagcaggaagggttggagggcagctgggaggtggggaggaagggatggaaaaaaagcagagaggtggggggtggttcctcctcagagaggaggccccgccccacattgacgctgcgtcagccctggacaaccacggcagggttcccggatgtgctttcccgacggccatcttgggaatctgacggatcgaaggcatttgtgaggaggcgcgaatcaagttagcggggggaagagtcttagacctggccagtcctcagggtgagggccctgaggaagaactgagggacctcccaccatagagagaagaaaccccggcctgtactgcgctgccgtgagactggtaggtcccagacagggaaatggccccagaagaagggaggaggtgccggccctctagggaataaataggaagacactgaggagggctgggggaacccccacctcagagggcagattcccagagattcccaccctgctcctcaagtatcagccctcgtagagctccccagtcagctcaggcggggtggcagccatcttattcctgggtgagtggcgtaggggaggcggaggccttggtctgagggtcccatggcaagtcagcacggggagctgcctctggttggcagagggaagattcccaggccctgctggggataagactgaggagtcacatgtgcatcagaacggacgtgaggctaccccgactgcccccatggtagagtgctgggaggtggctgccaccgccctacctcccactgctctcagggatgtggcggttgctctgaggttttgccttaggccagcagagtggtggaggctcggccctctctgagaagccgtgaagttgctaattaaattctgagggggccatgcagtccagaactatgaggctctgggattctggccagccccagctgtcagccctagcaggcccaagaccctacttgcagtctttagcctgaggggctccctcacttcctcttgcaggtgctccaggaaccaggtggtgacgaactgggtgtgaggcacacagcctaaagtcagcacagcagaggaggcccaggcagtgccaggagtcaaggtgagtgcacaccctggctgtgtaccaagggccctacccccagaaacagaggagaccccacagcacccggccctacccacctattgtcactcctggggtctcaggctctgcctgcca

SEQ ID NO: 2642 - DNA, 6000 bp, Homo sapiens
aggcttggaaccaacccaaatgtccaacactgatagactggattaagaaaatgtggcacatatacaccatggaatactatgcagccatgaaaaatgatgagttcatgtcctttgtaggggcatggatgaagctggaaactatcattctcagcaaactatcacaaggacagataaccaaacaccacatgttctcactcataggtaggaactgaacaataagaacacttggacacagggcggggaacatcacacactggggcctggggggtgggggcctgggggagggatagcattaggagatatacctaatgtaaatgacgagttgatgggtgcagcaaaccaagatggcacatgtatacctatgtaacaaacctgcatgttgtgcacatgtaccctagaacttaaagtataataataattaaaaaaaaaaaaagagagatgtgaccttgtagccactggcctcactaatcctaatctgagtattttctttcccatatcacatcttgaaagggaggccttacgtttgctcctagaggactcctgctttgctgtattttttctaagaaacacatccataatgaaggtgtgtgccgcctcatgtgaagcgagaagagagaagcgagttagcccaacctcctccttcctgctggggaacatttcctggagggaaaaggagagaacattctgtctcaaactagggagagagatgagagcgtcccgtccttctagaaagaagtgtgacatctttgtaaaggggaaaggttgtcggagccccacccttgcacaaggtccagtgcaggaagctagaatgtggccactgagagctcatcccttcagtccatgggcagacaatgccaggcaaactgcccttccccaaacacctcagtagagtttggctatccaaggaatgccaagtaatgtttcttagaactttctttggaatcctgaaatgggggcctaagccttggattataaaagaggattcccctatttcccatcacctcatgcctcatgcttggcctcctctgcaggactgggccagatgatcagatgcaaagagaaggattcacctgaggcggcacacaccttcattatggacatatttcttagagaaaatacagcaaagcaggagccctgtaggaacaacaataaagcctccctttcagaattcaaagatgtgatatgggaaagaaaatacccagattaggattagtgaggccaatagcttggaggtcatttctctttagaggtgtcactttagccttgattatgctggggcaacccagcttgaccttgtccttccacggacctgcggtgtccatgtttccaccagttgtttgtttctctatttacttttaggacaaaaaaagtcgccagcttttattttgtggtagacctctcagaaacccagcagcatgcctgtgagcttagcttacgctgttcctctgcatggaataccttctctctcctctccacggtgagtgcctcctcttccttcaaggcctagctgaactgccccctctgtgaaacttcctccccctccccagggaaggtgagtcgcttccacagcacctgtttctgctctcatcctcacactcagcaccctgtaggacaccacgagcccctggaggcccagcagacagcctggaatggaagatgggtttgagtgaattatcgtgctgccgctggccatgaggccttatctgtaaaacagcgtccttcttccctacctcagagctactgtgaggctcaaacaaacccccagggttaaagcgggagctgtaacttgtaaaagaacccccaggtgtcacctcatgcattgatttcctcattcacaagttatcaaatgccagccactaccaggcagaagctgacaaagacacactgccaaccttcaaggagcccgccatctagggtgggagacaggagcaagcaaagagtcacagaagtgcgtttccactctgatgagggcaagcccagagcaccaatgcaggctgctggctcagggaagcctgccccaactaggagatccctaagctgacttcaaaaggccccagaagagtgagtaaaacagagcgcatggtgtcctgaaagacattccatggccagggtgggaaggacaaagtgatggcacagagccagcatgttcttataacagtgacaagctgtgtcacagcaagtgtgaagcaagatcgggagcaaagttgagaacatgtgggggctgtgtgccaagctagggagttacaaggggggaaagatggtggagcccctagaagttggaagcaggagtgagtgttgcgactggaaagatcaccttggctgcagtgcagggaagagattttggacaagtctaaggctccaggcatggtgggcgggggggaatgacaagagcaaatcagagacaagaactacatttgactcttgaacaatgtgggggttaggggcacggagccccgaagtcaaaaatccacatataacttttgactcacctaaaacttcactaatatagcttactgttggctggaagccttaccaataatgtaaacagttgatgaacaaatattttgtacattacatgtattacatactgtgtcccagcaataaattaagctagagaaaagaaaatgttactatgaaatcataaggaagagaaaatatatttactattcactgagtgaaagtggatcatcatggtctccatcctcacggtcttcctgatgagtatgctgagaaggaagatgaggaggagctgatcctgctgctcagcggtgggagagatgagaaaaaaatctgcctgtaaatggactcacaaggttcaaacccatgttgttcaggggtcaactgtaatactgcctgaagacctgctcaacatcaggccactttacatataagtagttcatcccattgagatgcaaaagtatcccatcaggtagacagtactggtctcactcaacaaatgagaaacaggctcagagaggttaagcgacttgcccaaggtcacacagcctgcacacagcctgcgcagaacttgtgtttttcccttgtactctgtcaggcttccgatctgcaggttgacggactgggaagcaaggtatggagggacattaagctagaagggttaccaggggcaaaactgggcagagggatcacaggccaggctaaggagccctttacggttcaggctctgaaggtttaagagcagggagatgccctgaccagggccgttcactacgaagattaacctggtagagcagggaggactagctaggtgagagctgggaaacaggggagctactcatcagttgtctaatatgtgcccctctctgttctaggtcctggagtaccagtagtgaatacaacaaagatgcctgccctcagacagcctgccttctagtggagggacaacaaagagcaaaacaaacaagcaaaatatacagtaggtcagaaggggataagaactgttggaaaaaaaagtagagcaaggtgagtggcttgtttgtactgggggctgcaatacttaaatagggtgcctaagaggaggcaggcggagaggacaactgagacaaagatgagaggcaggagtgtggctggcacatgaggttcaaccacaaagccagtgttctggggctggagtgagccagacgagagaagagttgtggagcgatggaaggggacacgtcgtgccaagctttggagatcacagtgagaactctggctcgtactacttggggggatgatgatgacccaaaagtcaggaatctgttcactgctgaagagagaagagggcaaagggcagcagctccatttaaaaggttctaataagcctcgggcctttctctgtctgagaaacttactctctgccctctgtctccctagattactgcccctatgcctggaggaaaaacaggtgaaggctaaaagccacggggatagctaaagagggcaaactggacctccagctccacttctgcaggtctatgtcagtccacagcccttgcacacgctcccttttaattctccaagcatacctctcacttccaaaactcctgtgactctgctgatgagggcgtctcggcctggaatgctcctccttatctgcattgtgtgggtgtcaaaaagagtatattttgatgacctctccccgcccctcatgctcgctcacatccccctcactcctttcaaagtccgttcccaaaggccccagttcaccgtcctgggctgcttttagccaggtaagatctaaagtgatcctctcttggaacctggtctggggcctatacatctgggtcagtctaggggtgctctcgaagggccaccctcaaagagcgagcctcggctggattcagttcctaggtcccagccgtccgacctctgcgacaacactcagcacaccccttcccctctccgggtctcagttgccccgtgagtacagtccctgctccaacacgcaaggtaatcgtttctggctgctctgatgcactcggtccctaaactcagccttaggtcaacccagaaagcacccgacccgggcgaccccgtagctccccaccctcccgcactgcccagtcgctgacacagggtgacctccaatggcaaggccacgactcttacccgtccgtaggcgcccccctgtctggcctcagctcgcaagcaggctgcacccactgaactccaggcccggaccgccaccctttactcccctcccgcgtgagccgagaatcagccgagcttcctccaccaagaggattggcccagctcggcgacgactcagccaattggcgctcacggcgtgatcttgcccaataaagacggggctctgtcgccagcgtgcccctccccgcgctgggccggggctttgccaggttagtcccaccctcttcggccctgcaccaatagggagaggcggcgacgagcggacggccaatggggagcggggctgcgcgcgcggggcggtgggaacggcgccgagtcagtgtacacgtcggttgcctaacaaccggcagcggactcctttggctatggtgagtgctgccgctctgtcgcgccccacgcccagcggctgagcccttcccaggccccagctcggccacgccgcctctcctgcgcctttctcggctttagcgcaccagtctttcctttgagctctttcccgggagagtagggtacagacgctaaccaacctactgggcctgcgcttcgctgctgcctcctcttcacccacaacaggcccacacccgcccctcgggctccccttgcattccctgatcccctcggtgaacctccctgggcaaaaaagactcgaatccctcacaggcccctgactctctcagaccttggccccctggcctcctcattctgccaaaatttccacacacagctgggaaaaggtgtatcgtgttctgttacaatgttttttacaatttaaatacaggggcattcaggggatgctttagcttcttggagaaggcacgaaggtgccagatggattgagttttattactcggtactgacacaatatacatcttaacaacttactaatatttggccaaatctagaagtaattgggaagtcggagtacttactgggaaggggagtactgggagtgggcatcgtaagactgttttcagaaccaggatccccacgttcgggaagagctgattatctctagttattcacagtcatcttcttgactggctctcttttgggatgattttcagtaagaggtgtccttactgaacaagtgatctccctgcttctagaaacaacagtaaagaaaagggaggggtagaagttcatggaaagattcattgttcttgccagtaaaccctgttatctttctttttaagcaaagctttggaattggttatataaatgactttaaaaatacatatgggtgtctgtaactatgttatgtaaatatggactgtatgatatattattgtgcttgtgtattgcataacatataaaggcctccaactttaagaaggcaaacatggcatc

SEQ ID NO: 2643 - DNA, 6000 bp, Homo sapiens
tatcaacacactttggggacagtaatgataaaagcttcatggacccacatttaacaacaaagcttatgtgataactgtagcaaaagaatgggagtaagactgaacacttctgaatcctcttgttcttgaataccttcaagccaggtcctctctgtaagtttgtatttcacctccagtgattctgagtaggcacaactcttctccccatcacacagacatcaaactccaggcacctagagaagtagcttgccccaaattgcccgatgaggaagtgggtgtgtgtgagaatccagggtttgggctagtctgggctcttcccccaagtttttcttaaggagcagtccctcggcatgagactcatctgggggatatggtaaacttcatattcctgggcccccaagtcctacaggatgtcagggtccagaggcatgagaccgagggccaggcttctggcctctgtaacgtgctccccgggtagggttaccagtggcaatacaggatgcttaggtaaatttgcatttaagatcaacaatgaataaacaaaaaatacaaatgggatatagtcatactaaaaaaaaggcatcattgatctgaaatgcaaatttacctcaactttctttttattagctgaatcaggcaaccctatccccagaggactagcctacccccagaagtttgaaaatctgttttctccctctccatgtgaacaaacgagcattccatcattgttcattttctattctccctcaccccttctgcctccccactctcaccctggagcagagactttaatgtcatctaccaggatttctcacacagggaatcccgggcaaggccaggaagatggttggatggggtcactcagcccaacccacctccaagagtcgatgagataccataagcaaataaattcacgagaggttggctgaatccatcctagtgttgcgttagcctggctctccccattttattcaagcacaaattactaacaagactcttttccagtcttagctttgccaaaactatttttagagcatcatttaggcttaggtgatataaaaattctgctagttttacaaaccagcagccttccaaggcaaaaagcaattcatgccaggaaagtagcaaaggattattcattttctgtccataggctggtaaggagttttgtatctaataggctgccttcaacacaataattgagaagaggaactcataagcaaagctaaagaactcatccttagagaatacaagttcaaactgagaaaggttttacttttaagacaaaacaaatagcattaacacacatccaaatgccagtgcaggagttcactgggtttataaaagagaaaactaaactcaagtgtcaaataaaaactggagccgtcaagaatgactgcttgtggcaacacaggtgtaacatgtgcttgtctaaagtcgttctgtgtttgtggatatgtggaaatgcatgacgagggaaacgatgcaaggcaaaatggcaggtgctcaaagctttaagatccttttcttcacgcttgtgtgctcttgttttgcttttgagaattagggtaattcgcaggtcattttacaaagaactgtaatatcaaagaacacttccaaacggctaaaataggctcaaggtcactattaaagtgataaagggaggtccgtgggggaaaagtttgtgttctcaaaagccagatttcacaccatggcaggcactaaatctagttacatgtgcttgcagtagaaaaagaagacactgatcttaatagaggctggtctttttcatgatgcgcaggaactcttgctcactgacctctccatctccatctcgatcagcttcatcaatcatttcctatatgacagtaaagattcaggttaatttataaactaatgccaaaaggtgactaagtaatagacttttttttttttagagatggggtctctatgctgcccacactggtctcaaattcctggccacaagagatcctcctgcctcagcctcccaaagtactgggattatatgcatgatccactgtgcctggcaagcaatagacttttaatctatgtgaatagataatttgtatctatgtgaatagatcattgtagtccacccaatgccagtatgctactcctgataatagcttggtttctgaaaagttatttgaaaaccaactcatactttgtcaaacatatcacctgggagggaccttgaagattgccttgactagagggattcctggaacctaaaatagtaagcaaaattgtgcatatgtgcatttttctggaagcagggttcataggtttgtctgactattaaaggagaattaagttgtctgcagagggacaaagtacactggcttttcttcaaagaggtgctcacactagggaaaatgtaatggaaaagtcacagagggctcaaaggtgggaattttaagttccagtgtgatgcattacaaacctgcagctcctcatcagtcaggttctcacccaactccttggccacgcgtttcagatttttgaacgaaatcttcccagtttcatcatcatcaaagagcttgaaagctttcaggatttcttctttagtatctttctcagacttaacaagtagaacataaaacacatgagtagggggacaccacggttggttactactgtcctgtagccctgccactgcctggtcaggtcaccctttcctttttaacaatgtaactcgagtctagacttgcggcaagtgtcaggaagcccattttggcctcaaagaaacaccaggcaagccaggcactccatccaaggtgacgtttgctacctatcgctatatctctccctatcccatatctatttcctaactgatttggaattctgtgggaagaggtatctgcttggaagtcttgagaaagaagcacaagggcttgttttgggagcccaaagtaacatgatgggagggcaggcctcctgatgcagttgctacctggactgctctgtggtcacatgactgttttaacaggaagacgccatggacctctgcagatgactggggctccataccatgataattgtcttagctacttaccattttctgggtcatcacagttaaaaagtcaccaaagttcatttttcctgtcccttccttatcaatttcacttatcattttcttaatttcttctttcttgggttcaaagcccagggccctcattgccacctataaagaaaacaggatcgtctcaataagcacatctaaagtagcaggagcaaaaataacagtgttgagagcattaagccagcatctgatgtggtcatgttaatatgattggggaacactatgacattgatctaattgatatttgcaatcaattttattgaataatactcaaagtaagtaaagacaggaaaacagcacagtacaacctcccctgttacttactgcagggagaagagggcaaaaggggtagagaggtgatagggagatgacaaggaagaggcagaggaaaggaagggcagtacggcaggaatgcacagagcttgccttcagttctttaacatctatggtgccagttccatccgcatcgaaaagatcaaaagcttcccggatctcctgcttttgctcttcagtaagctcaggcttagggctcattctttttcgctgagaacttgatgccatgtttgccttcttaaagttggaggcctttatatgttatgcaatacacaagcacaataatatatcatacagtccatatttacataacatagttacagacacccatatgtatttttaaagtcatttatataaccaattccaaagctttgcttaaaaagaaagataacagggtttactggcaagaacaatgaatctttccatgaacttctacccctcccttttctttactgttgtttctagaagcagggagatcacttgttcagtaaggacacctcttactgaaaatcatcccaaaagagagccagtcaagaagatgactgtgaataactagagataatcagctcttcccgaacgtggggatcctggttctgaaaacagtcttacgatgcccactcccagtactccccttcccagtaagtactccgacttcccaattacttctagatttggccaaatattagtaagttgttaagatgtatattgtgtcagtaccgagtaataaaactcaatccatctggcaccttcgtgccttctccaagaagctaaagcatcccctgaatgcccctgtatttaaattgtaaaaaacattgtaacagaacacgatacaccttttcccagctgtgtgtggaaattttggcagaatgaggaggccagggggccaaggtctgagagagtcaggggcctgtgagggattcgagtcttttttgcccagggaggttcaccgaggggatcagggaatgcaaggggagcccgaggggcgggtgtgggcctgttgtgggtgaagaggaggcagcagcgaagcgcaggcccagtaggttggttagcgtctgtaccctactctcccgggaaagagctcaaaggaaagactggtgcgctaaagccgagaaaggcgcaggagaggcggcgtggccgagctggggcctgggaagggctcagccgctgggcgtggggcgcgacagagcggcagcactcaccatagccaaaggagtccgctgccggttgttaggcaaccgacgtgtacactgactcggcgccgttcccaccgccccgcgcgcgcagccccgctccccattggccgtccgctcgtcgccgcctctccctattggtgcagggccgaagagggtgggactaacctggcaaagccccggcccagcgcggggaggggcacgctggcgacagagccccgtctttattgggcaagatcacgccgtgagcgccaattggctgagtcgtcgccgagctgggccaatcctcttggtggaggaagctcggctgattctcggctcacgcgggaggggagtaaagggtggcggtccgggcctggagttcagtgggtgcagcctgcttgcgagctgaggccagacaggggggcgcctacggacgggtaagagtcgtggccttgccattggaggtcaccctgtgtcagcgactgggcagtgcgggagggtggggagctacggggtcgcccgggtcgggtgctttctgggttgacctaaggctgagtttagggaccgagtgcatcagagcagccagaaacgattaccttgcgtgttggagcagggactgtactcacggggcaactgagacccggagaggggaaggggtgtgctgagtgttgtcgcagaggtcggacggctgggacctaggaactgaatccagccgaggctcgctctttgagggtggcccttcgagagcacccctagactgacccagatgtataggccccagaccaggttccaagagaggatcactttagatcttacctggctaaaagcagcccaggacggtgaactggggcctttgggaacggactttgaaaggagtgagggggatgtgagcgagcatgaggggcggggagaggtcatcaaaatatactctttttgacacccacacaatgcagataaggaggagcattccaggccgagacgccctcatcagcagagtcacaggagttttggaagtgagaggtatgcttggagaattaaaagggagcgtgtgcaagggctgtggactgacatagacctgcagaagtggagctggaggtccagtttgccctctttagctatccccgtggcttttagccttcacctgtttttcctccaggcataggggcagtaatctagggagacagagggcagagagtaagtttctcagacagagaaaggcccgaggcttattagaaccttttaaatggagctgctgccctttgccctcttctctcttcagcagtgaacagattcctgacttttgggtcatcatcatccccccaagtagtacgagccagagttctcactgtgatctccaaagcttggcacgacgtgtccccttccatcgctcca

SEQ ID NO: 2644 - DNA, 6000 bp, Homo sapiens
tggagaggcttagagcagcatgagggagaacggttcggaggcagcaatgatgagcatgaaagatgtctaccccatctccaggcctggaggtgtgggcagcacgggagagaaaacaaccgtaactttgcagcggaagcaatggccttaatatttcatcaacaaaccatatagcgaatgacaccaaagccaagaataagggcccagtgacaggctgagggaagccatccataataagtacaacgggcacaggattggcatcccaactagatcaacaaggaagcaaaggtaaccccaaagacaaaggggcaaaggacacagacaaacatttcacacaggaggaagcctgaaagccgatcacccagtggcagagtggctggttacttggtcagggaggacatgtgactctgaacatcagtgaagcaccacttcatacttctcagaatggcaacaccaaaaagtctagttatgcccagtgttggcaaagatgtgaagcaatggggcttgtgccacattgtggatatggaggtaaaattgacatagcagctttgctgagccatttggcaccatctaataaaattcaagatattcatacctgtacaacatggatgaagcttgaaaacatcatgctaagtgaaaaaagtcaggcacagaggtacaaatattacatgattccatttatatgaaatgtccagaagaggccaatccatagatgggaagtagatgagtggcggccaggggctgggaggggaagagaggggatggctacaagatttcattttggggtaatacaaatattctggagttagatcatgggagacagttgcacagctttgtggatgtactgaaaatcactgaattgcacactttaaaaatgtgaaatttgtggtacatgaattatatctcaattaaaaaatcaagaccctgtggcccagcacacacttgttttgcagttggaacaatacagcccatggacggcttttgaagtcaagtttcactggcatacagccacagccatttgttcatttaagtgctgaccatggctgcttttgtgctaccaggacacagctgagtatctgtgacagagatgatggttattcattctaagcagtaagaatgtggtgttctttcctataactttgaaaattttcacaatgaaacaattgtttttcaaacaaattggctggcttctgagcaagggaagtatcgtggtttcccttcgtgggctcgtgggaaatcagcaaggctgcatggtccattacctgtcggctgcagaggtcacccagaaagaaccgcacctggggattatcaaacccttgctggatatcaaatacattgacagcatatcctcttgccagcaactgctccaccatgtgctgccccaggaatccagagccaccgatcactgtgcatctcttggcctgtggaaagagaggaacggtggggaagaccagggtagtgaggactggaagctacagagtccagacttacatatcatgagccactgcaatggcagatatacttgtttgtttggaactcttcttgagccaagttggaagctttatatcatcctggtgttccatcactagtgcaaccctaaccttctctcctgggatcagtaaggagggaagagagatagcgaatgacactgagattgactttggttgggtttgatgacaagatccatgctttgtattcagtgaaaggaaatcaaaccacctatgaccaaaactggacaatctaaaaaataccccaaaaaacagtgataccttcttgttcccgatagctgatccctgggcgcttctctaaggacaaaacaaaacaaaacaaaacggcagccatttggtagctgatagcttgcactgaaaacaacagaaagaagaaagcagtctccatacttgcaggacaaagtcagtccctttccctctctggccacaacagggctgggctgtgtggctctgggctcatcgcccaaccccttcttgcctcagcctagaaatctaagaccgccttgatgggatctcctggtggggctgcagtgaggatggatgagcccagggctctgctttccctcctccgaactacaaggaagttgaagaaatggggagagccatggtgtttatgtctcagcctccacaacacacacgattccttgggtaattccaactctggtgactgggcataatgaaaggacacagtagcacatgcaggcacttaaataccctcatttcaggatgttgatgccaaactgtggctgctgcacaccagacaagctggctatgggtgtctgtgaggaggacctgtgatatccctcctccctagggtctttctaaaactgtatctgggcctccttaagatgacaacctccaatttccttagctcatatacagtaaatccaacttgggtttgtggaaatgaaagatcttaaagaaattatgttctagatttaaaaaacaaacaaatctccctacttattccttaaacatcaacacaattgagctatgcaagagactcaagggatgccagggccagacatcctctctagatccacctccctcccagttggggtgtcccatctgaaacagcactcatactggattccaccaggcccagctggagctggcactgtactttaccttcatctgtccatgtgcaatctactaacaaaatcagcctcaccattcttctaccacccaaaactaacttcccaacctgttcttttctaggctttattctgattattcctaaacacatgtaatcataccaggttacatgatttgcacctggactgagatgtatatttcctcaagtcatagccaaattaaatacaaaactcacatcaatcccttttctagcaatccctttcttctcccctcctcccaagtcagctgtacaggcaaactgtagctatttagaataactctgagctgcctgtttcccaacctggatttctgcagtttactaaaagtctggctaagcccaaagacagtcagaactagatatgttactaaagcatcctgaaagatttcagactgccttgtttatttcatttggcatctctagttacaggtgtttcaaaaggttgctaatctcttcaaaaaacaaccttgctgttagtccagtgtgatttcatttcacgattttaattgtgactaatcagtacgctactcttggacaatgtgacgtggattattttatgatattgaaatgttctatcaataatgtttgggatgagtaggccaatggctgttccctggagacccttgtagtgatgggaatcaaactggcctttaccccagggaagtcaaatgtgtgataatcatacctataatgctgtgtgattacaggagatcacatgaaacttttcatgaccactttttacttctcacagccacagtggacaagaatgaacatgtactaacaatcaagtataaaactcaagactggaaacagcaagactccataatgggttactgaggtgagttataagatcaacctcttggagacagtgttaagaataggggccaggcacggtggctcatgcctgtaatcccagcattttgggaggccaaggtgggtagatcacctgaggtcaggggttcgagaccagcctggccaacatggtgaaatcccgtctctactaaaaatacaaaaaattagccaggtgtggtggtaggcgcctgtagtcccagctactcaggaggctgaggagggagaattgcttgaatccgggaggcagaggttgcagtgacctgaaatcacgccactgcactccagcctgggcgacagagccagactccatctcaaaaaaaaaaaaagaaaaaaaaccatttaggcaaactaatctaattgcaatagaatcttgagataacagaatagtctagggcgctgggtttttccaacccttcttgttttgctttgttgtcagcagtgggacccttttctcagagaggtcttatgcagaacgtatagtaagttaagacaaatgtgttctttttgttttagtagtctaaatttagaacttttacttcttataaaatcagtccactaatgagagaaaaaaatgttatttcgaaggacacaaaaatttgaaactagctgaaaatggcagtttgctataaccattggaatccacctttgtttgctggctgccaagtagccataaaacccaaatttacataaatgaggaactgcagatggcacgtggcttcaaccacagaggcccagaggaggcttgactctgagttctacaccaaatacagggtgatttcacggcccatgataacctcttagggatcttgaacctattaacatttgatataaacacattttgtcttgatgtaattacgttgtttgttttgttttgttttgtttgtttgttttgagacagagtctcgctctgtcgcccaggctggagtgcaatggtgtgatctcagctcactgcaacctccacctcctgggttcaagtgattctcctgcctcagcctcctgagtagctgggattacaggtgtctgccaccatgcctggctaattttttgtattttcagtagagatggggtttcaccatgttggcctggctggtctcaaactcctgacttctggtgatccacctgtctcggcctcccaaagtgctgggatttcacaggtgtgagacaccgtgcccagccacatttttgaagtgcagcactgattaagaatcaatcaaagcaaacctttgcagactgatgtgaagaatctccaggaagcctgacaacgaccaggctcaacaatttcttcaagtcctctctcagactgagacttgcgacactaaatcttaggcctaataaatactgctgccatttcactaggaagcccagcctggtctactggaggccacatgaaggcaaaccaaggtgcccagttgacagccaccagttactaccagaggtgtgagcaaggccacctgggagcatatgcttcaaggggtccccatgtgattgcaactacatgcaagagcccaggggagaccatccaagaacaccccagctgggctcagccgaaaccacagtcataagcaaagaaatggttgttcttttaaaccactgtgttctgatattgttacacagcaataagtaactgacacatcttaaacaaagctatatatcttacataaaaaatacccaacattgattaatacatgtacaaatacaatttttcacccacaggtaaatagtatcagcctgttggtatgtacgtgtcaactttctccttacctgattctggttaaccttttctatgtcagcattcactttgggagtgtcctctgtcaaatgagtccgtgcgacttggtctctcattggctcgctaactgctggttccatttcgaagcaaaatatggtcccgtttgtaatcaacttttcttttcttaaagacatagttagagacagacattaatgttgcctaagtcaaaacatctttagttgttagtgttttgggcagatgccatccccccgttcatgtttttacaaatagctgaaccatagcgacagctgttcgacaagacactaggctcctgagtagctgggattacaggtgtctgccaccatgcccggctaacggggccaacgactgggcctatgactcaccacactgttagattagaggcgcacaggaggccagttaaatcagctcacttatcagtgacaacataaaaaacgtctttggcattgtagctttttccatggctctcccacgcttcagtcagcgtggatttcccctgtggtgctcattagggtgtagcagtgcccacacctagggagtcctgctctgggcctatcacgaactgtacggaattgctccagtcacttccctttgctgcagctcagttttcccatcaatgaaatgggcacaagggctcatgtctaggagctcaggacatgggatgctgggacgggggatgagtggagtgcaataggagacggagctctcctgcttggctaagttaaagccgccctgacgatgcg

SEQ ID NO: 2645 - DNA, 6000 bp, Homo sapiens
acagcctccagaacattccctgagccgccaaggctgccggcggagagtagccagaccacacttcccttcctggcagtgatgccggctcatgcacctgcttccccctttcagaccaaagggcccctgccagcgggaacaatcctgaagctggtgacctcagcagatggcaagcccaccaccatcatcactaccacgcaggccagtggggcggggaccaagcccaccatcctgggcatcagcagcgtctcccccagtaccaccaagcccggcacgaccaccatcatcaaaaccatccccatgtcggccatcatcacccaggcgggcgccacgggtaggggcctcccccgacatatgagtgtctgcaagtcctcactggaggggaaatggagtccgggttataaggcgtgctgtgtttctgtttagtttacccttttctatcttctccttgctgccttttgtgtctaagggtagtgaggagatgggcagggctatggctgtgacttgtggatgttcattatagtctaggggcagcaggggcagccctcacagagcctgtctcccctgggccccactctcccatccaggtgtgaccagcagtcctggcatcaagtcccccatcaccatcatcaccaccaaggtgatgacttcaggaactggagcacctgcgaaaatcatcactgctgtccccaaaattgccactggccacgggcagcagggagtgacccaggtgaggcactcccagccgtctctcagcccagtgtcctagtgcagtccaccccagcacgccacgcaggtcctcccgacaggcctgggaggggcagcatcggtggcatctaccagcctggtggtgacgttggtggcactttcctctggtgttccaggtggtgcttaagggggccccgggacagccaggcaccatcctccgcactgtgcccatggggggtgttcgcctggtcacacccgtcaccgtctccgccgtcaagccagccgtcaccacgttggttgtgaaaggcaccacaggtgtgtacccataggccaggtcccctgccacccctagattataacgaagcagggctggccttcaatccccatggcacagctgggtggcacagcagctcctctctcccgagccttctatgcaagcagctccagagtgccccagcctgtgcaggaggagctgctgggaaggagacagcagcagccttggcccaactcttgcctcctttccttcaggtgtcacgaccctaggcacagtgacaggcaccgtctccaccagccttgccggggcggggggccacagcactagtgcttccctggccacgcccatcaccaccttgggcaccattgccaccctctcaagccaggtgatcaaccccactgccatcactgtgtcggccgcacagaccacgctgacagcggcaggcgggctcacaaccccaaccatcaccatgcaggtagggcagggcctgaggccacgtgtgggcgagggaccccacacaagtggaagcacgtgaggctcacgccgtccgtccacaggcctttccttcctggtgttgcgctgctgccgggtgcagccatggcaggcctttcctcacctggggcattttccctggtgtcacatggtccctgtgtcatagtccgtggtttggctgtcatggtttggccatgcctggtgtttgaacaccgggttcttcctctcgcagtgttctacaggacgccgcagctcgtctgcatgtgtgtgcagtgttctgttcatacatattaaggaaaacggtgaaacgtttgttgttggcctttgagcattgagggggatttccattctctgacaaaggacttgacttcagccagcctcctgccttccccttgccctgtcctcacagcctcttcctcatcccagttgcctttgaggcaaagtggtgcctcttccctggcctctgagcaagtcagtgtcttgggggcaggggtgagtgggtcttacgtctgccagggccgttgagaagtggtcagtggtcccagcctgtgtggtgacagtgcaggacagtgggagggacaggcagacagccagctgcagcactaactctcctcctcgtgtgtctccccagcccgtgtcccagcccacccaggtaactctgatcacggcacctagtggggtggaggcccagcctgtgcatgacctccctgtgtccattctggcctccccgactacagaacagcccaccgccacagttaccatcgccgactcaggccagggtgatgtgcagcctggcactgtcaccttggtgtgctccaacccaccctgtgagacccacgagactggcaccaccaacacggccaccactactgttgtggctaaccttgggggacacccccagcccacccaagtgcagttcgtctgtgacagacaggaggcagctgcttctcttgtgacctcgactgtgggccagcagaatggtagcgtggtccgagtctgttcgaacccgccctgcgagacccacgagacgggcaccaccaacaccgccaccaccgccacctccaacatggccgggcagcatggctgctcaaacccaccctgcgagacccacgagacgggcaccaccaacactgccactacagccatgtcgagcgtcggcgccaaccaccagcgagatgcccgtcgggcctgtgcagctggcacccctgccgtgatccggatcagtgtggccactggggcgctggaggcagcccagggctctaagtcccagtgccaaacccgccagaccagcgcgaccagcaccaccatgactgtgatggccaccggggccccgtgctcggccggcccactccttgggccgagcatggcacgggagcccgggggccgcagccctgcttttgtgcagttggcccctctgagcagcaaagtcaggctgagcagcccaagcattaaggaccttcctgcggggcgccacagccatgcggtcagcaccgctgccatgacccgttccagcgtgggtgctggggagccccgcatggcacctgtgtgcgagagcctccagggtggctcgcccagcaccacagtgactgtgacagccctggaggcactgctgtgcccctcggccaccgtgacccaagtctgctccaacccaccatgtgagacccacgagacaggcaccaccaacaccgccactacctcgaatgcaggcagcgcccagagggtgtgctccaacccgccatgcgagacccacgagacgggcaccacccacacggccaccaccgctacttcaaacgggggcacgggccagcccgagggtgggcagcagccccctgctggtcgcccctgtgagacacaccagaccacttccactggcaccaccatgtcggtcagcgtgggtgccctgcttcccgacgccacttcttcccacaggaccgtggagtctggcctagaggtggcggcggcacccagcgtcaccccccaggctggcaccgcgctgctggctcctttcccaacacagagggtgtgctccaaccccccctgtgagacccacgagacgggcaccactcacacggccaccactgtcacttccaacatgagttcaaaccaaggtaagtgaaggtggccagcctggctttcatggtctcccagccccccaggctgaaaggccaagacaacgatggcgggggtccgtccagagtccaccagtcaggctccttggcacccaatttaccagtggggagagctggggcgtcctggctgtacctgaagcagacagaggtctccaggagcctgtcctgccttatctggccctccccttggtggtagaggaagcctgtggtggtcaagccaagtacaggccgggggggctcctgctgagcagccgcctgcctgtcgcccccacagaccccccacctgctgccagcgatcagggagaggtggagagcacccagggcgacagcgtgaacatcaccagctccagtgccatcacgacaaccgtgtcctccacactgacgcgggctgtgaccaccgtgacgcagtccacaccggtcccgggcccctctgtgccggtaagagcccagggggccgtgttcttccccgccttcccggcctacgcccgtgcagttccacactcagacgccagatgtcgctcttgtaccaggcatggggccgctcctggtcccttttccggaccataaaagggcagcctcggtgcctgctgcggcaggaggcaggagcctcaccgtcccccgcatctctggggcgcttttatttctgggactggttctcatcgcgtgtcacttcaccgcagcctgtataagacatggcgggggtctgagtgcccatttgtccaggccagggtgactgaggacgggttaaacctgaccgggggtctcaagggcctttctcctcatgctggtcagagaaccactgtcccctccctatttaacatgggctggagctggcccatcaagaatgaaaacttaggcccacaaggaaaggtgagggctggcttgcttctcagccctgctgcctggctctggcccctctcctcccctctgacaggggcttctctccctttctagaagatctcatcaatgactgagactgccccaagggctctgactactgaagtccccatcccggccaaaataacagtgaccatagccaacacagaaacttctgacatgcccttctctgctgttgacatcctgcagcccccagaggaactccaggtgtcgccaggtcctcgccagcagctgccgccacggcagcttctgcagtcggcttccacagccctgatgggggagtccgccgaggtcctgtcagcctcccagacccctgagctcccggccgccgtggatctgagcagcacaggggagccatcttcgggccaggagtctgccggctctgcggtggtggccactgtggtggtccagccacccccacccacacagtccgaagtagaccagttatcacttccccaagagctaatggccgaggcccaagctggcaccaccaccctcatggtaacggggctcacccccgaggagctggcagtgacggctgctgcagaagcagctgcccaggccgcagccacggaggaagcccaggccctggccatccaggcggtgctccaggccgcgcagcaggccgtcatgggtgagtgccggtgcaaccctggggaagccgggccgctcgggggagcaataggccgcggagacagcctgggaagaggagcccatttccctcgagggtggcatgagccagatgtgatggggaggacgagcacaggggaccccaggcaggccaagtagtagagactgccgtgtagaacaggctggctggggttagcgcctgggaaacaggcagggcccctcggccagggcttagcctacagtggagcacggtaggaggtggacggggtctctaggacaggctttgggggcctccgcccgggctgcccgcttctggccagccttcctagtaagtagtgtttctctcgaccctggagcaggcaccggcgagcccatggacacctccgaggcagcagcaaccgtgactcaggcggagctggggcacctgtcggccgagggtcaggagggccaggccaccaccatacccattgtgctgacacagcaggagctggctgccctggtgcagcagcagcagctgcaggaggcccaggcccagcagcagcatcaccacctccccactgaggccctggcccctgccgacagtctcaacgacccagccattgagagcaattgcctcaatgagctggccggcacggtccccagcactgtggcgctgctgccctcaacggccactgagagtaagcgactgagggcgaattggtgctggggtggtgggggcacccagggaggtgagggcaggacgggaggctcggtctcacttgggagccaggtttcccgagtctttcccgctgacaccttctttcttcctaggcctggctccatccaacacatttgtggccccccagccggttgtggtggccagcccagccaagc

SEQ ID NO: 2646 - DNA, 6000 bp, Homo sapiens
gggcgtggtggcgcacatctgtaatcccagttactcagggggctggggcaggagaaatgcttgaacccaagaggaggaggttgcagtgagccaagatcacaccactgcactccagcctggggcgacagagcaagactctgtctttaaaaaaaaaaaaaaaaaaaaaaaaaaaaaaaggctgggtgtggtggctcacacctgtaatcccagcacactgggaggctgaggcgggcagatcacctgaggtcaggagttccagcccagcctgtccaacatggtgaaaccccatctctactaaaagtataaaaattagccagggtggtggcatgcgcctgtaatcccagctacttgtgagggtgtggcaggagaatcgcttgatcccaggaggctaaggttgcagtgagccaagattgtgccactgcactccagcctgggtttcagagtgagactgtgtctcaaaaaataaataaataaataaatacaaataataaaataaataaaataaaactactagaagaaaatggggaaatgctccaggaaagattttatggctaagaccccaaaatcacaggcaacaaaaacaaaaacagacaaatgggagtatattaaagtaaaaagcttttgcacagcacagaagcaatcaacaatgaagagacaatataggagaaaatatttgcaaatgattcatgtgacaagcactgtttatttttgaggtgcaatgtccatctgccctactgcaatttaggccccaaatgggtgggacagggtctgattccttgctcttcctcagatgcccagtgaagccctgctcaatttcaattcaattatattaaagaacaaagccagcacctctgctcccttttaccagtcctgtttgctatttcacttctcaagcaggtcctggggcccaccgcatcctcctgggcctcattctcagccttcttgccttggagttccgttgctgaggagggccaccaggcttggcatgtgggtgccccattgccctctgaagcatggtgttgccacacaggaaccacagtcctcactatcactccatacgtccttgcttcacacaagcctgccatctcagcatggggcacccgaactcctcctgccccgtcctcccagtcaaaaaagcctctgggtccaggggtgtgcacaccgcagccccagcatctttgagcagccctggatgggatcatgtctgccctggctttccacccttccatgaccagcttcccattccatgtcctggatcatgtcccaaagtcttggccagacttaaagtgccatccccatccagccctgtgagctcctcaggcccagctctgtcctggaagccctttgcccacttcgcctggccattgcccttgactcagctgtcatttcctctcaggcacttccccgttcagctcctgactccagctgagacaccagctgaggccccgcatggcgtctacaggtccttccctgcacccacctagggccccatggcacccatgctagtctgaccctcctgcctgccagcaagcagggcggagagctggaacaagagtcaaacactgtcaacttgatcgaggaagaactccaggaagggcatggaaagcaactcctctttccggctgcaggggttcagtctatctgaccgggggtacgggctgacagtgaccatgtaatcaaagcacctgtccaagacccccaggaaaaccgagctggttaccttatagcctagcttccctgtacctttgaattgccatgatccttattatgtgacactcaaatctcgtcacagcttcccccagcgcctggcatgggaaagccaacacctcaacagcactggcccctgggtctggggtctttcagggaagccctgggaagcctgacaatctcctggctaaaggccccagactctcccgcacgcgtttaaacagcaggcactgtcacctccaggcctttagcatttatggttagttatgtcccccgctccgcatgacctttcttgctgtctttctgtggataaaggaatatcaattaacattaatttagcttctggactgattccaggcaaggcccttggaaaccagcagctgcttttgtgtgtgtgtgtgtgtgtgtgtgtgtttttgagacagggtcttgctctgtcgcccaggctggagcagtggcgcgatctcagctcactgcagccctgaactccctggctcaagccatcctcccacctcagcgttccaagtacctgggaccacaggcgtgtgccaccatgcctccgggtctcgctatgttgccccggctaggctcaagcaatcctcccacctcagccttccaaagtgttgggattacaggcatgagccaacgcatcaggccttagttttcttatttaccatgggtgggggacttggggacatatgtgaggtaactagccaaggtcacaaagagcaggtggtggcacagacaggcaagaattcttctctttgtcccttctcaaatggatacttccaactgcatgaactaaaacacagacgattacaaaatacatgtaatatgttgagaggcgactttaaaaatattgttgaaaatgtgtgagagggtgacgtgtgcttctttactaacgcattaaattacaaggtcttccagcaggacgcataacttcagtaacttcaaagtaataattctgcccgccggtagatctggtagatcttgtaatttaactgaacttctagacgtttacaacaaaagccacaggctctgacaggaccggtctgtccatttctactggcgactgccgctcccgggcagcagcttgggtccccgcgctgcggcctgcgcgtggcagggcggatgccgccgccgccgccgccgccgccgcgcccgggcggcctcctagaggaggcgaaacgtgggggcgaggccgggacccacctcccagggctgcggtgagcacttacagtattggcgcgaaaaggccagctatcaccatacgggtatttcgcctcactcgcctcgctgggggaaattcaaatctccgaaaagggaggatccgagcagcgccggtgcgcctgcgcgcagggcgggactcgaagcctgggaagcgggcggggcgaggtgacgcgagatgacgcggacgcctcccgcggtcgcccgcccggctcgtgcgccaccggcccgactgcgggcctctcggcagtgggggcggccgagcgcgcggcggtctggggcgcgcggcccggctcattttgctgcggcgcgggcggaggcggtggcgcccgagggcgggccccgcagcctgggagcctgggagcgggcggaggctccacccccgggcgccggcgctcggctgcgtcgcctcccactgtcgccccgcccccggctcccccgcggcgcgcctcgggccgcctcctgcggctgctgggtgtgcagggcgcgaaaatgctcgcttcccggccgcaggcgcggctgcagtggctgttcgccaaccccggccacctgcgtgccgctgtccccagtgctggttaaaggcagttcttcgggcgtgcgtcccttatcaacccgagagaccgttcccaagggggcggggccgagcgcgtcggaggggttagcagtctcatccgggcatttccgagatgccgccgccgccatctttgttttgtgctgaaagtcgctattgacgcccgcggacggccgggcgaggggaagtggcaagatggcggctcccagggcggaggcgtggaggctcgcccggtgggggggccgtggggcggggcgcgcctgcgcctgcacctgatctgagcgcgactcgagctttagcccagcgcgcggcagcgccgacccccacccccgccgcgaggcagcgcaggggtcctttaagaggcttgggcccaggggcgaagcggtgcgagggcgagtggggggaagcggtgacgtcacccggctccgcctcctcgcccgaccgccggcgccgctgccgccatgtttagttgttacttcttcacacaagatggcggctcccagggaggaggcatgagcgccctgccgttaccgcttcttctgccgtacagttgccgcttcggggcctaactctagctctttgaagcggctcctgtgggaaggagtcataaggcgggaagtgaggatcggacaccgccttgagtttggtgtgcagtggaagaactgacctaggaggaagagaataggggggaacggggagctagtctcaagatggcggctcccacggcggcaggcgcagcctgagcagcagaggcggactaaggggagaggcgcgagacttcacaagccgtacggcgcgagcccccaaacggccctcgagagctcgagctggttccaccggcctccggcccgcctccattcgttaggtgtgtcgaggctgtttcgggagcggcggctgcactaaggcgctgggcggggaagcgggacggtctcaagatggcggctcccacaattgtggtctgagcgccggcggggctgcgacgaccgcggcgcttgtggctcctttccacccgccccggaagccggccagtgctggggacttgggggtgtgggaaccgggccggggctccgccatttccggcgggggagggctacgactgaggaagggaggagagagaggcggctcaagatggcggctcccagggcctcccgcccgagcttgtaagcgggagcgcccggacaagtagtcggggcgacgggactcagcggcctccagcttcttgagcctaggcgctcgacagtttcgggcggctcttgcggagacggggtgagcgagaagaaagggaagagccaaagggaaggagggcagttaagatggcggcctccatggagtcgtctaccgctgtgtgagaaaccgcttctccgtgagagctgccttagacgaaagggggtgtgtgaaaggaattgaggggctcccttcccgcttgttgacttctccccaccgcaccctttcccggaactatggcttcggccgtgtcgcccgccaacttgccagcggtgcttctgcagccccgctggaagcgagtggtgggctggtcgggtccggtgccacggccccgccacggccaccgcgccgtggccatcaaggagctcatcgtggtgtttggcggcggcaacgagggaatagtggacgaactgcacgtgtacaacacgggtgagtgcaaagcccgctgggtcttcggctctttccctccctccatctcctccctctccctcctctttcctccctccctccatctgctccctccctctcctccctccctccatctcctccctcaccctctacccttccctctctctctcccctcctcccttacccgtccttctcccctctccccgtccccctcccccttctcccctcctccccctccctccccactgatcggcttgcccctcccctttgctgtgccgggcttcagtgcttttctctgatcttctccccgttcccttgtctctcccgtgtttgaggattggttttcgttagttaaaagaaagcccctagtccgactggtgagggagaggggctgtcgccagcggtggtgacttcagacccacaccgttacccagcgggctggggctggggctggggcgggcggatgtgtccccttggcgcaggcagagctcccctccctccctccctcccttctcctgcgcctgctcagctctccctcatctcgagtgcccattctggagaaatgaccatttctagattacagattcgttctctgtctctcgaaaaagggagggaagggaagcgctcttaggacgcagagtttaacatccgccgacccgggtaatgccggagccttggggacccctaggacgggccggcggcagggccgcctctccctttccacgtttacttctgcagcatttctttccaagtcgccccttctcctaatctggtgccttctggtttacaagctgaattccagttacccctcagcggcctgcgtagtcgtgtgtctccccgcttctgcggatccagggggttac

SEQ ID NO: 2647 - DNA, 6000 bp, Homo sapiens
gtgtgattgcagctcactgcagcctccacctcccaggctcaagtggtcctctcacttcagcctcccaggtaaatgggaccacaggcatgttaccatgcctggcaaatttttaaattttttttgaaagacagggtcttgctatgttgcccagactggtctcaaactcctaggctcaagcgaccctctcaccttggcctcccaaagtgctgggattacaggcgtgagttactgcacccagccaatagttttttattttttttattttttatagttggttttggttttttttgagacagggtctcgctctgtcacccaggctggagtgcagtggcacaatctcggctcaccacagcctgcgtctcccaggttcaagcaattctcctgcctcagcctcccaagtagctgggattataggcgcctgccaccacacctggctaattcttgtatttttggtagagatggggtttcgccatgttggccaggctggtctcgaactcctgatctcaggtgatctggccgtcttggcctcccaaagtactgggattacaggcttgaaacaccgcgcccgccaacagtttatttttaaatggctcaataatattccatcatgtatctataccacattttctttacatatcaatccactggtggacacttagattgcttccatatcttagctattataagtagtacaaaggcacgaagaacctacattggggaaaggatggtctcttcaataaatggcactgggaaaattggataagtatgtgaagaagaatgaaaactaggcccctatctctcaccacacacagtaatcaactcaacatggattaaagacttaaaagtaagacctgaaactataaagctactagaagaggccagcgcggtggctcacacctgtaatcccagcacactgggaggttgaggcgggcagatcacttaaggtcaggagttctagaccagcctggccaacacagtgcaaccccgtctctactaaaaatacaaaaagtagccgggcgtggtggcgcacatctgtaatcccagttactcagggggctggggcaggagaaatgcttgaacccaagaggaggaggttgcagtgagccaagatcacaccactgcactccagcctggggcgacagagcaagactctgtctttaaaaaaaaaaaaaaaaaaaaaaaaaaaaaaaggctgggtgtggtggctcacacctgtaatcccagcacactgggaggctgaggcgggcagatcacctgaggtcaggagttccagcccagcctgtccaacatggtgaaaccccatctctactaaaagtataaaaattagccagggtggtggcatgcgcctgtaatcccagctacttgtgagggtgtggcaggagaatcgcttgatcccaggaggctaaggttgcagtgagccaagattgtgccactgcactccagcctgggtttcagagtgagactgtgtctcaaaaaataaataaataaataaatacaaataataaaataaataaaataaaactactagaagaaaatggggaaatgctccaggaaagattttatggctaagaccccaaaatcacaggcaacaaaaacaaaaacagacaaatgggagtatattaaagtaaaaagcttttgcacagcacagaagcaatcaacaatgaagagacaatataggagaaaatatttgcaaatgattcatgtgacaagcactgtttatttttgaggtgcaatgtccatctgccctactgcaatttaggccccaaatgggtgggacagggtctgattccttgctcttcctcagatgcccagtgaagccctgctcaatttcaattcaattatattaaagaacaaagccagcacctctgctcccttttaccagtcctgtttgctatttcacttctcaagcaggtcctggggcccaccgcatcctcctgggcctcattctcagccttcttgccttggagttccgttgctgaggagggccaccaggcttggcatgtgggtgccccattgccctctgaagcatggtgttgccacacaggaaccacagtcctcactatcactccatacgtccttgcttcacacaagcctgccatctcagcatggggcacccgaactcctcctgccccgtcctcccagtcaaaaaagcctctgggtccaggggtgtgcacaccgcagccccagcatctttgagcagccctggatgggatcatgtctgccctggctttccacccttccatgaccagcttcccattccatgtcctggatcatgtcccaaagtcttggccagacttaaagtgccatccccatccagccctgtgagctcctcaggcccagctctgtcctggaagccctttgcccacttcgcctggccattgcccttgactcagctgtcatttcctctcaggcacttccccgttcagctcctgactccagctgagacaccagctgaggccccgcatggcgtctacaggtccttccctgcacccacctagggccccatggcacccatgctagtctgaccctcctgcctgccagcaagcagggcggagagctggaacaagagtcaaacactgtcaacttgatcgaggaagaactccaggaagggcatggaaagcaactcctctttccggctgcaggggttcagtctatctgaccgggggtacgggctgacagtgaccatgtaatcaaagcacctgtccaagacccccaggaaaaccgagctggttaccttatagcctagcttccctgtacctttgaattgccatgatccttattatgtgacactcaaatctcgtcacagcttcccccagcgcctggcatgggaaagccaacacctcaacagcactggcccctgggtctggggtctttcagggaagccctgggaagcctgacaatctcctggctaaaggccccagactctcccgcacgcgtttaaacagcaggcactgtcacctccaggcctttagcatttatggttagttatgtcccccgctccgcatgacctttcttgctgtctttctgtggataaaggaatatcaattaacattaatttagcttctggactgattccaggcaaggcccttggaaaccagcagctgcttttgtgtgtgtgtgtgtgtgtgtgtgtgtttttgagacagggtcttgctctgtcgcccaggctggagcagtggcgcgatctcagctcactgcagccctgaactccctggctcaagccatcctcccacctcagcgttccaagtacctgggaccacaggcgtgtgccaccatgcctccgggtctcgctatgttgccccggctaggctcaagcaatcctcccacctcagccttccaaagtgttgggattacaggcatgagccaacgcatcaggccttagttttcttatttaccatgggtgggggacttggggacatatgtgaggtaactagccaaggtcacaaagagcaggtggtggcacagacaggcaagaattcttctctttgtcccttctcaaatggatacttccaactgcatgaactaaaacacagacgattacaaaatacatgtaatatgttgagaggcgactttaaaaatattgttgaaaatgtgtgagagggtgacgtgtgcttctttactaacgcattaaattacaaggtcttccagcaggacgcataacttcagtaacttcaaagtaataattctgcccgccggtagatctggtagatcttgtaatttaactgaacttctagacgtttacaacaaaagccacaggctctgacaggaccggtctgtccatttctactggcgactgccgctcccgggcagcagcttgggtccccgcgctgcggcctgcgcgtggcagggcggatgccgccgccgccgccgccgccgccgcgcccgggcggcctcctagaggaggcgaaacgtgggggcgaggccgggacccacctcccagggctgcggtgagcacttacagtattggcgcgaaaaggccagctatcaccatacgggtatttcgcctcactcgcctcgctgggggaaattcaaatctccgaaaagggaggatccgagcagcgccggtgcgcctgcgcgcagggcgggactcgaagcctgggaagcgggcggggcgaggtgacgcgagatgacgcggacgcctcccgcggtcgcccgcccggctcgtgcgccaccggcccgactgcgggcctctcggcagtgggggcggccgagcgcgcggcggtctggggcgcgcggcccggctcattttgctgcggcgcgggcggaggcggtggcgcccgagggcgggccccgcagcctgggagcctgggagcgggcggaggctccacccccgggcgccggcgctcggctgcgtcgcctcccactgtcgccccgcccccggctcccccgcggcgcgcctcgggccgcctcctgcggctgctgggtgtgcagggcgcgaaaatgctcgcttcccggccgcaggcgcggctgcagtggctgttcgccaaccccggccacctgcgtgccgctgtccccagtgctggttaaaggcagttcttcgggcgtgcgtcccttatcaacccgagagaccgttcccaagggggcggggccgagcgcgtcggaggggttagcagtctcatccgggcatttccgagatgccgccgccgccatctttgttttgtgctgaaagtcgctattgacgcccgcggacggccgggcgaggggaagtggcaagatggcggctcccagggcggaggcgtggaggctcgcccggtgggggggccgtggggcggggcgcgcctgcgcctgcacctgatctgagcgcgactcgagctttagcccagcgcgcggcagcgccgacccccacccccgccgcgaggcagcgcaggggtcctttaagaggcttgggcccaggggcgaagcggtgcgagggcgagtggggggaagcggtgacgtcacccggctccgcctcctcgcccgaccgccggcgccgctgccgccatgtttagttgttacttcttcacacaagatggcggctcccagggaggaggcatgagcgccctgccgttaccgcttcttctgccgtacagttgccgcttcggggcctaactctagctctttgaagcggctcctgtgggaaggagtcataaggcgggaagtgaggatcggacaccgccttgagtttggtgtgcagtggaagaactgacctaggaggaagagaataggggggaacggggagctagtctcaagatggcggctcccacggcggcaggcgcagcctgagcagcagaggcggactaaggggagaggcgcgagacttcacaagccgtacggcgcgagcccccaaacggccctcgagagctcgagctggttccaccggcctccggcccgcctccattcgttaggtgtgtcgaggctgtttcgggagcggcggctgcactaaggcgctgggcggggaagcgggacggtctcaagatggcggctcccacaattgtggtctgagcgccggcggggctgcgacgaccgcggcgcttgtggctcctttccacccgccccggaagccggccagtgctggggacttgggggtgtgggaaccgggccggggctccgccatttccggcgggggagggctacgactgaggaagggaggagagagaggcggctcaagatggcggctcccagggcctcccgcccgagcttgtaagcgggagcgcccggacaagtagtcggggcgacgggactcagcggcctccagcttcttgagcctaggcgctcgacagtttcgggcggctcttgcggagacggggtgagcgagaagaaagggaagagccaaagggaaggagggcagttaagatggcggcctccatggagtcgtctaccgctgtgtgagaaaccgcttctccgtgagagctgccttagacgaaagggggtgtgtgaaaggaattgaggggctcccttcccgcttgttgacttctccccaccgcaccctttcccggaactatggcttcggccgtgtcgccc

SEQ ID NO: 2648 - DNA, 6000 bp, Homo sapiens
gactgcaagagtctagtaagaggagaggagggcttggtgtggaaggggacacatttgatgcctgcccaacgcaatgaacaattagatacagggacagaggagagaatggaggcatttcaaaggtgatgggccccaaagacaggtggcagaacggcctctatgaaggtttgcactcccgcccaactccgccaccagctgggagggcgaccctggacctgtcacttcccctcttggaccccaatttcctcatctgcagaaacaaggaagtagttccactaggtattttccaaggctccctccagctccaagaacctatggacattacagagccaccgtagccaaagctctcgctcccccaccccccacacctggcagcactctgaatcctttggcttgccacatggaactaaaattccctaaggacaagcacagtagctaccctaagagctctcaaagcacacaccccctgaagctttcttatcctagcaacgggaaccccttccagatcagctctctccaaaggtacaaggctttttgaggactgatcccgcagaactgcaaggggcacaggcgtgagaatatgccctgatctcatcccaaacacaacaaaagaagacaagacaaaggtgacgaggccgggctggcgggagggggcagaaaccccggtgaggaagagggcttcaggtctgccagctgctctctcgtctgaggaattgccgatgacagtttccaaactgctaccctggaggatcccagagcttcattttaagcagccctttggaaggcaggctacccctctaatgcacaacctgtctttgcagactggtaatgaattcatgccaaagtggtcaattcattttaataaactaatgaatatgcagaggccccaggaagccaaggcagcagtggtggtggactctggagccgactgtaattaggcccctgccctactttctaaaattgcatttccctgccagggagcctgctccaggccttatgagaagaaagtcggtccacagagtggagaaggtgctgctcatggtgacggtgcctctataaacagccccaccactggagaagccttagcttactgagctaattcctgctactgcagctgcctgggctggcgcggggcaccaccaaccaccaagcgcccccgcccgggggctgctgagaaaggccctgctccctggaggcaacaggtgctgagagacctggaacgaaaaacggtcacagacaacccaccagcctttcaaagtcaacgtggtaggtggcgataatctccgagatgtggagaaaccagcactttctgccttggggggtggggaaggaagcggcacccaagagcccagctccagccttcccaactccctaaaccaactttctccctccaggcagctccagcttcccacccccagagcatcgaggcactggagctcagccaaagaacagcagcctctcaccgctcaggacacaaagcccactcagcgagggtttgtctgcagggccaccaccgaggccaggggatcgctagagcccccaggagagaacggccgcggagcaaggggttagtgctgggagccgtgcctgccactcaggactagggcatcccaaggccctcccccagccgcctgcagggggcttttccctcacccagactcttccagctcttgcctgggaccgaactcaccctgaccctgccttctgggcaaggccagggtcctgtgggccaacgggcagtcagtaggcaacttgggaactgacccttgtgctaggggcacaaaacgggccaagtagccaccaagaaaaaggatgccacaaagctgtcgtggacagcagcaggctttctgccctagagactaagcaaggctactaggcagaggcaacaacaaacggcccccacgaaggccgtggtgcatcagccatacctgaagagagaggttcctccccttcccaactaacgggctttgggttttgcagggaggcagaagagcgggtggggtaaccccctggatccgcagaagcggggagacacacgactacgcaggccgctgaggggtaactggaattcagcttgtaaaccagaaggcaccagattaggagaaggggcgacttggaaagaaatgctgcagaagtaaacgtggaaagggagaggcggccctgccgccggcccgtcctaggggtccccaaggctccggcattacccgggtcggcggatgttaaactctgcgtcctaagagcgcttcccttccctccctttttcgagagacagagaacgaatctgtaatctagaaatggtcatttctccagaatgggcactcgagatgagggagagctgagcaggcgcaggagaagggagggagggagggaggggagctctgcctgcgccaaggggacacatccgcccgccccagccccagccccagcccgctgggtaacggtgtgggtctgaagtcaccaccgctggcgacagcccctctccctcaccagtcggactaggggctttcttttaactaacgaaaaccaatcctcaaacacgggagagacaagggaacggggagaagatcagagaaaagcactgaagcccggcacagcaaaggggaggggcaagccgatcagtggggagggagggggaggaggggagaagggggagggggacggggagaggggagaaggacgggtaagggaggaggggagagagagagggaagggtagagggtgagggaggagatggagggagggaggagagggagggagcagatggagggagggaggaaagaggagggagagggaggagatggagggagggaaagagccgaagacccagcgggctttgcactcacccgtgttgtacacgtgcagttcgtccactattccctcgttgccgccgccaaacaccacgatgagctccttgatggccacggcgcggtggccgtggcggggccgtggcaccggacccgaccagcccaccactcgcttccagcggggctgcagaagcaccgctggcaagttggcgggcgacacggccgaagccatagttccgggaaagggtgcggtggggagaagtcaacaagcgggaagggagcccctcaattcctttcacacaccccctttcgtctaaggcagctctcacggagaagcggtttctcacacagcggtagacgactccatggaggccgccatcttaactgccctccttccctttggctcttccctttcttctcgctcaccccgtctccgcaagagccgcccgaaactgtcgagcgcctaggctcaagaagctggaggccgctgagtcccgtcgccccgactacttgtccgggcgctcccgcttacaagctcgggcgggaggccctgggagccgccatcttgagccgcctctctctcctcccttcctcagtcgtagccctcccccgccggaaatggcggagccccggcccggttcccacacccccaagtccccagcactggccggcttccggggcgggtggaaaggagccacaagcgccgcggtcgtcgcagccccgccggcgctcagaccacaattgtgggagccgccatcttgagaccgtcccgcttccccgcccagcgccttagtgcagccgccgctcccgaaacagcctcgacacacctaacgaatggaggcgggccggaggccggtggaaccagctcgagctctcgagggccgtttgggggctcgcgccgtacggcttgtgaagtctcgcgcctctccccttagtccgcctctgctgctcaggctgcgcctgccgccgtgggagccgccatcttgagactagctccccgttcccccctattctcttcctcctaggtcagttcttccactgcacaccaaactcaaggcggtgtccgatcctcacttcccgccttatgactccttcccacaggagccgcttcaaagagctagagttaggccccgaagcggcaactgtacggcagaagaagcggtaacggcagggcgctcatgcctcctccctgggagccgccatcttgtgtgaagaagtaacaactaaacatggcggcagcggcgccggcggtcgggcgaggaggcggagccgggtgacgtcaccgcttccccccactcgccctcgcaccgcttcgcccctgggcccaagcctcttaaaggacccctgcgctgcctcgcggcgggggtgggggtcggcgctgccgcgcgctgggctaaagctcgagtcgcgctcagatcaggtgcaggcgcaggcgcgccccgccccacggcccccccaccgggcgagcctccacgcctccgccctgggagccgccatcttgccacttcccctcgcccggccgtccgcgggcgtcaatagcgactttcagcacaaaacaaagatggcggcggcggcatctcggaaatgcccggatgagactgctaacccctccgacgcgctcggccccgcccccttgggaacggtctctcgggttgataagggacgcacgcccgaagaactgcctttaaccagcactggggacagcggcacgcaggtggccggggttggcgaacagccactgcagccgcgcctgcggccgggaagcgagcattttcgcgccctgcacacccagcagccgcaggaggcggcccgaggcgcgccgcgggggagccgggggcggggcgacagtgggaggcgacgcagccgagcgccggcgcccgggggtggagcctccgcccgctcccaggctcccaggctgcggggcccgccctcgggcgccaccgcctccgcccgcgccgcagcaaaatgagccgggccgcgcgccccagaccgccgcgcgctcggccgcccccactgccgagaggcccgcagtcgggccggtggcgcacgagccgggcgggcgaccgcgggaggcgtccgcgtcatctcgcgtcacctcgccccgcccgcttcccaggcttcgagtcccgccctgcgcgcaggcgcaccggcgctgctcggatcctcccttttcggagatttgaatttcccccagcgaggcgagtgaggcgaaatacccgtatggtgatagctggccttttcgcgccaatactgtaagtgctcaccgcagccctgggaggtgggtcccggcctcgcccccacgtttcgcctcctctaggaggccgcccgggcgcggcggcggcggcggcggcggcggcatccgccctgccacgcgcaggccgcagcgcggggacccaagctgctgcccgggagcggcagtcgccagtagaaatggacagaccggtcctgtcagagcctgtggcttttgttgtaaacgtctagaagttcagttaaattacaagatctaccagatctaccggcgggcagaattattactttgaagttactgaagttatgcgtcctgctggaagaccttgtaatttaatgcgttagtaaagaagcacacgtcaccctctcacacattttcaacaatatttttaaagtcgcctctcaacatattacatgtattttgtaatcgtctgtgttttagttcatgcagttggaagtatccatttgagaagggacaaagagaagaattcttgcctgtctgtgccaccacctgctctttgtgaccttggctagttacctcacatatgtccccaagtcccccacccatggtaaataagaaaactaaggcctgatgcgttggctcatgcctgtaatcccaacactttggaaggctgaggtgggaggattgcttgagcctagccggggcaacatagcgagacccggaggcatggtggcacacgcctgtggtcccaggtacttggaacgctgaggtgggaggatggcttgagccagggagttcagggctgcagtgagctgagatcgcgccactgctccagcctgggcgacagagcaagaccctgtctcaaaaacacacacacacacacacacacacacaaaagcagctgctggtttccaagggccttgcctggaatcagtccagaagctaaattaatgttaattgatattcctttatccacagaaagacagc

SEQ ID NO: 2649 - DNA, 6000 bp, Homo sapiens
ccaaggccgagtcataaaaggtgatgcagctttttgcctttttcactctaacccttgctttggaggtcctgagccaccaagtacagactccagctagtctaaggctgccacgccataaagagaggctgtgtgtagtaggtgctcaagttccagtggaacccagccttccagccatcctagtataggcaacaggcatgttagtgaagaagcttccagaagattatagcctccagccatcctgtcacccctatccatcaagtcatctcagccaagacctcagacattacagagcaaagagaaaccattctcactgtgtcctgtcttgatttctcacctgaagaacctgtcagcacaatgaaatggctgtttaatggcactaagtttggggatggtttgttatgcagcagtagaaacctaaactgtggacattaaacgactgtggattactgaaagcataatcaggtggttatttcaagtgctgctacggttacaggtgtgatctatttgctaaaacaattccatacctcttccaacattctgtaggcagccgttgatctggccaatgataaaatggcctgttgaagattctgctgtgttcctagttgggacacaacactcttgtgaggatctggaccatacgctgaactagaaaccattaaatggtgcagtttttctcatggtcagaatataagaggtctggaaaacagagttgaggtggggaatggcatatctcacagacatgctgaataatctgccttcagaatttttgcttctcaacctcatgactttgtacctggctggtttagattctagtacccaagaaaaacatgcttccacttatgagaatcgctccactaacttgcaaacagagccacttggccacttctggctcctcattgccattacccaatcctcccctctccagctgacttccagttacaactcgttgcccagaattgtgccgcatggccaccctaactgcaagagaggccagtaaatgatgtgacaaaggatctgactggcttagagcgactgtgatgcttgccctgctgctgggcacagtgctgtcctggccaaaactggggctctgttatggagaaagaagaggaaagggatgtctgttaggcagccaactaacagtgcttaccacacatgacctagtgaaacgttttagaagcagtataaccctacaggacctgagggcaggagagcaggctgggaactaaagagcatccatgcagggcattgttaggggcttttctcttagagtacaaaaagatatttagagctattgtttcacatgcctttctttaaatgtgattttcagtttttacctctgccaacatccactaaagtcttatttaatggtataacttggtgtggtgtggtgctgtgaaggtgagagatgagacataaacaattttgaggcctacccttaatgttcactcaccccactctttaaacctgttctttattgagtcccacagtctataatacccttccaataataacagtctgtttcttgtacttccaaacaaaacatttctaagtggcacaagatttggtactagaagcaaagtcttccatgagtcttgcattcagacaaatgcaagaattttgttttggttacctggctagatgtggtgaaaacaatgtggtgaaaaataatctgggatgggaatctagtagcttacagcatttattagcaaaacacctccttcaatccttgtacactctcacctgaactctatcgtccattgcagttaaagctctgggataggcttcttggtccaggcatcacctccacatgaacctctattccagcgtctataccaagaaatcagcctgatttaaaatgatcttctctctttttgggtcaagaaccttcacatatcatttacataaatattacctgtttcctggtacatgtttgcaaactcctactactgttttcatatgcaagctttctcctgctgcatgacttaaattgttcagttgaggcaatgtagaggttaactctagttacaggcctggagacattggggtgggagagtaggagggaagtgcctttgcttccctgctaattccctcatgagacagtaagggaacctgcaatcagataaacgtgggggttgtttaacaatggaggctcagtaagagttggggattctggggactcccaattctccaatttactcccatttcaaatcccagtgttctatgcttttctgatcgtggccccaacctttactaagagaactgagaaggctgcgaactcactgagttttgtaatttggaaaggtgatgggtcaaaattttaaagtttggtttttagttgttttattcttgtgcctgtaaaagataagtaattccttaagcattgttatagaaattccctctgtgacccaaaccaaaaattcgaggaatttggctgtcatttagatgatcccaaaccatcatgagtggccatcctatcccacaattcttgaaatcctgtgcaaccatcaccaaaatgtaattttagaacctttttttatcacctcaaaaagaaactctgtgcccattagcagtcattccccatgttcccctaaattcctaggccaaggctaccactaatctgctttttgtctctagatttgcctagtctggatatttcctataaatggaatcacacaaaatgtggcctttggtgaatggcttctttcactcagcataatgctttcaatgttgtatccatgttgtagcatggatcagtacttcatccctttttacggctccattgtatgaatagaccacattttgtttatctattcatctgttcattttggttgtttctaccttttggctattgtgaacagttcttctatgaacatatgtgtacaaccatctatctaaaaatccattttcgattctcttgggtctatacctaggagtagaattggtgagtcatatggtaactctgtgtttaacctttcaaggaattgccagaccattttctaaagtggctgcatcattgtacttgatggtactcatggtttggtcagacaacacccagtttatcatgggcaggtcaggtcttaagaccacatgtatcacagtcattccgtttcagtaaataattacagcaagccaggagcttttcctcctggcaaattattattttttgtgtgtggaggtcttagctttaagtttatttcaaattccagagggctgaactgtgagtctcttattaaagcttggaaaaggctctgtgtagcatcctaatggggtatgccatctccagaaaatggcccactgagtgtcatgcttcttttttagcaagcagagggttccaagtaaggcaacttgtctttctctttggagggaccgtctcaacatgcctcagcccactgcatgcccaggaagttcactgaggtatcacctccctgaattttcaaggggcttctctctcaccttgtggtgaaatatttgccacttcctatgcatcaggtccactcagcatgatgtcttggggtacagtgagatgatcaaatcagttcccagggactcaattatgataatgtgccagaggcttcctttgttctttccttccattatcaccctcagtccttgagtcaggaagcccctctgggaatttatccagctaccaattgtgtttattacaagtatggattcaagaaccggggaaagagccacagggtggctgatagtgaaagggacgtgggctgactccacttctgaccattggaccaagtggcattctacttccccagtgattcacacgggctagtgcaagcccctggtaaatggccacgggtcccacgagaagggaggaggcaggctgaaagtacacacttgtagcgttacatgtgcctggcctcacctttacaggctcacctcacgggctctggcctgtggactgactagatctgggaattagatgaggcaccatgattttccattgtggtgattcaaggcagaatgcctttagccagacctagagttaccggggttatacagatcatgatggcttactacaggacactgtgatcaattagacaccaccaaagatccctggggagaaatcagtttggttccagcttccagccctgctgcctatcatgatacccaggctcatcctgtttctatgagatttagtgccagtgctttgtctctgctgtttggcgtgaagcccggtcgtagagttcaaattgaggtgtgctgtgagcataaacgcacacaccggaaagtctttgcggggacaaaaaaaaaaaaccaatgtaaaataccccattcatactgttgtgttttgcctatatgtggaaatgataatatttcggatacgctgggttaaaaaaattcattataaatcattttcacctttttctttttactcttctttcatgttgctgctggaaaatttaaaagtcaacatgtggcacgcacactactcctattggccatctgctctagctggatgggaactgcaagcagcaaaggcctttcaacctctccgagcttcaacatgttcacttatgcatcaggactgatccaacagcaacctgaaagggtcggtgtgagaaagcaaagaaagaggtactgtttacggagcgttcagccgtgagcccaggcgcaggcgcggagctaaacccggaggtgaagcaactacagctggggccacgcccacagactccgggctgtcggggcgggcggcactcgcgcttccagcctgggccaaccaggctgcttgaggctcgaagcgcatgcgcggtctcgccctccgtactggccgagccagcaaatcgcattgcgcagacgaccagcgggcgcctcggattccgcccccgggatggccccgcctcctcccgccccgcggcaaggcacgcacagggcagtgcgcgggtgggtgggtcctagcagcgcggcctgacgggaccaaggcggcgggagtctgcggtcgttccctcggctgtggaccgggcggcacgcacgcggtgcagggtaacatggcggatgcggaaggtaagggctgcaggcttccgggccgtgctaactccgggcgactcggggaacgggggtggggggatggtatcggggcccgcgcacgcctccctctggttcccgccggcgtgtcggcctcttcaccgcccggccttaagccggccttgtctctcggccctggctccgtggcaagggcgcgagagtgggagcccctcgcggtgacttggcatgatggggctcggccctctcacctccctggggtccgggtcgccgtcgaaagacatctgccgtgctgcccaccccgcggtggcgtgggacgtggcagtgtctgtgctgctgccagcccggacgccgccgttacagctccatgcgactaggggagcaagggtagtggaaacgggccgagaagaaaaggagcggagggaccccggagcagggatagagctccgagttgcaagaaagttctagaggccacaagcccgcggggacagtcgagtggtcgcttatggaactttccggccccctgcgtgagcgcttctgtgggatgtttaagctctgccatagccacgtggtgaaccggaagggaagccgacacgtgcagtagcctacagtcagttacccagccatgggacccatacatttggccttacacaccttgttttctcgcttacctacggatatacgttctaagaaatgggtcgttaggcgatttcatcattgtgtgaacatcagagggctcttacacaaacctaggtggcataggctactacacacctaggctgtatatggtgtagcgtatggctcctaggcttcaaacctggacagcatggtattgtgcggaatgctgtaggcagttgggacacagcgtcgagagtttgtgtacttaaacatgtctaagcagaaaaaggacagtaaaaatatagcacagggccgggcgcggtggctcaggcctgtgatcccagcccaggctggcggatcacctgcggtcaggagttcaag

SEQ ID NO: 2650 - DNA, 6000 bp, Homo sapiens
tagcctccagccatcctgtcacccctatccatcaagtcatctcagccaagacctcagacattacagagcaaagagaaaccattctcactgtgtcctgtcttgatttctcacctgaagaacctgtcagcacaatgaaatggctgtttaatggcactaagtttggggatggtttgttatgcagcagtagaaacctaaactgtggacattaaacgactgtggattactgaaagcataatcaggtggttatttcaagtgctgctacggttacaggtgtgatctatttgctaaaacaattccatacctcttccaacattctgtaggcagccgttgatctggccaatgataaaatggcctgttgaagattctgctgtgttcctagttgggacacaacactcttgtgaggatctggaccatacgctgaactagaaaccattaaatggtgcagtttttctcatggtcagaatataagaggtctggaaaacagagttgaggtggggaatggcatatctcacagacatgctgaataatctgccttcagaatttttgcttctcaacctcatgactttgtacctggctggtttagattctagtacccaagaaaaacatgcttccacttatgagaatcgctccactaacttgcaaacagagccacttggccacttctggctcctcattgccattacccaatcctcccctctccagctgacttccagttacaactcgttgcccagaattgtgccgcatggccaccctaactgcaagagaggccagtaaatgatgtgacaaaggatctgactggcttagagcgactgtgatgcttgccctgctgctgggcacagtgctgtcctggccaaaactggggctctgttatggagaaagaagaggaaagggatgtctgttaggcagccaactaacagtgcttaccacacatgacctagtgaaacgttttagaagcagtataaccctacaggacctgagggcaggagagcaggctgggaactaaagagcatccatgcagggcattgttaggggcttttctcttagagtacaaaaagatatttagagctattgtttcacatgcctttctttaaatgtgattttcagtttttacctctgccaacatccactaaagtcttatttaatggtataacttggtgtggtgtggtgctgtgaaggtgagagatgagacataaacaattttgaggcctacccttaatgttcactcaccccactctttaaacctgttctttattgagtcccacagtctataatacccttccaataataacagtctgtttcttgtacttccaaacaaaacatttctaagtggcacaagatttggtactagaagcaaagtcttccatgagtcttgcattcagacaaatgcaagaattttgttttggttacctggctagatgtggtgaaaacaatgtggtgaaaaataatctgggatgggaatctagtagcttacagcatttattagcaaaacacctccttcaatccttgtacactctcacctgaactctatcgtccattgcagttaaagctctgggataggcttcttggtccaggcatcacctccacatgaacctctattccagcgtctataccaagaaatcagcctgatttaaaatgatcttctctctttttgggtcaagaaccttcacatatcatttacataaatattacctgtttcctggtacatgtttgcaaactcctactactgttttcatatgcaagctttctcctgctgcatgacttaaattgttcagttgaggcaatgtagaggttaactctagttacaggcctggagacattggggtgggagagtaggagggaagtgcctttgcttccctgctaattccctcatgagacagtaagggaacctgcaatcagataaacgtgggggttgtttaacaatggaggctcagtaagagttggggattctggggactcccaattctccaatttactcccatttcaaatcccagtgttctatgcttttctgatcgtggccccaacctttactaagagaactgagaaggctgcgaactcactgagttttgtaatttggaaaggtgatgggtcaaaattttaaagtttggtttttagttgttttattcttgtgcctgtaaaagataagtaattccttaagcattgttatagaaattccctctgtgacccaaaccaaaaattcgaggaatttggctgtcatttagatgatcccaaaccatcatgagtggccatcctatcccacaattcttgaaatcctgtgcaaccatcaccaaaatgtaattttagaacctttttttatcacctcaaaaagaaactctgtgcccattagcagtcattccccatgttcccctaaattcctaggccaaggctaccactaatctgctttttgtctctagatttgcctagtctggatatttcctataaatggaatcacacaaaatgtggcctttggtgaatggcttctttcactcagcataatgctttcaatgttgtatccatgttgtagcatggatcagtacttcatccctttttacggctccattgtatgaatagaccacattttgtttatctattcatctgttcattttggttgtttctaccttttggctattgtgaacagttcttctatgaacatatgtgtacaaccatctatctaaaaatccattttcgattctcttgggtctatacctaggagtagaattggtgagtcatatggtaactctgtgtttaacctttcaaggaattgccagaccattttctaaagtggctgcatcattgtacttgatggtactcatggtttggtcagacaacacccagtttatcatgggcaggtcaggtcttaagaccacatgtatcacagtcattccgtttcagtaaataattacagcaagccaggagcttttcctcctggcaaattattattttttgtgtgtggaggtcttagctttaagtttatttcaaattccagagggctgaactgtgagtctcttattaaagcttggaaaaggctctgtgtagcatcctaatggggtatgccatctccagaaaatggcccactgagtgtcatgcttcttttttagcaagcagagggttccaagtaaggcaacttgtctttctctttggagggaccgtctcaacatgcctcagcccactgcatgcccaggaagttcactgaggtatcacctccctgaattttcaaggggcttctctctcaccttgtggtgaaatatttgccacttcctatgcatcaggtccactcagcatgatgtcttggggtacagtgagatgatcaaatcagttcccagggactcaattatgataatgtgccagaggcttcctttgttctttccttccattatcaccctcagtccttgagtcaggaagcccctctgggaatttatccagctaccaattgtgtttattacaagtatggattcaagaaccggggaaagagccacagggtggctgatagtgaaagggacgtgggctgactccacttctgaccattggaccaagtggcattctacttccccagtgattcacacgggctagtgcaagcccctggtaaatggccacgggtcccacgagaagggaggaggcaggctgaaagtacacacttgtagcgttacatgtgcctggcctcacctttacaggctcacctcacgggctctggcctgtggactgactagatctgggaattagatgaggcaccatgattttccattgtggtgattcaaggcagaatgcctttagccagacctagagttaccggggttatacagatcatgatggcttactacaggacactgtgatcaattagacaccaccaaagatccctggggagaaatcagtttggttccagcttccagccctgctgcctatcatgatacccaggctcatcctgtttctatgagatttagtgccagtgctttgtctctgctgtttggcgtgaagcccggtcgtagagttcaaattgaggtgtgctgtgagcataaacgcacacaccggaaagtctttgcggggacaaaaaaaaaaaaccaatgtaaaataccccattcatactgttgtgttttgcctatatgtggaaatgataatatttcggatacgctgggttaaaaaaattcattataaatcattttcacctttttctttttactcttctttcatgttgctgctggaaaatttaaaagtcaacatgtggcacgcacactactcctattggccatctgctctagctggatgggaactgcaagcagcaaaggcctttcaacctctccgagcttcaacatgttcacttatgcatcaggactgatccaacagcaacctgaaagggtcggtgtgagaaagcaaagaaagaggtactgtttacggagcgttcagccgtgagcccaggcgcaggcgcggagctaaacccggaggtgaagcaactacagctggggccacgcccacagactccgggctgtcggggcgggcggcactcgcgcttccagcctgggccaaccaggctgcttgaggctcgaagcgcatgcgcggtctcgccctccgtactggccgagccagcaaatcgcattgcgcagacgaccagcgggcgcctcggattccgcccccgggatggccccgcctcctcccgccccgcggcaaggcacgcacagggcagtgcgcgggtgggtgggtcctagcagcgcggcctgacgggaccaaggcggcgggagtctgcggtcgttccctcggctgtggaccgggcggcacgcacgcggtgcagggtaacatggcggatgcggaaggtaagggctgcaggcttccgggccgtgctaactccgggcgactcggggaacgggggtggggggatggtatcggggcccgcgcacgcctccctctggttcccgccggcgtgtcggcctcttcaccgcccggccttaagccggccttgtctctcggccctggctccgtggcaagggcgcgagagtgggagcccctcgcggtgacttggcatgatggggctcggccctctcacctccctggggtccgggtcgccgtcgaaagacatctgccgtgctgcccaccccgcggtggcgtgggacgtggcagtgtctgtgctgctgccagcccggacgccgccgttacagctccatgcgactaggggagcaagggtagtggaaacgggccgagaagaaaaggagcggagggaccccggagcagggatagagctccgagttgcaagaaagttctagaggccacaagcccgcggggacagtcgagtggtcgcttatggaactttccggccccctgcgtgagcgcttctgtgggatgtttaagctctgccatagccacgtggtgaaccggaagggaagccgacacgtgcagtagcctacagtcagttacccagccatgggacccatacatttggccttacacaccttgttttctcgcttacctacggatatacgttctaagaaatgggtcgttaggcgatttcatcattgtgtgaacatcagagggctcttacacaaacctaggtggcataggctactacacacctaggctgtatatggtgtagcgtatggctcctaggcttcaaacctggacagcatggtattgtgcggaatgctgtaggcagttgggacacagcgtcgagagtttgtgtacttaaacatgtctaagcagaaaaaggacagtaaaaatatagcacagggccgggcgcggtggctcaggcctgtgatcccagcccaggctggcggatcacctgcggtcaggagttcaagaccagcctggccaacatggtgaaaccccgtctctactaaaaatacaaaaaatttaggtgggcgtggtggtatacgcctgtaatcccagctactcgggaggctgaggcaggagaattgcttgaacctggagaaggaggttgcagtgagccgagtttctgccactgcactccagcctggggaaagagtgtgaccgtctcaaaaaaaaaaaattatatatatatat

SEQ ID NO: 2651 - DNA, 6000 bp, Homo sapiens
cggctcactgcaacttctgcttcccaggttcaagcgattctcgtgcctcagccttccgagtagctaggattacaggtgcacaccatgacacctggctaattttttgtatttttagtagagacagggttttgtcatgttggtcaggctggtctcgaacttctgacctcaggtgatctgccctcccaaagtgctgggattacaggtgtgagccaccatgccgggcctgattttttttttttttgtacccattaaccatccctacctccctgccagccccccactaccctcccagtctctggtaaccattcttttactcttctctgtccatgagttcaattgtttcgattcttagctcccacaaataagtgagaacatgcaatgtttgtctttctgtgactggccgattacacttaatataacgatcttcagttccatccatgttgttggaaatgacaggatctcattcttttttaaggctgaatagtaatccatcgtgtatatgtaccacattttctttatccatttatctgtcgatgggcacttcggttgcttccaaatcttggctactgtgatctctttgataacactgatttcctttatttggggtatatacccagcagtgggattgctggatcctatggtagctcaatttagtttttcgaggaacctccaaactgttcttcatagtggttatactaatttacattcccatcaacagtgtacaaaggttcccttttctccacatccttgccagcacttgtcattgcctgtcttttggatataaaccattttaactggagtgaaatgatatttcattgtagttttgatttgcatttctctcgtgatcagcattgagcactttttcatatgcctgtttgccatttatttgtcttcttttgagaagtgtctgttcaaatcttttgcctgttttttgatcagattattagattttttttcctatagtgctgagttccttatatattctggttattaatcccttgtcagatgggtagtttgcggatattttctcccattcttatgcatatggatatctagttttcccagcaccatttattgaagagactggtttttacccagtgtatgttcttggcacctttgtcaaaaatgagttaaatgtaggtgtgtgcatttgtttctgggttccttattctgttccattggtttatgtgcctgtttttatgccagtaccatactgttttggttactgtagctctatactataatttgaagtcaggtaatgtgattcctccaggtttgttctttttgcttaggatagctttggctattttgagtcttttgtggttccatgtaaagtaccagtgttttttaacttgtgaaagcttagctactgttggattgtctcttaagactttaaatgctctgcgcaccctcttagtgaatgaaccttagagctattcatttaatgggtctaatttgtaccagaagtaagcatgtcatcaggattccttagctctgtgagcaggcaaggcagccacggcttatggacagcagcagaaaaggaatccttaaaacttcaaaggttctgtggccccaaagggagtgtgcatgccgttcttatagacgtcttgagctgcaagcctgttatgtgtatcgttaggtgctttggttaggtgttttttaacttcagaagtttaacgtcatttcaaaggcctccttctcataatggagtatttcctccatatgcacatcctgagcaaaggtaaccccaattaaagtagtagctcagagttttaaaagttttaaagtggcatacaacagtagaattggggctcatcaattatcaattctttcacccttcaaataattcttttctttattcaatgcctgtagctattgcattaatgaccacagcggtcatctctacctgcgaccatggtatagtagccaagatcaagagagtgatcatggagagagacacttaccctcggaagtggggtttaggtccaaaggtaagtggtactgggttgcgtgccctgccaggttcttttttttttttttttttttttaaatttatttttttattgataattcttgggtgtttctcacagagggggatttggcagggtcatgggacaatagtggagggaaggtcagcagataaacaagtgaacaaaggtctctggttttcctaggcagaggaccctgcggccttccgcagtgtctgtgtccctgattacttgagattagggagtggtgatgactcttaaggagcatgctgccttcaagcatctgtttaacaaagcacatcttgcaccgcccttaatccatttaaccctgagtggacacagcacatgtttcagagagcacagggttgggggtaaggtcacagatcaacaggatcccaaggcagaagagtttttcttagtgcagaacaaaatgaaaagtctcccatgtctacttctctccacacagacacggcaaccatccgatttctcaatcttttccccacctttcccgcctttctattccacaaaaccgccattgccatcctggcccgttctcaatgagctgttgggcacacctcccagacggggtggcggccgggcagaggggctcctcacttcccagtaggggcggccgggcagaggcgcccctcacctcccggacggggcggctggccgggcgggggggctgacccccccccacctccctcccggatggggcggctcctgccaggttcttttgtttggcattgttgaatacttgggcagctcttggtgtgtttcaccaccacagccttgtattgtgctgggctctgggttgtcgatgagtggaaacaggccctgtcttgggccttagagatttcagtctaatgaggggaaacagttgggcattactcacgtaatcacacagtggaatggcgaatttcatgcacgttagtggctaccaaggagtgcagagaggtgtctgtcacctggagtgtccacagtggtcaaggagtctggtcaagggattgtctgttaagccacaccggtgtgaagagtgggttaggtgttggtgaagtgaagaggggaggggagagttcagggcattgggagcaagcagcatgtgcaaaggcaaaaaagtagagtggctgcggtggggacgttatgtctgcagaggctctcactaataagctttgtgatcttcaacaagtcctgtgtgtgttggagttagtgggcaaattctgaatgctctggagaggagtttgaggccctgctgagaatacaccagggaggaaccttgttctattctttgtagtcaccatgcccgcttccagcattgacaccattctaatgttgacaccttgatgttccaccaggcaagtcagaagaagctgatgatcaagcagggccttctggacaagcatgggaagcccacagacagcacacctgccacctggaagcaggagtatgttgactacaggtgagggcaggatgtttcagagccggggtgggtagagacggcacacttgctgccttgatgcaggagtatgtcaacaacaggtgaggatgggaaggtagagcccacttgccatctggacgcaggagtacatggacaacaggtgaggaacaggtgagcatggaggttgtagagcccaggggagggggagtcacttggtttggggcaaacttgctaaatgcaggaccacaggaaccagctcttcagctcccgtgagattttggctgcccaggccagttaggggtgtgggcctgcacggcagacagttatccctttctagtctggctcgtgggactctagagggagtcagtctgcaacagtaagtggtgagttcttctgtccagcgtcagtattttgatggtggctttagacttgccagataacactacataacatcagtactgccctggaaagccattcagtgaatttgacctattgctacctctttttcagtgagtctgccaaaaaagaggtggttgctgaagtggtaaaagccccgcaggtagttgccgaagcagcaaaaactgcgaaggtgagtggcatgctgtcctcagtttggaatgtgcttagggagataatcctaagaggcactggcattcgtcttactttgtgactgtccgcagtccagccatatacgctagcatcagaggtgcagcgcatacacaggtaatgctgcctcataccctggggtgcttgtttgggctctgcaggctcctctgatttgtattctctgtcctatctgctgggaggaggaatgtgggctcaggaatcagatgggcctcgactcctacctcagctatggcagcaacacagtgatggaatgggtggtggtgtgtgtgtcaattctggcccccgccctgggtcaaatggtaggacagatgtgttgaaatcagaggccatggctgttggacattcgaggccatacaaaattcagcagagagcagaattgcatcttaacctggcaccacccagtgttgaaagagtcagtcaagcatgggttggcaactccaccccatggagctgctggcattagagcacagaatgacaggtctgcactcagaaaccgggggcggtactgagtatcctgcacaggctgtgtgggaggagcttctgacttgtcagatgtgaattcctgctttgcctgctttctgtgagaggtccttgcagtcatgagagaaacagctcctccgggcctttccaccccaagccccgtgctgctgctgtgctccttctcttgtgcctgcctcaaggcttcttggatttgggggatgagactgtcttcaaatcctcagtaaactaaggccctgtccgggtttgtagtcagaaaacgtcctgttagattcagttgggatctttcttggtgccttgctaccttttgactcactgaacctttcttgtccattattgcccaagatctaacacttaaccaattgctttcatctcagcggaagcgagagagtgagagtgaaagtgacgagactcctccagcagctcctcagttgatcaagaaggaaaagaagaagagtaagaaggacaagaaggccaaagctggtctggagagcggggccgagcctggagatggggtgtgtggaaacacgttcaggttccttgggctggcttagtccctgcgtggggaaagaattacccaggtggtaccagctttgttactcttcttggaggagctgtggcctgggggtgggatgccaccgagtgcctttagtgcttccccatgttcctggagtgcttttgccctccctgtggaatggacagatagaggcacccgacctctaccacttatacttagagctctattgatggtgggtggagaggatgtgtaggatggtgatctgaatgtttccacttccaaaagtagaccactagggtgtcactgaaaggtttacagaactttgtgtcacatgcagcatttaacccaaaatatccttacaggtcctgaaaaaggcttgcttgactgtggacctttaccagatttccttctgggagagtcatagctttgttagtggatggtatctgtgagctttcattctctttctttctaggacagtgataccaccaagaagaagaagaagaagaagaaagcaaaagaggtagaattggtttctgagtagtgaaggccacttgaagctggaggagaaactaaagccttattgagaaaacatgttatagatccttttgttgctgagagagtggaacataggtcctagacagggtgaagagttctggcacattttagctgctactttgagacctcggtgatgttacctggtgtggtcatcccatcttgtcctgttttaaggatatgggtggtgaaagatgaaagaggcagagtttatcccaatgacttctctgtttgagttgggaagcctcaccttcagacccagtaactgtccgcagctgtctgctagtggttgtcttaacatcgtagtcctagtttgcattttttaaatcccctctgtttaaaaggtttgtaaaacaaaaacaaaaaactaagtctgctca

SEQ ID NO: 2652 - DNA, 6000 bp, Homo sapiens
gtttgttttaagggcaaatgatctatttatcagtttactaagaaagtttacaaatagcggatgggcatttctagaaggggattttcttgttaggaaaagtaagctagcttcatggaatttctgagctgcaagagactttggggatcatgctgatttggagctgagtgagtgcaaatgaaagttatccatctaggtccttgttttattttaataattctgcaggatgttacaggagcccatttttccatagaggactaggtttaaattttgacttcctaagccagaagaccagaagcacatttgagaggtgtaaaggaagcatacctcccaaagcatttgagtggtagggcaaactctataacgatcctctgcccaagccccagatatcatttcaggacctcacaataacttgatgtgcattttgcatgagtcaatcttctagaccttactcagagcattatagcgcagttgtactgtatttctacctttggccagagtatagatacggcactggggagctgcccctcaaaacaaagacctgctattctcattaggtgggaaaagaaatgcagcgtgggagggtggttgttagagtcctcaaagtgagactgtcgagagcaaccagatgcttcacccattataccctgagtgcatctgactctgagcctggtgtaagctcctgtcttagttttcatacatatgtgctctctcatttcaaactcgtctaaactttctctttaaccaaatcctgatttctctcaatggcaacaccaccattcctgatcctgcagactcaaaacttatgaattatcttggatttcttcctcttattcagttgctacatcctatatgtcaccaattccagcaggcactacaactaccactgcagttgagaccaactttccccaaataccaggctcatttctagctccatacccttgctcttgttttccacttgcctaaaatgcctccctgggcctctctgcctatcttagtgctattatagcagagtccaggtgcctgcctcctctatgaaaactttagaaaattcttgcctcttttgactactgtagcatttatatttaaacaaagtcaccttacacatttgctttgcttatttcacaagtcctgtcttccctaaagcacagtattgtattctgctcaatagcaggaatgatacagttctgggcaccccaagtctcaggtactggtcaagcaatgtttcagtgaacaggtgtatatgtatggtgggtagggaagggaaacaaaggaacgccacagtggttgtcatgattggctatgtatacgtgggtagagattgattctctaggcataagcctctggctatatataatttttttccaaagccccccttttttcccatttgcagatacagttgttttgcctctcttccttcccagagctttggaaaagagaaatacaaataaaaacctggtaaatactaatgtcaaaataaaatatattaaattcggatttcaagcacagaagacttaagtgtggccaataactgttttaaaaaagtggaaaccatgtgttaagggtttcaggaccatctcaatttcatagataggtcctagcaacaaccaacatgttgacatttaaatttgttttgaatggaaaacaaaattgcattggttatattgacattaaaaggaaataatgccagtggaatagagggcaaagagtttggagatgatggtctgagttactgagtcactacaaagaggcctatgagtcactacaaaatattctcagaagaaaggcagtgtgatgtgctgctgtgacccaaaggtcaacatgctgggcatcagcgggatgagcttgggaaccacctctcagcacagtatcctggaattgtgtgtgctagcattcagagggcatgcaggcccagagaaagacaactgcagtgatcaagggacagagaagtcaccatatgagcatgaacaaagtcctcagcagagaaatgcaaaggctgagggagagggattcagatcaaagcctatacaatcacaggttttatgagtggaaaaatgtgattcttagaaaacttgctcccaacattttccttggtcaaataagtttgggaatcttggagagtcataaagcacattagtgtagtaactgttctggcaagttatgcagtaaagaaactttatgttaacatttcccaaatttatttgactagagaacattttatttgcacatgatacttgtttacaaaattcaggacttctcgaactaagacgaatcttttaaaacctcaacatagacttaggtacaaggtgcaatacaatacatggaatataaacttgtgcaactcaactcaaggaatactgccagctacaaatacaaatgaattccaaaaatgtttagataactgcataactttatcatccactagaagagattgtccccatgagggtcaccttgatttcggggccagagagcacactggccaagacagacaatttcttagtaaggcattttgtaaattaggttttaaatggatgacatataagatagaagggcttccttaggtagtaatctaagtaaaactatcatttttcctttacagaataaattcttttgtgtcttttttaaaaaagtatagtttgctttaattgccaggttgatgaacagtttttaaacattgatcagttgaatacacttattttattagaagtcaattaataaactcgtccaattacaatgagtgaaattaccaagaacacaggcccaggcctgtgtatgagtcctgagtctgtcacttactagctttgtgaccttggacaagttaacgtctctccacctcagtttcctgaggtgtaaaatgagaattaaagaacatattaatcatgatagtctttatttagcatttcctatatgtttacatatattgactcatttaattttcacaatcttcatagggcgctatgaggtgggcagaattattatcatccccacttaaaggtgaggaaaagaaaggcacagagaagttaggtaacttgctcaaggtcacacagtggggaagttgttgagcttgactccaaatggggcagtttacatgtaccaggcatataaatgcttagtatctagcatataataagcttgccataaatgttaataattttgttctactccagttaaatgcctggagctgtaaaaggcagccatgagcattagaaaagttagtgaacctcattctggaatatgagattgactaccgccgataacaaacaaaaggtatttttcttcttgaaagtgcctaaaggcactatatcccatcaccaaatgttaatgtcataataataagaacagccgttcctgctccatgaggacggggcatactagccacaaacagtaactgaaaataacatatgatataaaattgaaacaagagaaaatttagacaggtccaatgtaactgcacacgaaaattttccaaccttcatcatgatcaaattaattatagaaagatgtgccatgtgatccttacagatcgttaggtaaaaacggaggctgctggcgtgcacattacagatcgttgcactggatggggaccctatgtgtggggagacttgggttggaactgacttgggagaaaagagcaaagcatcaacacttcaagtagcaccttgggaatgttccctttccagtactgccatacctgcctggcttcaaaactacacaaagtagaaaaccaaatcaaagacacgaacacggacgggctgtggaggcggcacggcatatattgtgctttgatttagaatcgctttcaaaatccacgtgtgattcctagacttgtgagttggaagatctgtacttttatccttggcacgtttgacatacctcgaaataaaaattacttttacatatatttttactgtctgatatcatcgagacaaggagacccgaggaaacttgcattctggatacctaatgtgatacatccgaacttgaataaaaactgaagttctccatttccccttccctgtatccaacaaatagctacctaaaagcctttgtagaaagtagcagcagccaagcttaagagtgatactttttcagatacagtataacactgtttctgcaaaaggttactcacatgaatataatgtttcttgggctaattaatccgccttgagaacagctaggctaaaacttccaggtctcccaccctgggccactcaagccaggatcgcgacgtgagcccggggtgagccgaggggcatcccgggccgaggtcactcgaaccgaagttatgaggcgcgggccggcaaccggaagtggtccagggagagttgtacgagattcgggggctgtgacttggaaataaaacaaaataaaataaaaccttaactgttttgggactgactttcaaaagagcgtccccctggctcaagaggccggcgttcgcggagatgtcgtcttaaagggctgtcccccaagcgtgtaggccgcgcacgggtctccttagcgggcgggcaaaatgggcgccggtactcgggaggcgcctgcccaggcgcccgggcgccgctcacagagtacgtccgcctgcggccccagagcgccgcctccctgccgcccccgccgcccggcctgacgcccggaccgcggccggccaccgccctccgccccgacggccacgcctgccccaaaccgcgcgggcgtttcccaggtgctgctgggcgggccccgcccccgtgccccaaggcccgcccccgcgcgccagccgcgcgcccgctgccccctcctcgcccccacagccccgcccccacagccccgcccgctccctaagccccgccccctaggaacccgcgcgccgaaggccaggcctgggcggagcgcacagcgctgggcgctggggaggctgcgccgcagcacccggttggtcaggaccaagtgggcccgaggcggacgtgagaagggtcgggccaagatggcggtgcaggtggtgcaggcggtgcaggcggttcatctcgagtctgacgctttcctcgtttgtctcaaccacgctctgagcacagagaaggaggaagtaatggggctgtgcataggggaggtgagtaggtctgttagcctggatggaaccctgctgagcagtcccagtgtgtccccggggtgggtgccggcagctcccagggctgcggaggccacaggcatcctcgatttaggtccttggacaccctttacatagctctgtcgcggggagccccgtttcttctggccgcctgacacttgtttagtctcctgcgagcccccggcggtctgtacaggccccgggagccttgccctttctcctgtagcctggggcttctctttagatctgcgcttttcgcccggttgaccaaaactgcaaggcaggtcagaaagacactggagtataatgaggatgtccgggtattacgacgcagcagctgaccacagttagagccccttgcctcgcctcgagtcttctgtctagggagcagagatatcaaccaaagcatttgaagggtatcgaagagcctaacagaaggtgcggggcttgaaggaagcaaaagtttccgctgcattgtgttgaggaggggccgaagaggatgaggaaatacagtttagctgtttacagtctaaagtaattctccagtctttcataccatgtgcgtgaacacatgacctaattgtcatataatctgcatccatatatgtcaaacaaacgtaatgtgatcaataatgttttttgctttttcccactctagttgaacgatgatacaaggtaagactgtatttgtttactcatatcttataatctctaagtcattgttaacctaaaattatggcgactttggcagtattgtgtccggatcgtgtcttaaattaattaccattatcactccggggctcccttaatgatacaaccttgaactttggtttctgccttacctcctattcagttgagatatgggataaacatcttaataagcattatcataattgttg

SEQ ID NO: 2653 - DNA, 6000 bp, Homo sapiens
ggctgatagaggcactcgtctcagcttctccttttctttggtactgacatcagacattttagagtcaagttgaaaagagttggtcgtatttttgggctttcatatttcaaggcatttcaacatatccacaaatagcaggcccagtgagctgtgcaatatcatggggctccaatgttttaggagttagtcctgagccagactgaatgctctctcttatctgtatatgtgaagaatagcccttcttcctccccaggaggctgtgagggatttaaaacagatgtctatctgagggaccctgcagatctcccatgctatgagcaggctgtgtgatttctccccatcatgaggccattatcatgacatgttatggctcatgtctcaaacccttgagtttcttattctgtgccatatccatgcctttcaattatcaggacagtagctgaaatttattgagggcttactaggtactgggcacagtatcaagtatgttattatgtgtaattccattcaatctacttaataatatgtgcccaaagccctattattatggttattttacaatggagaaaactgagacagtgttaaagtaactaacctaatatcccatagccaataaataatcaagcttgactgcaaagtgcatgctcttagccttaaccattgtgctggaaatgcaccatctctcccaattattatacaggaaaacttgtgactgggaatttaccatggcttatactgaaggtcttcatgtatcctaaggagtccggcccaaaggagattcaggaacatgaaagcagagtttgaacctttttacatccatgctttttattgggtttggttggaaaggaagagcttgggtggacatgggggcagagggatttggagggtgtaattactcaccttggggcccaagatcaggttttctaaattgagaattgcatagttacagaaggaacccggaggatccagtgggatctagtgacaaccatgggatgcagaattagtactagtgccctgatgactcaccagaggtcgtagtcaaaatgtattagcactagaagtgagtctggagatcctctagtccaaagctcacatttcacatgtgaggacactgagctagataggtgaagacacttgtctaatgaggcacagcctgttaaatgacagggttaaactagaacccaagttctagggcctattacacagtggcaagcctagaaatggattctggaaataaagcagggtaatgtctgggagtccccagggccatcattctggcagatgaggtggtggggtgggggttgcagaagggttagttccctgaacaaaggacctctccacatcaccttggataaataacatcagtcccaggaaaaaggaaatcacattgccacattttaccttgtctaggaaaatcctaccttgtcctctcttgtataaacagagcaaaaacactgaagatacaataacaatacacagtgagaacactaccagcacactcaacaacccagggtagtgagtatggaggcccattggcatgtctggaaatagaatacacatgtattctgacttactaggaaatagccccaagaggctggggtggcttagcatgcaggagcactatcacagttgagtgccctccaggggagttccaaagcccctaggggaaactgcactttctgctctcagaagtcaggattagaaactgaatcagaaggtcgagcagaggctgtctcagaacatcctgaaatgcttggcatctctctgaaggccttgggctctttcccagtgggcttcctgggaggaaatgaccccagtgaccaggctcaggaaaaaggagacacattcccccagcctcaggatttgcagctcttcagagtaatttcagaggcttgtggagattgggacagaacctgttacctgcacaaagcttccaggcaaagatggagtgagagttgttgtcggttcccggctgtacaaatttaagtcaactcttggttatctgggttctggaagttgctaaggatatcaccctcttcttccaggggactccaattgtatgtcacatcattttcttccttctctgcagagcacattagtgtgacatttacaggtactattcactgaagtcattaaactctggcttcccaaaatatgagccagtggtgcaccagagctggcttgtaccagcttgtgagaaccaattgttaaatttctagaaattctgcaagatggttgttaaacacagccatcatttaaaattaaattataaaaatttacaattaaattcttttaaaggcaaaggtaataaatattcaaaatttatcaccttctaattatttttcgacatttgaatgttacctatgctcttgaggttatttacatcgattgtatctgtgtgctactgggcatgtcctcccaactcgacatggattgaaatcagccattgtgggagtatccaggctacagaaattggtagatgctacaaactacggcttgatctatgtttgtcactctagacttgaaagcaatggagaaaatgttactaatgcagattcagcttaaaagtgagttgtgtctgtagccattattgtgaacagcaccataaaatgaggcaatatttttctggtatttgaaaaccattatccaattcagcaaataaatcactgacattgttgatgaatgatccaagtaccaatataaaaataattgttgaattacttttttcttattacttaacataaatgaaaatatcaagcaacattcatgtcagaactacactagttcatcaattgcaactgtaggttgtctagggagatatgtatttggcaaaaatcaaaagcatcctgtcagaattggttatacagaattaacgataaagagtattgtatattttattatcacttatgaaattgtgtgctatacaccttttacatcaatacaatttataataaatatataccccctttctaaagagaattagttgaacatttatcagcacaacactacgtgaaatgattgtttaagttgttctgtttcctgttgtatgcgtattttctttacattttgttttgttttgtttcaaaagtgtccatggtgaaaaactacaaccttttaaagtctgttttaaaaaatgcttttattaaagcaatctaaagataagctgtaaaaggtgtgggctactgaagggttgctaaagaccaatcatatttagtcaggtaatagctagatttggatctggcaagaggaagtttttttttttttcttttcctttttttttttgctaagagataagaaaatgaccacctatagagttgataaggttagtgtactcttggaaaagctgctgcagccatggcaggaaggaaagaattggtatacaactttctaattaagagaacactagaaaggaaatatattcagcagtataaataagggaatcttctgtttgtacctgtaagggagtaaaacatgagcgataagctgataaggcttttggctccaaaagaaaaacctggcccgaagtgtcaaatactatatctcttagagggatttattccaaattaaaattagtgataatttggagaaatatttcctaaagtttgaagtaagtccttgattggttctaacaatgattaatatagatagggatcagtgaagttgaacaaaatttgcatgtgtatctgatatctcaatgtttttctgtagaaacgttacctacttttcaaaaacaaaatttttttttggaaggcactgaggtgggggagagtggtgaagaatagaattcccatatacttttctctccaggaacagagacattatcttacaaaactgctgaccagaaaaggtcagagtcatggttagctaacatgtcttcatcctcccaagccaaatcgcatagaagccactggagaactagtttggaattccggcttcactactatgtagttgtaggattttggaggagctgtacaggttcactgagctttagtttcctcattcacaatatgacgataccaatttcttcctcatattatatctaaagacatatctatgtctatatgcttgatcgtacattatgtgcggagataaaccggtaacagtgattgcctctgagaagagagacttactttccattgcgtaattcttaggctcatggtagaatttgtgcaagtggatgaagcactgcctcactgggaaacactccagtgaaataaagcacagaaaagagcccgaagaataattacttggttctgtatgacacatgtgcttttaaagggttgtagtgtaggatgacattgggtaagtccatgggcctagaagcctaggtggagttcttaggattttgtatgtagactatgaagttttggaaacgtttgagctggagagaagacattctgatcaaaggtggctttcaggaaaggctggtgcgacaggcagggtatttattagaatgaggccagtgaccactctgaaacagacacaaagtaagttcccttcaaggggcaggaagctccctgggatggtgagaccagaaaggcacagaggctgaaccctcgtgatggcgctaggtcccaggttcgctagcatccgagagaggggattgggtcgctccagaggccattgcgaaggctgctgccagttctagggtcggggtggggtcaggctaggtccctattcctagggctttagcaccgctcactcacaagaccccttttcccaggaggacgtatgggtttttcctgtcgctccagcttctctttcgcggcccttccacgcttgtcacttacctgagcgcagccaatcagcacctagaggttgggctactttcggccaaaggagaacggggacttgtgggggacgctccctgcgcaccaatgaatgtgcatggagatggagaggcgggcctgcaagtgcgaacaagccaatcacggaatcccggcggccggcggcccgggaggcagtcgcgcgctcgcatccccaagatggcggccgttaaggacagttgtggcaaaggagaaatggccacagggaatgggcggcggctccacctggggattcctgaggccgtgtttgtggtaagaggcacgctgttccctggcatcttggcttgaggccttggactgcccctttcttcccggctcccacccaggcctcgactgttggaaggagctgagccaagtgttcagggagggggcgctcggtctgctctcacccctcgcacctggacagattgagctctgctgggggcccgcccggaagaaacgtagctcgagaaggccgtagaagagaacggggtgcggggccgggacgaggggcgaggggcgaggggcggcgggtggcagggcagggcggcctgagggacctccgggctgccgccggttttcgtccccctgctggttggaaaaggggaggtggtgaggagctctcgactcagcatggatgctggagacacagtacaatgaataggcagaacagccagtgctaagatgtgaaaaccgggaatatcactttgtctgttgaaggaatgcagtggtctcgggaatgttgcctcgggaaatggaagaagagaccgatgggaaaataggatgataggttgggagtgtaaagtccttctgtgtcttgctaaggaattgaggttttccagtaggcaacgggctgtcatcagaaggcctttcgttttaactacatcattctaacaacttagtggagaatgaattgttgagagaggaggctgaaccctcctgatggcgctaggtcccaggttcgctagtgtcctagaggggatcgggttgctccacaggccgttctggagggcgctgcctgtgctgggtggctttttaaaaattttattttatttatttaatttagaaatagtagttgaaaactatttgactaatgagagaaaacatctgactggccctccaggccaggtcatctgtctgtccccacttagctactataaaatcttcatggaagtttctcaatcttttggtttgt

SEQ ID NO: 2654 - DNA, 6000 bp, Homo sapiens
tataatttccaccaaactgtgtccctagttttttgtgtggtttgtttgctttttagactgggtctcgcacttttgccgaggctggagtgcaggggcatgatcacatctcactgcagcctcaacgtcctgggttcaggcgatcctcccacctcagcctctagaggagctgtgaccacagatgcatgccaccatacccagctaattattactattattatttttgagatggagtctcactctgttgcccaggctggagtgcagtggcacaatctcggctcactacaaccttcgcctcccgggctcaagcaattctcccaactcagcctcccgagtagctgggattacaagcgcatgccaccacgtctggctaatttatttgtattttagtagagacggggtttcaccatgttgcccagggtggtttcaaactcctgagctcaggcaatctgcccacctcagcctcccaaagtgctgggattacaggtgcgagccgccgggcccagcctaattattttttaattatttgtagagacgggggtctccctatgttgcccaggctagtcttgaactcctggactgaagtgatcctcccacctcagcctcccaaagtgctggaattacaggtttgagccaccatgcccagtcctgtgtccttgttgaaagcagatactggatgttatttcacccaaaacagtatgtggcatctagctggcattccataaatatttatcttacagaagaatgctggcacatgcacaaaacagagatctataaatatttattacagtgaattgactttataagctatataaaataatgtagggaaataaagagttgagagtaaggatagcttttttcctatgcctattagttatgaaatcttgggatttcataactaattaagtcttatgcccagactctgtgggtctctaatctcactggcaaaattagaaggatgaactagacatataagacgttatgattttgaaagctttggaatacagtctttaacaaccattctattatgttttcaaaaccacatttagactggcaataccaagtgttggcaaggatacggaacaactggaactcttgtacgttgctggtgggaatttcatatggtacagccaccttggaggactgaacacttgacatctgaatattttattatatgtaaattatatctcaattttttaaaagttcaagtcatataagattttcaaaacttagaaatttttacacttaccttcttttcttttgagcaaggttgagttccataaacttatacttctggtactgttcatccagcttctttaatactgtatctgcagtctcattcccaggctgtttcatgaaggaatctacatcttcctttaatatcaaaaataatactttacaaattttagaattcatgccactcagattttttgactgctttgtttttaaaacatagaagaaaaaaaagctttgtttttctccaaaggtttgtttttaactaaaagtacaggttaagcacccttatctaaaatgcttgggaccagaattgttttggattttagattttttttttttttttagattttggaatatttacattataccagttgagcatcctcaatccaaaaatccaaagtccaaaatgctccaatgagcatttcctttgagcactatattggtgttcaaaaagttttggattttagagcattctggatttcagattttcagatttaggatgctcaacctgtagttataaaaagttagagacaatttcagatggtacatatatattatatagctaatttattctttcactttcctcttcattttttattcaaaaataggaaaagaagaatgaccttgcccaccactttatgcatttcccatgcatccctagtagtaaatatgaaactaacaatcaaatacattgcctattcatgcatcctattcacaaaatgattttacaggttgcatgtcaagattatcaattttattacttatttttaattcaacaagttttaccatagaaatcatactaaatatggttactgggttcccaaggcaatccacaaatgcttccttcagtatcaaataactgaaacaaagtaaacctaaaaggcaaacagaataatcttttgtaacagtaataactgatcaaaagaaaagcagtaaaactgatgttaaaatattttttataccacatgctgatccttgaagaaaggctagttaattagataaggatcagaaacaagatgaaaatatatgaaacttaaaagagatgctacaagagtcgtctagtactttacagaactctagttctttattataagtaacttcaattatcttatagcttctaagatcttcacatcattattcttatccatatttactagctaccagagaatatcttagctgaaacaaggaagaaaaaggaagagaaacacagcaagggagtgaactaagaagccatcaaactagacagtaaaggaaattgaaaaggtgaggctgagagataatggctgagttctgtatgttaaagagagatgccatcttcctagaagggtcactgcagggaagagaaagaagtgtaagtttctggcacatgatacatgttatcaggtgctggagtttagcaagaattaactatagcggcataggctgtggttaagagacaggaggtgcctggtttgaatcccagcttcgccactcattagatgagttgaccttagggaagttatttaacctctctttgcctcaatttcctcatcatctgtacaagtaccttttcgtcaccagggattaaatgagttagcatatgtgaaacgcttataagagtacgtgacacctatgtatagcataatgtgccacagggacacaaagtgccagggattttgttttggggtagaggtcagagaaaactacagggagatgatatctgaactagatgtggaaagatgaagaggtcatgaaatggacaagggtgaaacaacaattcaagcagagaaagaaaacaaattactgcctcagcggggttggggaatggactgggtctgacttctaaccactatggtatattgcttcctatcatcatgaatattaatacctattcgacacctactacactgcaatactgcaagcatgttctctgtttcccataacaactctctaagtattgtcatccctatttcagttaaagaaactcaagctcaaagtggtaaaataatatgcttaaggttaagcagcaactgggaagcagagccaggattcagaccctggtctatttagaggccaataatctttctacaataccatgtcacttcaattattaatagtttggaaacataaacagttatataaaatttgggttgcttattacattatgttggtagaaattttaaggtctagaaaaaaataaccacgacattgtagggaaaaagcatttcaagacattataaagccctcagataaagtgtctcctcccgagttagatttctgacgccatctctagctgagcaccatgaatgtaacatttaaggccctatggaaattcaattagacacttagtttgagcttatactatgtgtgaggcactatgctatgaccaggagaagtagggcgattcatgagaactacctcacctcctcccagtagcagagcatgaggggtaagctgccagtctggacctccacggattgtccaagttcaaaccctggatacctcacttacatcctgtgtggcctggggcaagttactcaagtgccccgtacctcagttttatcatctaaaaaacgggcataacagtagtagctaccacctcgaattttgtaaaatcattaagaaagtgcctggcactcaacaaattttattccttgttatggttagataatagatcaatgtagagaaataaatgacacagctcataaaaacacaaaataataaccaattacgaaattcaatcagcaaatgcgaatatacaatatcaagtgtggtataaataaatgagtctttagaaggatataagacgtagttagtaaaaaaaaggcagaggtaaggtaaggtacaaaccaaaagattgagaaacttccatgaagattttatagtagctaagtggggacagacagatgacctggcctggagggccagtcagatgttttctctcattagtcaaatagttttcaactactatttctaaattaaataaataaaataaaatttttaaaaagccacccagcacaggcagcgccctccagaacggcctgtggagcaacccgatcccctctaggacactagcgaacctgggacctagcgccatcaggagggttcagcctcctctctcaacaattcattctccactaagttgttagaatgatgtagttaaaacgaaaggccttctgatgacagcccgttgcctactggaaaacctcaattccttagcaagacacagaaggactttacactcccaacctatcatcctattttcccatcggtctcttcttccatttcccgaggcaacattcccgagaccactgcattccttcaacagacaaagtgatattcccggttttcacatcttagcactggctgttctgcctattcattgtactgtgtctccagcatccatgctgagtcgagagctcctcaccacctccccttttccaaccagcagggggacgaaaaccggcggcagcccggaggtccctcaggccgccctgccctgccacccgccgcccctcgcccctcgcccctcgtcccggccccgcaccccgttctcttctacggccttctcgagctacgtttcttccgggcgggcccccagcagagctcaatctgtccaggtgcgaggggtgagagcagaccgagcgccccctccctgaacacttggctcagctccttccaacagtcgaggcctgggtgggagccgggaagaaaggggcagtccaaggcctcaagccaagatgccagggaacagcgtgcctcttaccacaaacacggcctcaggaatccccaggtggagccgccgcccattccctgtggccatttctcctttgccacaactgtccttaacggccgccatcttggggatgcgagcgcgcgactgcctcccgggccgccggccgccgggattccgtgattggcttgttcgcacttgcaggcccgcctctccatctccatgcacattcattggtgcgcagggagcgtcccccacaagtccccgttctcctttggccgaaagtagcccaacctctaggtgctgattggctgcgctcaggtaagtgacaagcgtggaagggccgcgaaagagaagctggagcgacaggaaaaacccatacgtcctcctgggaaaaggggtcttgtgagtgagcggtgctaaagccctaggaatagggacctagcctgaccccaccccgaccctagaactggcagcagccttcgcaatggcctctggagcgacccaatcccctctctcggatgctagcgaacctgggacctagcgccatcacgagggttcagcctctgtgcctttctggtctcaccatcccagggagcttcctgccccttgaagggaacttactttgtgtctgtttcagagtggtcactggcctcattctaataaataccctgcctgtcgcaccagcctttcctgaaagccacctttgatcagaatgtcttctctccagctcaaacgtttccaaaacttcatagtctacatacaaaatcctaagaactccacctaggcttctaggcccatggacttacccaatgtcatcctacactacaaccctttaaaagcacatgtgtcatacagaaccaagtaattattcttcgggctcttttctgtgctttatttcactggagtgtttcccagtgaggcagtgcttcatccacttgcacaaattctaccatgagcctaagaattacgcaatggaaagtaagtctctcttctcagaggcaatcactgttaccggtttatctccgcacataatgtacgatcaagcatataga

SEQ ID NO: 2655 - DNA, 6000 bp, Homo sapiens; identical to SEQ ID NO: 2615

SEQ ID NO: 2656 - DNA, 6000 bp, Homo sapiens; identical to SEQ ID NO: 2616

SEQ ID NO: 2657 - DNA, 6000 bp, Homo sapiens
acctgacattctccactccaaaagaggggggccttcggaatgctactgccctggccttcagtgactgtggccttctctcctgccagaggtttcatgtctagatcaccagtgacatccccagcccctaaagatcagttcagttcatacaagggtaatgttgaaatatacaagccaggttttaatattgctatactctattgtaaagtataaaagtatgttttaactcgctacttaaagctttaagacatttttaagtcccttcttatctgtatgttaaaaactaaacttaaatgggaagtagcattgggagaaagctcttctgtgaactaataaccaaaatcctctgctagttttataaacacttttggacaatttcctcaaatttataaagggtaagaattgaggcttcacagatgacaacgaaaatggcaaggaatgcatcaatcttcttatgcagtgccgaactcagagccaaaacaacagaagatcaaaagacaggctttcacttctgcacacataaagatgcttcgcaaatgctcatttatctccattaacctattcctaacacgaaacgggaaatgtttaagtgttagtactattttcttaaagatagtttcttcttgtccatatttgttcattatgtccctatccaagcaaacaatttcaagtaaaaataacgcctgagtactcacctgctgaatgtatattttactacagtttcaagatcaagaactgatgtttaaatattaactgcttcgttagttttacttatcaaggtcaaagtagtttgtgttttatgaaccgatatcaaaaaagaaagccacgttagttttccgtgggagaaaagagagacaggcgggtgacggcagattggaacaaggagctaccacagcacttactttctcacactgtagctttgaaaactgtgatcagttacagtgaattccttatgaaatggaatatttttaccaacaccttgaggaaccacataaactctactgcaagatatgaaaactagaaacatggacctgctctccccagtcctcagggctttcaagaagatgattccagtaacagatcattaccaagtgtttcagggtattttgaccagagtgtacaagctggaaaaaaacacccaagttaagcaagcagatgtaatctttctccttataattcactgaaattttcataaatggtaaaaacaaaaaacaaacctctcatttaattgaggaggggggcacattgaaaatataccaaggctgagatgccatttaaactaatgaggttttctgttttgtagctgatgctattttatgtgatttggaataaaacctccctgaagaggtaaaaaacgtaatttgagagttaaactctcaaaagctagacagagcacaggaatgtcaggagtggcaaaacctgaaaaagcatcatgatacatcagtcagttagtacaggtggtggataaggaaaacgaagcccactttttacgaggcatgtttcttcttagtggctttccaatgccaattgtccccctcttctgaggacatacatactaggcatccgggttatccctctcttctgaggatatacactactaggcatccaggtacatacactatatgttttgaagcttaaagttatagctctgtgatttaagcacccttctgccacccatggaacgaagacctcaaatcccagccatgaggacaactacttccttacctggggatagaatactagtatttaaatcatttattcggcatgtggtagaggagaagagaattagaggagaagtagagatgacaaagtagccacaccacttaccagtttacaggcaacagaatcatcaatttgccttttgtgacaaagtaacaacaaagagccgacatctcctataccctcacctgtgtgcagtcggcactgccgatacccacctttccaagggcacctccccagaccccccacctgtctacggtatcttcctgggtcccgcacctgcccgggcacctgccggggtcctgcacctgtccggcccccatatctgcttggggtacctgcctgggccccgcacctgcttggggtacctgcctgggccccgcacctgcttggggcacctccccgggccctccacctgtctagggtatcttcctgggtcccgcacctgtctggggcacttgctcagacactgcacctgccccgggtacctgcccgggccccgcacctgtccgggcaccgcacctgcaggatccccaagctgcctccacccacgcggccgcccccggccctgcccgccggggacgctggcaccgaggatgtcctgcccgtggcccaggtccccgccgctcaccaggtacttgccgtccggggagaacttgcagagtaagctggagagcttgaatacctcggagaagttcatggccgccgcctgccgcgggcgccaccctgcgcccgaaaacccgcgggacccctgggcgcgcagcaggctgcaacagccgacgccggcctccgaggccggaagtcagaaggcggaagtgaactgcagcctatcagcgccgccggcttccgcgcggcattgtggggcttgtagttcttgtgccgcagggctttaaaggaaacgcccacgtttcttccgaccagggatttccgacccgagaaccttacctcaaaggccgggaggcctttgagcacctccagctagggctgctgataaaaatgtagaaagcacagtaaaatttgaatttcagattcacaacaaatctagttataagtatgttcccaaatattgcacgggacatgctaatacggaaaaattactcgctagtctgaaattcaaatttaattgagcgacctgtgtgtctgcgtgtgtgtacacatgcatatatatatatttatatttatatgtaaatgtatgtttacatgtaaatatatgtttacctacaaatatatctttaataagtaatacggtgtctgtcgcacatatattatatcgtgtatgtaatgtataagtatttatttcgtttgcttggggttttgtttgcttttgctgagtccgacccctctacctgccgcctggcccttgcctcacgctccagtgccactgagatcaaggagagaacgaatttgccgctgactgggcagagcgagcgcgtggatcgcggccaccgcccgttcatcacccgcgcgcatctgggctggcaccgggcgaagaatcgtgcgggtctgggacctgggggcccagagggagcgagctcctgcgcgggcgctcggtccgcaggtttcgcaggctcaggggcgtgcctcgttctcacccccactccggaccccggtcctcttccctagacagcggccccctccacccctggctcccgcaggccgctagtagtccgcgccaggccccgccggcgcctctagggccccccagatcgcgcagaccctgacatccccgcctggccctgggttctgggagctgagagccggccagggtcctgctcgtacctccgggcgcccagcctcgggtctgctccccgcggacgccccaacctccccggccgaatggatggtggtgcgcgcgcgtcctactccggcggtgccggccttttctgttgccaaaactagacccaaacctctgcatgggattcgtctttgggtccccaccccgtgcgcccagcaaacagtgggtgagccatgaagatgtgcgagtcagccggaccctccccgtcaggcgcggacccgctgcggccagagaacccagtctgcgccagcccggctcgctcgcgaagccacgggcttcactgacgcgactttccaagacgtgggggtcaccatgggcagaggacatcggttcggagccagatcacgggccccataagcatcagaccataagcagcgccgccactgagagccgctcggaactcgcccagcatgtcgggtcccctagccagggcctggtgtacgtggtcgagggccctggaagccccgatggcctaggaggagcaggcgggcggggcggcgggtgtcgctggccggtagagagcttcggcctgacctagcgcaggtctggtgcgcgcagagaacaactccaagcgcaccgacgcccgcgagctccttccaaacaccgaacgggatccagagcccgagcccacaggcggcggccgggggagggagcagggtgctggccgccgcccgggagtgttcgcgtcctgggtgacccctggaaggacgtggggcccaaactccggctggggttgggagagcagcccccagaggctctccgcgggatcctctgccgggcgggaccgtggctccacaggagaagtgggtggcaagccctgcttggcggaaagcagccgttcccctcctcctgggcctggggcggcgcccctcacccctgttccccgcccctcacccctgttccccgccggccacatcccctgccccttggattccaagcgccccgcgcgccgaggagcccagcgctagtggcggcggccaggagagacccgggtgtcaggaaagatgggccgtctgggggacagcagggagtccgggggaaacgcaggcgtcgggcacagagtcggcaccggcgtccccagctctgccgaagatcgcggtcgggtctggcccgcgggaggggccctggcgccggacctgcttcggccctgcgtgggcggcctcgccgggctctgcaggagcgacgcgcgccaaaaggcggcgggaaggaggcggggcagagcgcgcccgggaccccgacttggacgcggccagctggagaggcggagcgccgggaggagaccttggccccgccgcgactcggtggcccgcgctgccttcccgcgcgccgggctaaaaaggcgctaacgcccgcggccgcctactccccgcggcgcctcccctccccgcgcccatataacccgcctaggggccgggcagcccgccctgcctccccgcccgcgcacccgcccggaggctcgcgcgcccgcgaaggggacgcagcgaaaccggggcccgcgccaggccagccgggacggacgccgatgcccggggctgcgacggctgcaggtaggaggcccagggccggggggcggttcggctccgcgggcgggggctggagcgcagcgctgggcaggcacctgggctcgcagctccgaagctgggaggtgaggggagagcgatcggggacgagctgggacaaggcgacacaggggctccctcggagttggatcggcccctgggacttggcgctcgcgagaggctggagcggccagagtctagcctgcgaggagacgcgggtcctgccctcagcgccggccgcctttggcgccaaagacagccccgcaggggttccgggagggccctcctcctgctgtcccctctccaccccgggctccgagggccgttgggagggtaaccccgggaagaggccggggtgcggggcgcgggtgcaggtggaaatcgccagcaagctcctccccgcccgcgcgctccctccgacctgcagggctgtgccaatcccgaggcctcagcttccctgaggagccagggccaggcccccctctggacagggagaaggatctgggcgggggccttgacccatggagttggttactaagcggtttcgatggtttcccgagggacagctccctgtggctctgagtttgtctgtcgagggctcctggcctgtctccggagcggtcccaggtagagaaagcccgtgaagaaatggcccgggccggcctggagggagacacctcacgcccccttagctcctgggccgcctcctcctgcagcccctgcctttcccggggcttggacttggggagcgatgattacctttgctcagcttgtattttggcctggacgctaggagataagcccatgtagtatgcacacgtctgctacataaacaggggacagatagacgatcttcaaccagcaagggtgcagggaaaagcaatgcaccccaaacttctgaccagaggtcatttgcttccaaagatgctg

SEQ ID NO: 2658 - DNA, 6000 bp, Homo sapiens
cccagggcttagctgccttgagaatggcccctggcccgctaactccaggggtcccagagtggggctggagctgaactggggggcattgttttaaagttcagcccaggagctcagggaagctgctgtgctggggctggggacctggacccggttcagtgcggatgcgggcatggggggctctgagtgccccctggaaaactgccacctgcagctcaggggcccagttctagccccaccacgaggctggtgaccttggacaagaaacaccacacaggcccggcctcgggtcagacaggcggttctagtgccggatgtttccggggctaccgatagtcctgagttcgtggctcaggtggggggcctgcttgtggaagtggctgcacacgcacctgcccccacctgcccctggcggctccctctggccacctgtccctgggtgttggtggcatctggctgctcccatactcaggggcgggtctgggactcatccagcaaaggggcctcagctcgggcaggcacagtgcttgagcgcaggacactggtcctctgcagtggggcgtgccttccgcatctgggggacgtgggtctccccgaaccacgagcaggcagattggttcccgttggacacagggtgtctgagggatgccttagccacctgcttagcagccgtgggagacaggcggagcaggtggtttcaagctcccacaattctctgagcctccatgtccttgctggtgaagctggggtgacagggggtaggagcccagagcagagagccctttgggaggtggcatagactctgggatgccaggtgctgggtgctggctctgcccaaccccgtgggcctcggacaaccctcctgccacactggcccctgcagaggaggctgagtttaggcagttcaggagagtggggtgtgggcaagagcagttgaaccctcagtgggctctagaggagtcccaggccacagacttattggggagactgtgagctctgtgtggccatagcaggaaacagaccccgtggtcactgtggccatctgactgaggtggcccagaaagtccagcaggccgaggtgggtgtggctgggggctccgaggccaggtttgctgagctcaggacctaccccttcccttctgagctgggcaacttttaaagaattacatagccctctgggcctcagtttcctgtctataaatggcgctactgagaggctccaagtcacccacgatgtgaggatgtccagtggtgccgggcccatcgggagtatgtgacaaacgctaggtgtgagggtgagggcagggaggaggccctgtgtttaagaaagctgctcctcggacaccagaacagcagagccaggagggcctaggataggatctgggaccagggcctgctgcctttgcctggcacagttcctgcctgagctgtcccgtgccttaggctctggctgtccctgaagaccctacatggctcacagggacctcactctaaaatagggccccgttctgcaagaggagagcagggggaagcctgtggcccgggcctccccatgggctggggagggtgggccgaggagccacagctaaaactggcccagcccctgccctctcaggaccctggctggttccctgaatgaggaaggcttgacgggcttctggatgccacctgggtggggtctgccctggccacccccacaccgtctgggaagagctgcagaggataaagctccctcgtaggctcgcaggctgcgaggaggcagtgtgggtgtgatggtggggcgggggtcctatcctcacccggacccacccgaggagtctctgcagtgctgggcctgggcttggaagcgaatccctgcccctctgagcgctagcgtcccctcggacaaaaccagcgcagggcaatgagacctgcggcccttgctggctctcaggatgctccacaaggagggaggacacaggaggggagaaaaggagagagaggcaagtgtctcctccctcccctcccctccactctgctccgctcccgtcctctcccctcccctctctgtccctagagcctcctccagggctggcccctcccctgtgccccttcctgcctctcctggcgcctttctctgacaacaggtgttgtgggcaggtgggccacagagcggggtctacagctggtggggcagaaggcaggctgatctaccctgggagccccgggaacccagtggcaggacagacacccggggtcagaaccttcggacacttgggggcttgagaccctagaggtcaccccagataggccttggtgacttcagggagaggtattctccccaggcccaggagaaggaagggcgcaggtcccgtgcatgtgtggcccccaggaaagggcaggcggacagagggagaaggacacccctcccttccagggaggatctgtagctggaggaagggtggggtcatgcgtgggagcagggagggggctcagctcaccacggtcagctctgagactccagcccacccgttaccccctcccagagagcccccactcagcctttcctttggtgggctttcgtgacaaagcactttggggctgcacagaagtgaaccccacccagcacccaggtctcagagccttgcagcttctgcggcctcttccatgcggtgggatgaagccagctgcccagcagggaccctgtgccatgagtttggccttgaactgacacatcactggcaccaggaaacgaagtccccctgtctgttctggcacataacccctcccactaactggttcctgaagagtgccgtggcctgcggcagcgtcgttcccccctgtcctgcggcccagggtcctgcggaaagtcaggcggaatccccggtgagtcagaagcagaatgaaagcagaatggaggacccagcagggagggaacctggaggaggcgctaagggccacgccaagggggtgtggccccagatcccctgtccctgtcctctgcaaggctgggccttgggaacgtttgcagaaagctgggtgccgctctggggcagaggccagtggttttgggtgcttttgagttggaaacgtgtagctcagccgcactgggatccccgcagcctggcccagatgctaagggtggagagatgcggggtctcaggcacggtgccctgggcatgggtggggctcgtgctgaaggcagcctggctgtcttccttcctcacgtccttccacttggcgctctccttttggctatttataaaaccatcaggccggccctgtgcatgggactcgcctgagtctccttttcaatgcatcattccctttggcaggagaggacaccgcctacagaggctgaggatgtgccctgtgggggtcgggagcggaacccaggccccgcctcggccctgctctgagggtctgtccatccctggggagcccgcccccaacccaagaggggtcccaggctcagaagcagaaggcaccctcatccccagggcatccccgatcccagcaggagtctcctagtgctcgccctgggctctcctgcaaggaggctgctgctttccccagaacatccagtctgggccccagccgaccccctgcagggggcttcccagagacgcccttcctgaacctgatctaccagacaaaactgtctttttctcagtcgtctcctcctgagtgctgctgcccttcctgttgggggctgagatcctctgccacaggaagagacgggcgtccaggactcacctgctgcctcccggccctagggccctgagctgggctctccaggccccagccccttggggcacaacacctggaatcgtcctttcgtcctcagcccggcctgctggtggggcagggcgggtccccagggctcctcaggcagctgcagtccaaacctcccctgccctcacccagctctgcccgctctcccgggggtgggggtggggagcgatgaggcccctgccggctctcggtggggacgacagggaggaaggaagctggggagatggagacaagagaaagcaggcaggtggtttgggatttggcaggaaaaggttggaaggaaaggggaaagggtctccgcatggatttctcagctccccatggatttctcagccctcgtgagagccacggcgccctggggactggaagtgtgggtccgcaggccccagtccccaggtttgtctgagcatagatgccctgcctgcttccagggggactcgggcccctctgccagggtcaactttgtacccaagacggctgaaatacaatggaaattcagacggcccaacagggagtggcagtcacctcaaaggccccactagacgggtgcggggcaccactgcagagcccctccctggctgtgccaaggccgtccacgcctgcagggggccccactgccgggctgttctttggcaacagtggcttgtccctgtttcctgggggcttggccagtgccagggtgggctccaaacgcacggctctgggctcttggactcacccctgctttgggcaggcagtggaaggcaggccccacaagagctgctcactcccgtcacctgtctccctcgggggtctagggtcgaacctcctgtgagcccctcctctccatgcagcccttggactggtcctggcggaccaccgagttccccgcgcagggggcaggtgcgccccacctgggtgccaagggaggcgacaccatctctcccccttggggtggcccagccttgcctaccatgatctccagggccggggctcagccctcatgcctgggaacagaggctgctttacggggtgagggcctggggccccccgagccttccccaggcaggcagcatctcggaaggagccctggtgggtttaattatggagccggcgctgaccggcgtccccgccctccccacgcagcctccttggtgcggtccaacacatcaccgggcaagctgaggcctgccccggacttggatgaatactcatgaggaataaaggggtgggccgcgggttttgttgttggattcagccagttgacagaactaagggagatgggaaaagcgaaaatgccaacaaacggcccgcatgttccccagcatcctcggctcctgcctcactagctgcggagcctctcccgctcggtccacgctgccgggcggccacgaccgtgacccttcccctcgggccgcccagatccatgcctcgtcccacgggacaccagttccctggcgtgtgcagaccccccggcgcctaccatgctgtacgtcggtgaccccgcacggcacctcgccacggtaggtgtgacgcgccattcataggatctcttcggggactttgcgggggattttgctgcagtgtagggttcagaggggcatccttctgcctgccttcctggcctggagtctgctgccagttggggtgagcagaggtaggaagggaggcgttgaggggctagaggcaggtcccaggcatggaggcaagcagattcgggctccaacagcctgtgcccacctgctgggcagggacccgcagccagggagaggaggccgggtccatgccgatggggctgctggtgtttctgcctcgtgctcgggggtctctgatgctccttggctttggggctggcggcttggtccaggctcagagtttccgagctgccctgccctgccccagctgccaggagctcagtgcaccctagaagtcatctttgctcctgggcttgggtgtgaagctgcccccgccctcatcagggaatttgctcatttgacagcagtggcagacggtgcttcttgtcagccccacgggctcttctcggtgtgggtctgagctccagggccaggacctgtggcaaactgggcttgaggcctcttgcgccacccgccccctgcagtgggctgctggcttggaagaggggagggaagggtctgcagcttgtggttggcccctgcagcctgagccctggggacctggcctcacttccagacttgccaggtccctgggggccaggcaggcaccagctgc

SEQ ID NO: 2659 - DNA, 6000 bp, Homo sapiens
aatttgtgggccagacacggtggctcacacctgtaatcccagcactttgggaggacgagagagctggatcgcctgaggtcaggagtttgagaccagcctggccaacatggtgaaaccccatctctactaaaaatacaaatattagctgggcatggtggcatgctcctgtagtcccagctactcaggaggctaaagaaggagaatggcttgaacccgggaggtggagattgcagtgagctgggatcgtgccatggcactccagcctgggggacaagagtgaaacgctgcctcaaaaaaaaaaaaggagattatggccaggtgcagtggctcatgcccgtaatcccagcactttggggggcccagtgggtagatcacctgaggtcaggagtttgcgacccgcctggcctacatggtgaaaccctgtctccactaaaaatacaaaaattagccaggtatggtggtgggtgcctgtaatcccagctactcaggaggctgaggcacaagaatcacttgaacctgcgaggcagaggttgcagtgagctgagatcgcaccactgcactccagcctggatggcagagcgagactgtgtctcagaaaggaaaaacaaaaaataaaaattagcggggcatggtggtgcaggcctgtaatcccagcaacttgggaggctcaggcaggagaatcacgagccagggaagtggaggttgcagtgagctgagctcgcaccactgcactccagcctgggcaacagaacaagactccatctcaataaataaataaattaattaaattaaaataaatttttttttgtagagatggggtctcaccctgttgcccagggtgatttcaaactcctgggctcaatcgatcctcctgctgtggcctcccaaagtgctaggattacaggtatgagccacccccacccctgccaatggaaatcttttattttactggttttactgccgtatagacttaatgaaccaaatgaaaactgaatctccactccatattacatctttatttctaaacaagataaaatctattatttattattattttttttttattacccaagttttgtctcaggatctactattcttattttcaaggtagttttaactgtccacatttcttaagccacattcaagaaataatgtcttcaattttggatgttgcctctcttcatcttgtacatgacatttaagcagatttaatattggcatccatcatctagtcaaacccttcacgtgttcttcaaagcaattaaatttggggttctcaaccttttctttctttctttcctttttttttttttttgagatggagtctcactctgtcgcccaggctggagtgcaatggcgcgatctcggctcactgcaccctctgcctcccatgttcaagccattctcctgcctcagcctcctgagtagctgggattacaggcacacaccaccacgtctggctaatttttatatttttagtagagacggggtttcaccatgttggtcaggctggtcttgaactcctgaccttgtgatccacctgccacctgcctcggcctcccaaagtgctgggattacagatgtgagctaccgcgcctggccttttttttttttttttttttttttgagacagagttttgctcttgttgcccaggctggagtgcaatggcgcaatctcggctcactgcaacctctgcctcccaggttcaaccaattctcctgcctcagcctcccaagtagctgggattacaggcatccaccaccatatctgggtaatttttctgtacttttagtagagacggggtttcaccatgttggccaggctggtctcaaactcctgacctcaggtgatccacctgcctcgacctctcaatgtgttgggattacaggcatgagccaccacacctggccaggttctcaaccttttctgtatcagtaaaagaaggtgtgaaattaatagatttgatgaagacccgctttttttcttgccacattggactcctagatgccatttggaatgggtttagaagacacggaagtatagatgtttcttaacagtagaaatatagaagagaaagcaagaccatgaggagactggcagttgactgcagggcacagccaactgccttggtggtggcattagctgggtttggggcagacaaggtaccctgggaggagttacttgaaaacgttacaatagtttgatttgaataaatctgcataagtaggagcagtgccagaagcagcagccccagcctgagcctgtccaccattgctttgtcccctccattggtgtctggcatatattgctggatgctgggtgagaactgctggctccaggtggacacaggcgagacctagccttaaaaatcacacaaagtggctgggtgcgatggctcacatctgtaatcccagtacttcgtgaggccaaggtgggaggatcacttgaggccaggatttggagattagcctggtcaacatagcaaggactcatccctattttttttaactaaaaataatgtaaaatcataataaaaaggaaatcaagcctgggcaacatagcaagatctcatctctactaaaaagaaattagctgcgtgtggtggtgcacacctgtagttccagctgctggggaggttgagctggagggatcacttgagccctggaggttgaggctgcagtgagccatgatcgtgccactgcactccagcctgggtgacagagccagaccctgtcttgataaaaaaaaaaaaaaaaaaggaaatcacataatgtcacttatgccagagttagtctgccgagccatgattcaaagggagggacattcaccccacttcttaatgggagggttatccaatcatgttgtaggaagagcatagacgatgggaggcactgtcatggtcatctttggagaacaaaatctgccagacctgggaacctgagcaccactagaccaaatataacaattaatcaatgattcaagcctcaactgattccttgataccaccactgggcaatcctagaacatttctcagctaaacttgcttcaatttgcaatggttatttcaaacattcactgtagaaggcactgtgtacatctttcctaatacccattcccagccccccttttccctatttatgtcctttaggcaaagctaaatacttgcgttcctagcctctcttgcatctatgtgacacaattctgtccagtgagatgtaagcaaaaatgtgcacagggacttctgggcaagctttttccttgaataggaaaatgatgcgtgcagtggaggcagccagccatatattgcaaccctcaggaaaaggtcaagacaattacaaaagtattggccctgatttcagtgagccactcaaccagtgctgttgctacctccaggccttctctcctgtgagaaaacaaacccttgtttgtttaagccactgatagtcaagctttctgttgctcctaggggatataagcattctcactcccctgtgcctctactttctcttttttttttttttttttgagacagagtctcgctctgtctcccaggctagagtgcagtgacctgatctcggctcactacaacctccgcctcccgcgttcaagtgaccctcctgcctcagcctcccgagtagctgggactataggtgtccgccaccatgcccggctaatttttgtatttttagtagagacggggtttcaccatattggccaagctggtctcgaactcctgaccttgtgatccgcccgccttggcctcccaaagtgctgggattacaggcgtgagccaccgcgcccagctcctctaatttctctttgtaaaagccttcagctgctaattctccctttcctgccaccaacagcctacttactacctacttacctgcacccacagccatcttatttgctccttctctcctgttaaaatggaaaagggctccctaccatggagggggagtgggagtaaatggaaagatgctaatctggcatccattacaagttcatctttcagttttggttttcttactcatccgcaccttagttctgggcctctaccactcatcagctgtgtgccttaaaaacaggccattaaagtagcaaatatttattgagtagattctaagctgtgcccaaaaaggcactgcgctaggtggtaggagttgctagggctaggaaacagacacagtccaagtagagagaaaattatttacaagacaggggaatggagccttggaggaactgacctatgtggctgggagggcagagaatgtgggaagagctcggaagaaggggctggggaggtaggcgtgggccacagccaactggcttctgtagactagggagggtaatgattttggtttcaatcctaaatcactaagacaggaagtgaattactctgtcggagcctcaatttctacctcgaaaaatatgttttattactaactcctgtactagattgagagttacggagaaggatttatccttttattcatttctgcatcgccagcgcccgacacatggtaggcgcttaatcaatgcctgttcggtgaataaataagaccggggactcctccacagacttctgtcattaagtcaaccagtcagcagagatttccttctccgcgttcctttccttccctccccttttcttgcccttcctccctctcctcttccacgcccccttcccactcctccccctcctatcctctcctggcttcctcctcctcttcccggccccgccccccgctgcgttgcgaaggcggggaaggcgaggcgggctttacggcagccgcgttgcggcggggcggggcgccgggcggccggcgcgcttggcggcagccgtgggaggcaggccggcaggcagacggactcgcaggcgtgtggcggcggccgtgcttgctagtgagggcgggagggagtgactcactgagcgtgtgtgagggagggagcgagcgagcgaacgagcagccggcgccgtcctcccgcagcaccagccaggccacgccgccgcctcttcccctgcgccccgcgcccaggccgggccgagccgagccgagccgggtcgggcccgggccatgctgctcaccgtgtactgtgtgcggagggacctctccgaggtgaccttttccctccaggtcgacgccgacttcgagctgcacaacttccgcgcgctgtgcgagctcgagtctggcatccccgcagccgagagccaggtacgccgggcagcgagccgggcctgccccggagctaagccctccccgcctcggggcctcactccctccctttgctactggtgaagaattgggggctggggggagcaaggatagccattctcaggtcacccccgcatccggaaaggagctggggagctggcatcagtagctgccctcacacactccgagcatggggtggggtacgaggagagggagcggagaacctgaccgcagacgcacccactgcagcgtgaggggcgcgtggactgttgagcagcgctaaccctccccacctttggctctttggcccttccctgtttctaatcccgagtgtaggatatcgttgtggacctcagaagcagccctgggtttgctaggattcatacatcctgcaaaccagaaataccagtttggatcactgtggtagatagatgttcctctgcttttttttttttttttttctggagagggtttctgcttaaatatacgcagtttacctttaaatgcacagatttgcacttccggtgaaagaaaaagtttaagacttgcactacctcattttggggtctttggaaatgctctttacccaccacatgcgtttctggttaaattcttttgaaaaacagtacctattggttcaactcaagctgtttgtttgtttcggttctaccctggtagtaagccagaaggccctttttctttcaggtcacagttcagagtttgggtcagttcaaagctcaatgctttaaaaggatatttgcttggaaacggcctagtatcagt

SEQ ID NO: 2660 - DNA, 6000 bp, Homo sapiens
tgtaatttatcatcttagtcgtgatgctgtgtgttaatatgaggatatattatcattttatgaaatgtcttttttttttttttccttttaacctccacagtcttggtgccattatttaagaaacattagctgataatagcagtgttttctaacctactaataacagttatccttttttggtaattaccttattttagtaaaagtttggaagattaaaacagatacacatatgtttccaggcttagtgaaggggatgtaccaacttcaaagaattaaaaagaaatggctttttacctaaataaccttttgttgctggtagtatagcttgtgctaatttttgtaatgtttaagtaatgaaataattctacatatcaggtcctttttatttagaacatcgacttcctaatatcatccgaataaatactctggacatagtaggtgaaagtattttgttaacaacttctttctggccaagcatggtggctcatgcctgtggtcccaacactttgggaggctgaggtggggagatcacttgaacctatggatttgagaccagcctgggcagcatggcaaaacacttgtttctaaaaaaaaaaaccacggctgggcgcagtgactcacgcctgtaatcccaacactttgggaggctgaggaagggtggatcacctgaggtcagaaatttgagaccagcctggccaacatggtgaaacctcatctctactaaaaatacaaaaattagccaggcatggttgtgggcgcctgtaatcccagctactcgggaggctgaggcaggagaattgcttgaagccgggaagcagaggttgcagtgagccaagattgcaccactgcactccagcctgggcaacagagtgagactccttctcaaaaaaaaaaaaaaagaaaaaaaattagccaggcatggtggcatgcacctgtggtccagctacttgggaggatgaggtggaaagatcacttgatcctggggagatcaaggctacagtgagttgtggttgcaccactgcactccaacttaggcaacagtgagacactgtctcaaaaaaacaacaaaaaaaagagcttattttttaaatactttatactctattataaactctatattaaaatgttttaaaaaaaaaacatgtttttgatagtagggatggtgtctcactatgttgccccagctgattttgaactcctgacctcaagggattctccctcctggacctcccaaagtgttgggactgcaggccagagtcactgtgttcagcttgatgtattatttaaaaactgatgaaaagataagctaggatagaatttaattaagtggtttgttttcctctaaaattgaatctcagctgagaaagaaatttggaaagggactgttagatatgttcactcacctttactccataagatttttttaatcacctaattcgatcaggtggatctactttcttcacctgtctcacatttgcccgtgaattctctatgtgtagaaacaaaattaatttctttacaagatctattaaaaatctgttgaaattaacagattgctgtgtgtattgtgagagaatggaagcaaccaacaaatattttggatgtccaaactacagaaacatccctcaacttggaatctaccagttcctgattttaaagatggcaaaagaacggaaactataaccctgcatgctgtgtggtttgcattgttaacccaagtttgcttgtctgtttcctaattcacacagagcgtcagaagccatgatgcatgtagtgtgtgtgtactgcagctggagtgggccccagaccaggtatttatagacaccatgttaagccttccatccagttgtcatctgtgatctgacagtctgtatccgcagcagtttgggaagttagcatttgtcattcaccatttcaccttgttcaatctggttacaactagcctatatgcatttgtattttggcatgcatacatggatatgtaacataaactcctgtttaaaaatggattcgttattagaaccatccaacagggagaaaatcccagttaaaacagtgtctattatatctaccccatcttggctactataaatatcacatcaagaatattggcctcacaacactttgttgttggagataactatgctttcatgggtttcataagtgcctttcctctgaaaaactgaaagctgttcttttacattactgcatacaactacctggagttatagagggttagaaattttaattttgttgaagaagaaatggaaacttaggccagaggacttgtcaggggtgactctgaacaacaggaactaagactttgcttttccttctgtctctggcctgacagattttcaggaagcactctgcttccatttcctctgatgtaaataatggtaaacatcagctcgaatacattggctgacttactaagaggaggaaagatggtcttttaaaccagcatcataagactttgtaggagtttgcaagctggttggaattagatacatagcatttagtttctcttctttctttcctttttcttttccttgtaaggataggttaaaagcaggcatagttgaattattcttaatatccactgtcctcatcctcttctcctgtcattctgtaaactgacctagtcctcccctacgtttaggacttaggctagtgaaactgaccttctcagctacaagaggactatatgctacttttttagtacaaaattcattgagggtgtgttcaccttgacctcacttgtttataactaacacacaaataccagaaggcccttaccatacctctttatgttgcttacatggatatttcactacagtgcattgtttctgttaacattagttcaaaattcaacctcttccagagtcagccttagttttaaataaaactaataactgttagacatctggtggtatgaaaataaaaaaactaataactgtgtttctagactctaatgggtatagcctaaactgagataagtgcagttttcctttttactcctaaagtgtaagtaaggtaagattgtttcatgggaagtcaatagcttcctgaaacaatgctttgtcttctcatgctgttaaccagtagtttattagaatgatttaaagccttttgaatataactgctttgctgctttttaagatcaagccctcttgttggatgttaacatttagtactgagcatttgagttgcatctgtcctaataatagattgtattttgaagtcatttttgttactgaccttttgatttttattttttattattattattttttattttgactgagtttcactctgtcacccaggctggagtgcagtggtgcagtcttggctcactgcaacctctccctcctgggttcaagcaattctcccacctcagcctacctagtagctgggattacaggcacccaccaccacgcctggctaatttttgtatttttagtagagatgaggtttcaccacgttggccaggctggtctcgaactcctgacctcaggtgatccacctgcctcggcctcccaaagtgctgggattacaggcatgagccactgtgcccagccctttttgatttttaattaaagatcttacaatggtcgggtgcggtggctcttgcctgtaatccaagcactttgggaggctgaggcgggcggatcacctgaggtcaagagtttgagaccaccctgaccaacgtggagaaacctcatctctactaaaaatgcaaaattagtcgggtgtgtggcgcatgcatgtaatcccagctactctgaggcaggagaatcgcttggacccgggaggcggaggttgcggtgagctcagatggcgccattgtactcctgtctgggcaacaagagcaaaacacagtcttaaaaaaaaaaaaaaattcttacacttacatgcgtagaggtcaatttttaactggattggtggcaaaagaagagctggaaatgatgtttaatgatactatgatgcttacactgagccgtcttgtttgggtggtctaaggtagcagtgaatctaaatagtcattgccagttgaaaaactattaatgaaccatctccctccacattcccctttctttaaaacatttaaatattcttaacttagttgcacactattgatgtgataaaaacttataagccttttaagtttagagttgtattatttggtaggatgatgattgtgatttaatctgctgatcattagtttacttttgttttctgagtcagatgctcacccagttttaccatgatttttggaaagcttggctagaaataaaatagaacatttgcttctctgtccccaagcattatgttatttcttatttctctttataattccctctctgtccaggtatacctggtttaagacttctcatttgtaacctcagtgttcacatttgaaacaagaaaagtgcattaacatgagaatcattctggtgcaaagattctcaggatttgtaatatccttaagaatcacccaaggagcttattgaaaatgcacattcctggatttactctcaagtatggtaccccagggtctgcatacttcacaagcgtccctggtggttttagggcaagtggtgaaaaaagtacacttggagaaactattctagagttgtagactagactagggaataaagaaacataaatgtccttcattcctgagcactaaccccgccattatgtgaatgcatattaatggatacttaatcacattgaattacagtatgcagattttattaagaacatgtctacctcttattctgatgctgtgaatgtctaccacaatgagaaagtaattttaaaatcatttctatttgtgtaagagaaacccgagtttgaggaccttattttattctacgctgtttagatttgtatcctctggtaatttagtggcattagtcacctgctaattaatctttttcctttcccctgtgttccatatagagaaaagtggtaaagaatctacctcactgggaatgtcatcattaccaacttcagatgggtttaaccatcccgcccgttcttcaggacagagtcctgatgttggtaatcctatgagtcttgctcgctctgtctctgcttcagtctgccctatcaagcccagtgactcagatcgcattgaacctaaagctgtgaaggctttgaaggcttcagctgaattccagctaaactctgaaaagaaagaacatctttctttacaagatctttctgatcatgcttcctcagcagaccatgctccaacagaccagagtccagctatgcctatgcagaattcatccgaagaaataactgttgcaggtaatctggagaaatctgctgaaagaagcacccagggcctcaaatttcatctccatacaagacaggaagctagtttatctgtcacatctactaggatgcatgaaccacagatgtttctaggtgaaaaggattggcatccagaaaatcagaacctgagtcaagtgagtgaccctcagcagcacgaagaaccagggaatgaacagtatgaggttgcacaacaaaaagcttcacatgaccaagaatatctttgtaacataggggaccttgagcttcctgaagaaaggcaacagaatcaacacaaaattgttgatttggaagctacgatgaaaggaaatgggctcccacagaatgtggatcctccaagtgcgaagaaaagtattccatcttcagaatgcagtggctgctcaaattcagaaacatttatggaaatcgatacagctcaacagtccctagttactttgcttaattcaacaggcaggcagaatgccaatgtcaagaacattggtgcattggatctcactttagataatcccttgatggaagtagaaacatcaaaatgtaacccttcatctgaaattttgaatgattccatttccactcaggatttacagcccccagaaactaatgttgaaatacctggaacaaataaagaatatggccattactcctctccaagtc

SEQ ID NO: 2661 - DNA, 6000 bp, Homo sapiens
gaactgttaattactgttccaatagcgtactgagcgctttgggcagggaggtgcggggcctgtgggtggacagggtcctagaggaatggggcctggaactccagcaggatatggtagagggagagaagagtacgaaggcccaaacaaaaaaccccgattttagatgtgatatttaggctttcattccagtttgttttgtttttttgtttagataccaatcttttaaattcttgcattttagtaagaaagctatctttttatggatgttagcagtttattgacctaatatttgtaaatggtctgtttgggcaggtaaaattatgtaatgcagtgtttggaacaggagaatttttttttcctttttatttctttattttttcttttttactgtataatgtccctcaagtttatggcagtgtaccttgtgccactgaatttccaaagtgtaccaatttttttttttttactgtgcttcaaataaatagaaaaatagttataatattgatcttcaactttgccattcatgcttctatgcatattaggctacgtattccacattgaaagcatgagagtgtctaggcctttgaatggcatatgccatttctgggaaatgcatctggaggctaagtattgctttctacaaataattgccccctttgttttaaaaagaagaaatgcatattgaagtagtttgatgatttgtttggcatataggaagcacgctggtgctaagtattttttaaatggttatgtaagcaaagctgaactgtaaatcttcaggaatatgtattaagattgtggaatgggtgtaagacaattggtagggggtgaaagtgggtttgattaaatggatcttttatggccctatgatctatcctttacttgaaagcttttgaaaagtggaaaggtcattttgttgcatttccccatttcttgtttttaaaagaccaacaaatctcaagccctataaatggcttgtattgaacttttacatttgaattaaagatgttaaacatgaagtcttttcatgtattcaagtgatttataaagatggggtgtagtctaaaaaacaaaacttgaaagtaagaaggtttagtaactgggccgggcgcggtggctcacgcctgtaatcccagcactttgggaggctgaggtgggcaaatcatgagatcaggagttcaagaccagcctggccaacatggtgaaaccccgtctctactaaaaatacaaaaaattagctgggcgtggtggcaggcgcctgtaatcccagctactcgggaggctgagccaggagaattgcttgaacctggagatggaggttgcagtgagctgagactgccactgcactccagcctggacaacagagcgagactctgtctcaaaaaaaaaaaaaggtttagtactgaagtaggtttagttatatatacatttgtactctgtaacttttacatctccttgtgctacttctgttgggcaaaatctataggactataaaaatctattggttctcttctaagagctagtggtgattgttaacaaatagggttgcagataatcattcttattgtaaatttaacttgttttcacatagtttcgttttcatgtagcactaaatctggagaaagttgctcatgctacacagtacaaatatcccttcctcccaccataaaggcttggaatgtttccatggtgttgtcagttaattgtcaacttcattgaacccccttccattagaacaagagactttgactattaaagtagattgtttattgttgcctgttagtataatgggagcctgatttcccagtgtaaatatgttagaggaacagcttcctaacagtaggtaaagtaattgaatggtttggctttgttctgagttacgttccattcaaatctgtacattgtagaattcttactatggaatgtgtcttcctccttttcacctcttttcttggtgctaattggcaaaagaaaaattctaagtcaaacctttattaacatgctgaagtttagtattgtgcctgtgtacaaaaggagacctattgttggaacaatctgagcactttctgcataggaaacaggataatgctgaaagtaaacactagtgtataaaagcatctcaccaaatactggttgtatgactgacaggtacatggtgtgctaagggagagaatctcattagaaagtaatgctcattatatcattcaccagcacactcggaaatatgagtagttttaccatgattatatcagtgaggaagttttgtccccaaacaggttattaattggtgatacataagagattttctgtacggaaacaagggtcttgattagaaaggaatccattacagtttggttgaattatatagtagggactctactaaagacaagaaaataaggggtgttccatgggacacccacagagggtgaactttgaatgtgtgtgggtgggggctggtcgggaaatgggaaaatctgcctataaaattaatgtttcagtttatttttcagattacatgcctttctttataagggatgctggcacagaccccctaaaataagcttttggtagtactgtacctttgaagagtggtgaaggatgctaatggataatctcctgaaagttgtggcttttgatacccttactgtggactgtagagttgctaaacgttgtttagcaaataatgttgcttagtttcaaatgacatttgactttcatcactaaaacagcaatgtactcagggttgtaagcttactcaaatagactttcaataagtcttcaatgtatatatgatagtttttagcctaatgtgaatttaaataatcttaatagtttcctaaaagtcgatctgaaacttggggtgggaaaggggaggtagcaatttttgaagtattttagccatttttttcatttaaagaaaccacttgtccccatttcctcttctccactttctcataattttgttttaagaggaacactggttgttttttatacttctcctaatctttaaaaactgcatattgttaagaccccagtgtatttaataggtattttataagcatagcccattggctcatgttagtgaaaccataatcctctttgcttagaacattaaactcataagaagtactacaaaccccaccactctttatagatgtattgtaccactaatataaacagctaaaaaatggggaaattgtaatgttacgcctgtgcaatttttaagtggcatattatggcagattaaaatttagatacttggcttttcttgggcaagccactaagttgtggcggaatgttttctggtgttcttggactgcaattatgcactattaaagtagtggcctgctacataactgcatttagccagcatttctgcagtgcgtaactgtgaggaacgtagtaccgcaaatggcaatggacattaggacccggatgtagtattcctgcttgctccaagattctcattgccgactgcatacaggtaggtaacaagcaatataatctaacttggtgacttgtatgtacttttattccgtgggcattctggcatcacatttctgacaatgaaattacagtgcagcacctaacacttgtatggtaaagctagcttacatcaaaactgtgtgggtgtggggttagagctgtaatttgtcaggcagaattcagtgctgttgcagttctcagataaaaagtgcaaacttgattctttggtatatctgactcagttgtgtggtttcctttagttgcattgtaactgaagataacatggaacacatcagtggtgtgggggagagggaactaaactatacttgggaactagggtgcttttagcaccttgacatggaccgtatagcatgtgataattagtctctattgtagcaaactgacctgcccatagatcggcaatatcagtaatttcattatgcaatcttggtaattctacaagttgagttgaactaaaagtacaggtttttttgtaatgcgatttaaaatttttaaaaacatgggcttcatgaaaacaccattgttactaacttgggcttagatgggaatctaatgtgaatagttcaagttatgggacttgtctaaatgtgtctatactctaaacctgggggaaggtggtgtggaacattgacttgactacagtcgaatacatgttgggaatcattcccaatcataagacatcgtcgtttctgtaggatgactgcatatgttcagagtagctttttgaatttggttcccttagctttagggatgtgatgttatagtccaaaatgtttacaagaaaacctaagtcttcaaaagcacaacttttgttgcttaggactttgcatcaactgttgttccagacctcacttcaacttcttggtctctgaactggttttagctagcatgcatgagagacagttttcatgtataatgtttctgctctgtaactggaaagtggtttactttgcataaatgctgatgaaaacttcatgactatgagacttttcttctgtgtatcaagaaaaagcttgctcgttggcaagcaattcacaaggtggggacagacttgtactttaacatgtagtccattcaagcaaacaactttggactctactgatagatgaaagagcaaatgatgactagtttagcctctgcatatcaacaatataatgcagatcaagtataatgctcaatattagtgacatgagtatcactaaattacatagaaccctgatggggtttcctgtgtcgtaatccattaaatcggtggccagtgcttgctgccgtggtttagtgattgggtgttagaaataaaaactcaggtctatttcttaccagtcagtaacaatttttagagaatgtacttggtatataatatatggacttcaggaactttattggggtggggggttaattttgccttaccctgttcactttcagatgattaggcttttgcactttagaatgagaaacttgtgacgttagtgtgttcttactagctttaatttgtatgtagcaatgaattgtgaatcttagtgcagtgggtttttttaaaaaactcaaaaagctgggaattaagtggtttcagtaataatgctataccgaggtgcttgcattgtatttcataattttgttacaaaccaaaattatttttaatgagaacagtcttgggttcagaggtgtgatgccagaatgtattttcgtactgttaggcccttggaacagataccggtgctttctgaaagatgaaagaaatgcaatgggtgctcttcatgcaaggttgcaaacctaccaagaatgcataatagtctcacttttccccaataaagagatgcgtgtgactagttttggacttttaaccttaatgggggttgcatgtctcctattgttaatcattgtcagctgcagtgacatgatccacagtcctgcatttactgcctttcacttaatgattttggacaggttttagagagccaggatgttggtctgggcctttatttggttttggctttagctgataatgttttagtgatgtcagctagtgcagttctcaaatggctgcctattagggaaagaattcagaggatttgactgctcctaatcatctgtcattgctgctagataatgattggcaatttttaagactcaactggaaatctcaacagttgctggtaaaccattaaccataaaaacgttgcttttgaacaccagtgctgaaaaaaatatttttttttttttttttgagagtgaaaagggcttggacttaagataggacaatgtggagaatggggggaagaatgcaaaacgatatagtatcccttatggatggtacatgtgcaacagggaactcttacttcatataccctttgcagtaatcattcagggaggaagaaaaacctggaacttgaatgaaggctgatctttgttttgtgcactgtggccctgccaggcatatagtgaaggtgaatgtcttctccctcagaaaaaaattggttccttgctgtccca

SEQ ID NO: 2662 - DNA, 6000 bp, Homo sapiens
tggcaacataagtttttttgatcaagttactgtgccggttaagtgactaaatctatagtcttatgctttttctttttgtagtctggtagcattttattaaaactttcaaccttttaagatttctgcaacttagcagatgtgtcttaagatcttgaaaagcacaaggtttcttaagcagcacatgccactaactggtgagtaggtctttgtcacttcattgagtgaattgaatctctggttgggcttgttaggcttacttggaaattaaatttccgttcagacgttgaaagtgagagtttgcaagtttttcagtgggttaatctgatgtgaaatttcttagaactcattttggaatggattttcacatctgcactaattcttaaattttttagcactacagggaagatctgttctttgaaacaggtgtatgagaatggctcaagtgggaacataccacaaggcatgtattaccgtaaactaattttcaaattacccttttttcctttctatgttcccggtacctgtggatcgactcattggtgattgtatcgacgaacgttgactacggaaccttctaaaatatttacttaacacacatggacatcaactacttataatgaactgttaattactgttccaatagcgtactgagcgctttgggcagggaggtgcggggcctgtgggtggacagggtcctagaggaatggggcctggaactccagcaggatatggtagagggagagaagagtacgaaggcccaaacaaaaaaccccgattttagatgtgatatttaggctttcattccagtttgttttgtttttttgtttagataccaatcttttaaattcttgcattttagtaagaaagctatctttttatggatgttagcagtttattgacctaatatttgtaaatggtctgtttgggcaggtaaaattatgtaatgcagtgtttggaacaggagaatttttttttcctttttatttctttattttttcttttttactgtataatgtccctcaagtttatggcagtgtaccttgtgccactgaatttccaaagtgtaccaatttttttttttttactgtgcttcaaataaatagaaaaatagttataatattgatcttcaactttgccattcatgcttctatgcatattaggctacgtattccacattgaaagcatgagagtgtctaggcctttgaatggcatatgccatttctgggaaatgcatctggaggctaagtattgctttctacaaataattgccccctttgttttaaaaagaagaaatgcatattgaagtagtttgatgatttgtttggcatataggaagcacgctggtgctaagtattttttaaatggttatgtaagcaaagctgaactgtaaatcttcaggaatatgtattaagattgtggaatgggtgtaagacaattggtagggggtgaaagtgggtttgattaaatggatcttttatggccctatgatctatcctttacttgaaagcttttgaaaagtggaaaggtcattttgttgcatttccccatttcttgtttttaaaagaccaacaaatctcaagccctataaatggcttgtattgaacttttacatttgaattaaagatgttaaacatgaagtcttttcatgtattcaagtgatttataaagatggggtgtagtctaaaaaacaaaacttgaaagtaagaaggtttagtaactgggccgggcgcggtggctcacgcctgtaatcccagcactttgggaggctgaggtgggcaaatcatgagatcaggagttcaagaccagcctggccaacatggtgaaaccccgtctctactaaaaatacaaaaaattagctgggcgtggtggcaggcgcctgtaatcccagctactcgggaggctgagccaggagaattgcttgaacctggagatggaggttgcagtgagctgagactgccactgcactccagcctggacaacagagcgagactctgtctcaaaaaaaaaaaaaggtttagtactgaagtaggtttagttatatatacatttgtactctgtaacttttacatctccttgtgctacttctgttgggcaaaatctataggactataaaaatctattggttctcttctaagagctagtggtgattgttaacaaatagggttgcagataatcattcttattgtaaatttaacttgttttcacatagtttcgttttcatgtagcactaaatctggagaaagttgctcatgctacacagtacaaatatcccttcctcccaccataaaggcttggaatgtttccatggtgttgtcagttaattgtcaacttcattgaacccccttccattagaacaagagactttgactattaaagtagattgtttattgttgcctgttagtataatgggagcctgatttcccagtgtaaatatgttagaggaacagcttcctaacagtaggtaaagtaattgaatggtttggctttgttctgagttacgttccattcaaatctgtacattgtagaattcttactatggaatgtgtcttcctccttttcacctcttttcttggtgctaattggcaaaagaaaaattctaagtcaaacctttattaacatgctgaagtttagtattgtgcctgtgtacaaaaggagacctattgttggaacaatctgagcactttctgcataggaaacaggataatgctgaaagtaaacactagtgtataaaagcatctcaccaaatactggttgtatgactgacaggtacatggtgtgctaagggagagaatctcattagaaagtaatgctcattatatcattcaccagcacactcggaaatatgagtagttttaccatgattatatcagtgaggaagttttgtccccaaacaggttattaattggtgatacataagagattttctgtacggaaacaagggtcttgattagaaaggaatccattacagtttggttgaattatatagtagggactctactaaagacaagaaaataaggggtgttccatgggacacccacagagggtgaactttgaatgtgtgtgggtgggggctggtcgggaaatgggaaaatctgcctataaaattaatgtttcagtttatttttcagattacatgcctttctttataagggatgctggcacagaccccctaaaataagcttttggtagtactgtacctttgaagagtggtgaaggatgctaatggataatctcctgaaagttgtggcttttgatacccttactgtggactgtagagttgctaaacgttgtttagcaaataatgttgcttagtttcaaatgacatttgactttcatcactaaaacagcaatgtactcagggttgtaagcttactcaaatagactttcaataagtcttcaatgtatatatgatagtttttagcctaatgtgaatttaaataatcttaatagtttcctaaaagtcgatctgaaacttggggtgggaaaggggaggtagcaatttttgaagtattttagccatttttttcatttaaagaaaccacttgtccccatttcctcttctccactttctcataattttgttttaagaggaacactggttgttttttatacttctcctaatctttaaaaactgcatattgttaagaccccagtgtatttaataggtattttataagcatagcccattggctcatgttagtgaaaccataatcctctttgcttagaacattaaactcataagaagtactacaaaccccaccactctttatagatgtattgtaccactaatataaacagctaaaaaatggggaaattgtaatgttacgcctgtgcaatttttaagtggcatattatggcagattaaaatttagatacttggcttttcttgggcaagccactaagttgtggcggaatgttttctggtgttcttggactgcaattatgcactattaaagtagtggcctgctacataactgcatttagccagcatttctgcagtgcgtaactgtgaggaacgtagtaccgcaaatggcaatggacattaggacccggatgtagtattcctgcttgctccaagattctcattgccgactgcatacaggtaggtaacaagcaatataatctaacttggtgacttgtatgtacttttattccgtgggcattctggcatcacatttctgacaatgaaattacagtgcagcacctaacacttgtatggtaaagctagcttacatcaaaactgtgtgggtgtggggttagagctgtaatttgtcaggcagaattcagtgctgttgcagttctcagataaaaagtgcaaacttgattctttggtatatctgactcagttgtgtggtttcctttagttgcattgtaactgaagataacatggaacacatcagtggtgtgggggagagggaactaaactatacttgggaactagggtgcttttagcaccttgacatggaccgtatagcatgtgataattagtctctattgtagcaaactgacctgcccatagatcggcaatatcagtaatttcattatgcaatcttggtaattctacaagttgagttgaactaaaagtacaggtttttttgtaatgcgatttaaaatttttaaaaacatgggcttcatgaaaacaccattgttactaacttgggcttagatgggaatctaatgtgaatagttcaagttatgggacttgtctaaatgtgtctatactctaaacctgggggaaggtggtgtggaacattgacttgactacagtcgaatacatgttgggaatcattcccaatcataagacatcgtcgtttctgtaggatgactgcatatgttcagagtagctttttgaatttggttcccttagctttagggatgtgatgttatagtccaaaatgtttacaagaaaacctaagtcttcaaaagcacaacttttgttgcttaggactttgcatcaactgttgttccagacctcacttcaacttcttggtctctgaactggttttagctagcatgcatgagagacagttttcatgtataatgtttctgctctgtaactggaaagtggtttactttgcataaatgctgatgaaaacttcatgactatgagacttttcttctgtgtatcaagaaaaagcttgctcgttggcaagcaattcacaaggtggggacagacttgtactttaacatgtagtccattcaagcaaacaactttggactctactgatagatgaaagagcaaatgatgactagtttagcctctgcatatcaacaatataatgcagatcaagtataatgctcaatattagtgacatgagtatcactaaattacatagaaccctgatggggtttcctgtgtcgtaatccattaaatcggtggccagtgcttgctgccgtggtttagtgattgggtgttagaaataaaaactcaggtctatttcttaccagtcagtaacaatttttagagaatgtacttggtatataatatatggacttcaggaactttattggggtggggggttaattttgccttaccctgttcactttcagatgattaggcttttgcactttagaatgagaaacttgtgacgttagtgtgttcttactagctttaatttgtatgtagcaatgaattgtgaatcttagtgcagtgggtttttttaaaaaactcaaaaagctgggaattaagtggtttcagtaataatgctataccgaggtgcttgcattgtatttcataattttgttacaaaccaaaattatttttaatgagaacagtcttgggttcagaggtgtgatgccagaatgtattttcgtactgttaggcccttggaacagataccggtgctttctgaaagatgaaagaaatgcaatgggtgctcttcatgcaaggttgcaaacctaccaagaatgcataatagtctcacttttccccaataaagagatgcgtgtgactagttttggacttttaaccttaatgggggttgcatgtctcctattgtt

SEQ ID NO: 2663 - DNA, 6000 bp, Homo sapiens
gaggttgcagtgagccgagattgcaccactgcactgcagcctgggtgacagagcgagactccgtctcaaaaaaaaaaaaataatgaaaggaatcatgaggttactatgttatgtgagtcagaaagaaaagggatgatcagtaagaggcatgcttgaactaaagatttcagagatagtgcagttactggtaataacaatcaggagtgagtgtgatgaggggaggatgggagactggatggtgatacagggtagaagaaaatactaatggaggaggtaaggaactgagccattagggtgttgggtgggtcatctgcctggatctttttttggtttttatgagacggagtctcactctgtgcccaggctggagtgcaatggtgtgatctcggctcactgcaatctctgcctcctgggttcaagcgattctcctgcctcggcctcccgagtagctgggattacaggtgcatgccaccacgccctgctaatttttgtatctttactagagagggggttttgtcatgttggacaggctggtctcgaactcctgacctcaagtgaccctactgcctcagccttgggtcccaaagtgttgggattacagccgtgagccaccgcacccggtcccgcctggatcttgaatgaagagagttagatgcagaaaagaagatagaagctatgagctaatgttgagggaggaattattccgcaaaaggtctgtggacctcaaagaaactggagattgtgaaatacaggctgggcgtggttgctcactcccataatcccagcactttgggaggcctaggtgggtggatcacttgaggtcaggagtttgaaaccagcctggccaacatggcaaaaccctgtctctactaaaaatacaaaaattggctgggtatgatggctcgcgcctgtggtcccagctactcggaaggctgaggcaggagaatcacttgaacctgggaggcagaggttgcagtgagctgagatagtgccactgctctccagcctgggcaacagagcgagactctgtgtcaaaaaaaataagactctgtgtcaaagaaaataagagaaaaataattgatgcatctgactggttaataccctatagacattgtaacattgtaatttttttttttttttttttttgagacagtctggcacttgtcgcccaggctggagtgcaatagcgcgatctcggctcactgcaacctccgcctcctgggctcaagcaattctcctgcctcagcctcccaggtggctgggattataggtgtgcactatcaagctcagcaattttttttttttttttttgagactgagtcttgctctgtcgcccaggctggagtgcagtggcacaatctcggctcactgcaacctctgcctcccgggttcaagcaattctcctgcctcagcctcccgagtagctgggactacagacgtgcaccaccacgcccagctaatttttgtatttttagtagagacggggtttcaccatattggccaggctggtatcgaattcctgacctcgtgatccacccacctcggcgcccaaagtaagtgctgggattacaggcgtcagccaccccacccagccaaatttttgtattttttagtaaagacggggtttcgccatgttggccaggctggtctagaactcctgacctcaggtgatctgcccgactcggtgtcccaaagtgctaggattacaggcgtgagccacagtgcccagcctaacattgtaattttttaaaagtaccttagtctgttcgtaaagtgttgagtggaatatttacattcctcctgtgattggtgtttgtaaacgtgtatatatacacacatacacacaagggctctttttgaacaaagcgcgcacccacagaagcctattgaaaagtttatgctgctacaataaatctgtattcctatgaggttccataatgaaatcagttaagactgcgtatgtttgaaatcggtaagattttacttctctactttcattgagttggcacgaggtagggtagacagcaggcactcaatttctgattttgaatcggaaaacatctgtttttctgggcaaggatatcagtagattgctcctagggacaatcaagaaagaaaagagacctccaacgcttctctgcaggagcggatagagccctggttatttgctcgcaagtgaaaattgccctggcatacccattcaaatttctcctagcaaatcatagtggcctacagccaacgccttcttcgctcactggccaactggaaacttcagtccccccatgcctcccgcctctcacccaggggccaataggaatgatcagaggttcgcaacttagtgtcatcaagcatagtaattgcaattggctattggagctgtcgatcgtggagtaggcggggccgtgccagctggcctatataagacgaggacaaaggcggcgcgccgcctgtgtcatccgccattttgtgagaagcaaggtggcctccacgtttcctgagcgtcttcttcgcttttgcctcgaccgccccttgaccacagacatgtctcgggatcggttccggagtcgtggcggtggcggtggtggcttccacaggcgtggaggaggcggcggccgcggcggcctccacgacttccgttctccgccgcccggcatgggcctcaatcagaatcgcggccccatgggtcctggcccgggccagagcggccctaagcctccgatcccgccaccgcctccacaccaacagcagcaacagccaccaccgcagcagccaccgccgcagcagccgccaccgcatcagccgccgccgcatccacagccgcatcagcagcagcagccgccgccaccgccgcaggactcttccaagcccgtcgttgctcagggacccggccccgctcccggagtaggcagcgcaccaccagcctccagctcggccccgcccgccactccaccaacctcgggggccccgccagggtccgggccaggcccgactccgaccccgccgcctgcagtcacctcggcccctcccggggcgccgccacccaccccgccaagcagcggggtccctaccacacctcctcaggccggaggcccgccgcctccgcccgcggcagtcccgggcccgggtccagggcctaagcagggcccaggtccgggtggtcccaaaggcggcaaaatgcctggcgggccgaagccaggtggcggcccgggcctaagtacgcctggcggccaccccaagccgccgcatcgaggcggcggggagccccgcgggggccgccagcaccacccgccctaccaccagcagcatcaccaggggcccccgcccggcgggcccggcggccgcagcgaggagaagatctcggactcggaggtgagtgtctatgggagcgacgcgtcggctcccctaagatggcggcggccccctcctcgcccccgcccccgcgctgggcttccattttgtcggctgccggaaggggcgcttgcgcgcgccgctgcgggggcggggcggcctgcggggccgtcggtcggcgggggattggccgccgccgggccttgctctcccggcgggcggaaggctaggggaggtttcctttcggaaggaagcgcggggccgcggtggtcggccctgcagaaggtatcctgtccctgggactggcgtaatgcagagcatgcggcgtaggtttggagagaaccgggaagttccataaaagcgcaggcgcagatcgtgtaggttacagtggcatttggatttgtgttattttcctattttaattttcatactatttagatttttttagggacactcaacatatgtgggtgacagttgctgatggacgtctactctttggggaagtgtgtctattctcgaacattctggatgatggggctcctttttcaatgttaagatagtgctcatgttagaaatctcacatagtaaaaccttgattttgaccaaacggaacagaaaggcaactgataggtttcagataagcaaatactatcttggggattttcacttgcagaggtctctggtgtttgaaaacttctttcctttttcattaggggtttaaagccaatttgtctctcttgaggaggcctggagagaaaacttacacacagcgatgtcggttgtttgttgggaatctacctgctgatatcacggaggatgaattcaaaagactatttgctaaatatggagaaccaggagaagtttttatcaacaaaggcaaaggattcggatttattaagcttgtgagtgtaattgtttgattttacgtagaattaaaaagggtgggggatttttttgtcactacaaacgctgaaggcttggtttttaaactggggaggataaattgatcttttagatttttcaccattcttacaggaaaaatgcttgcggtataatgcataattgttgctacctaagagaaaagaggggtggggtgggtaaactaagtggtgttagtgggtgctgcctaaaggtaatggtcgaactgagctgaaggaagaaagggagtaggaagtaggcctatgacaatttaagagtagacatcatccaattttgaggtcattaacatgagtgtctctgatacacaggaatctagagctttggctgaaattgccaaagccgaactggatgatacacccatgagaggtagacagcttcgagttcgctttgccacacatgctgctgccctttctgttcgtaatctttcaccttatgtttccaatgaactgttggaagaagcctttagccaatttggtcctattgaaagggctgttgtaatagtggatgatcgtggaagatctacagggaaaggcattgttgaatttgcttctaagccagcagcaagaaaggcatttgaacgatgcagtgaaggtgttttcttactgacgacgtaagttgtcttgtttattctaataatttctatcaacttatatgagaatggtggcaataaaactggaacaaagctaagatggaaccatttttgttattagaactcctcgtccagtcattgtggaaccacttgaacaactagatgatgaagatggtcttcctgaaaaacttgcccagaagaatccaatgtatcaaaagtaagattgattaaacttttttggcagtttttaaatcaagtgtaaaggttaaatttattttagtgattttccaattttgcttaaaatatgcaaaattatttgatgtggatatgcttattagtaaaaaatctcaggctgagaaagatttgaagctgttattcagatagctgtttgcttctaaggtggatacattcacatgcagtcctgttttgtccctgcaataatggcataaagtcacgtgtgtgactgagtctctgttgcccaggccagagtgcagtggcatgacctcagctctctgcaacctctgcctcccaggttcaagcgattctcctgcctcagcctcccaggtagctgggattacaggcatgtgccaccatgcctggctcgttttctatttttagtagagatgggctttcaccatgttgactaggctgatctcgaactcctgacctcaggtgagtcgcccacctcggcctctcaaagtgctgggatacaggcatgatgcaccgtgcctggctgaagtacgtttttttttgttttgtttttgagctggagtttcgctgttgtttcccaggctggagtgcagtggtgtgatttcagctcactgcaatctttgcctcccgggttcaagtgattctcctgcctcagggttccagaatagctgggattacaggtgcctgccaccatgcccagctaattttttgtatatttagtggagacggggtttcatcatgttggccagatgggtcttaaactcatgacctcaggtgatccacctgccttggcctctcaaagtgcagggattacaggggtgagccaccgcgtgtggcctacagtacatttttatgggtggaaaaaataagcctcggtaaggaatttggctagaggaaaacaattagaaaacgag

SEQ ID NO: 2664 - DNA, 6000 bp, Homo sapiens
gaaatcaaacataatatactttgttagaaaaaaagcagaaaataactgtaatttgatattaaaatttcctgtaattccttctaggtacctgcaagttctatagacaactccaattggaaggcagtaaaggctgacttactggatccatgtagcccattcggctgtaactttcctctctttggcgcctcatttgttcttccatctcacgttgacgaatcatcatctcttcctctcttctacgtcgttcctcctcttgcctagaaatacccatcaggtacataactgaagtgttatccacatcttttagaattcaatgtgaagaaacctagcagttgacctaagaactaggttagcactaaaaaacacaaaggcttagagtgagcctaggggcatagtactaaagacattctggcaaataatgtaggctttattaaggataatcttacactgtattcgattttaagtgttaaaccaacactgacatatttaacctttgtattttgcctgactgacctgaaaaactaagtacatcttttccctaaatgtcagaatataaatgttagtgcataagtcaaggattaaggccagggttggtagttcatgcctgtaatctcagtactttaggaggccaggagtttgacaccagcctaggcaatataggaagactccatctccacaaatacaaaaaaaattaaaaaattagctgggggtggtggcctgtgcctctagtcccagctactcaggaggactgctagagctgaggagtttgagactgcagtgagctatgatcatgccactgcacttcagcctgggcccatctcaaaaaaggaagaaaaaaaatggccaagcgtggcggctcatgcctgtaatcctagcactttgggaggcagagacaggtggatcacttgagctcaggagttcaaggccagcctggccaacatggcgaaaccccgttatctactacaaatacaggaagaattagccaggtgtcgtggcgcatgcctgtaatcccagctgatcgggaggctgaggcaagagaatcgcttgaacccaggaagcggaggttgtggtgagctgagactgcaccactgcactccagcccgggcaacagaatgatacgtttcaaagaaaaaaataaatgaaggcttaaaccttaaacacaattttacctcaattgcatttctttacgtttctgcatttcttgattgtgaagttcttccatgcgtcttaattcttcctgtcgtctcatcagatctgaacattggaaaatatttggattcacattaacaaggttctaataaggtgaaaaacaattgaccttagcaatgatgttcacgcacaggtctttttaccttggcgcaaaagatttgcctgatgttcatgataggcatcttccatttcactttccaatttgtcttttgcatctttcatgtttttttcaacttgttccctttgctgtttttccatttcatccaaagacttccatcgctgagaatattcgtactcaaacgtgccatgctgggcaaaacgaggaggggtttctctctccctaacaatacacaaaattttaacatgaaccgatttgtgaatgcataccagaaaatacttgccctagtactgatctttttcctgttctatttcttgtaaagagtacaaaaggcaaaaattttcctgattcatctataaatatcttcacagcaaaaatactcagaacactcagtaaaagaatgcaggcactggagataaatcctaccttcctcgttttctaattgttttcctctagccaaattccttaccgaggcttattttttccacccataaaaatgtactgtaggccacacgcggtggctcacccctgtaatccctgcactttgagaggccaaggcaggtggatcacctgaggtcatgagtttaagacccatctggccaacatgatgaaaccccgtctccactaaatatacaaaaaattagctgggcatggtggcaggcacctgtaatcccagctattctggaaccctgaggcaggagaatcacttgaacccgggaggcaaagattgcagtgagctgaaatcacaccactgcactccagcctgggaaacaacagcgaaactccagctcaaaaacaaaacaaaaaaaaacgtacttcagccaggcacggtgcatcatgcctgtatcccagcactttgagaggccgaggtgggcgactcacctgaggtcaggagttcgagatcagcctagtcaacatggtgaaagcccatctctactaaaaatagaaaacgagccaggcatggtggcacatgcctgtaatcccagctacctgggaggctgaggcaggagaatcgcttgaacctgggaggcagaggttgcagagagctgaggtcatgccactgcactctggcctgggcaacagagactcagtcacacacgtgactttatgccattattgcagggacaaaacaggactgcatgtgaatgtatccaccttagaagcaaacagctatctgaataacagcttcaaatctttctcagcctgagattttttactaataagcatatccacatcaaataattttgcatattttaagcaaaattggaaaatcactaaaataaatttaacctttacacttgatttaaaaactgccaaaaaagtttaatcaatcttacttttgatacattggattcttctgggcaagtttttcaggaagaccatcttcatcatctagttgttcaagtggttccacaatgactggacgaggagttctaataacaaaaatggttccatcttagctttgttccagttttattgccaccattctcatataagttgatagaaattattagaataaacaagacaacttacgtcgtcagtaagaaaacaccttcactgcatcgttcaaatgcctttcttgctgctggcttagaagcaaattcaacaatgcctttccctgtagatcttccacgatcatccactattacaacagccctttcaataggaccaaattggctaaaggcttcttccaacagttcattggaaacataaggtgaaagattacgaacagaaagggcagcagcatgtgtggcaaagcgaactcgaagctgtctacctctcatgggtgtatcatccagttcggctttggcaatttcagccaaagctctagattcctgtgtatcagagacactcatgttaatgacctcaaaattggatgatgtctactcttaaattgtcataggcctacttcctactccctttcttccttcagctcagttcgaccattacctttaggcagcacccactaacaccacttagtttacccaccccacccctcttttctcttaggtagcaacaattatgcattataccgcaagcatttttcctgtaagaatggtgaaaaatctaaaagatcaatttatcctccccagtttaaaaaccaagccttcagcgtttgtagtgacaaaaaaatcccccaccctttttaattctacgtaaaatcaaacaattacactcacaagcttaataaatccgaatcctttgcctttgttgataaaaacttctcctggttctccatatttagcaaatagtcttttgaattcatcctccgtgatatcagcaggtagattcccaacaaacaaccgacatcgctgtgtgtaagttttctctccaggcctcctcaagagagacaaattggctttaaacccctaatgaaaaaggaaagaagttttcaaacaccagagacctctgcaagtgaaaatccccaagatagtatttgcttatctgaaacctatcagttgcctttctgttccgtttggtcaaaatcaaggttttactatgtgagatttctaacatgagcactatcttaacattgaaaaaggagccccatcatccagaatgttcgagaatagacacacttccccaaagagtagacgtccatcagcaactgtcacccacatatgttgagtgtccctaaaaaaatctaaatagtatgaaaattaaaataggaaaataacacaaatccaaatgccactgtaacctacacgatctgcgcctgcgcttttatggaacttcccggttctctccaaacctacgccgcatgctctgcattacgccagtcccagggacaggataccttctgcagggccgaccaccgcggccccgcgcttccttccgaaaggaaacctcccctagccttccgcccgccgggagagcaaggcccggcggcggccaatcccccgccgaccgacggccccgcaggccgccccgcccccgcagcggcgcgcgcaagcgccccttccggcagccgacaaaatggaagcccagcgcgggggcgggggcgaggagggggccgccgccatcttaggggagccgacgcgtcgctcccatagacactcacctccgagtccgagatcttctcctcgctgcggccgccgggcccgccgggcgggggcccctggtgatgctgctggtggtagggcgggtggtgctggcggcccccgcggggctccccgccgcctcgatgcggcggcttggggtggccgccaggcgtacttaggcccgggccgccacctggcttcggcccgccaggcattttgccgcctttgggaccacccggacctgggccctgcttaggccctggacccgggcccgggactgccgcgggcggaggcggcgggcctccggcctgaggaggtgtggtagggaccccgctgcttggcggggtgggtggcggcgccccgggaggggccgaggtgactgcaggcggcggggtcggagtcgggcctggcccggaccctggcggggcccccgaggttggtggagtggcgggcggggccgagctggaggctggtggtgcgctgcctactccgggagcggggccgggtccctgagcaacgacgggcttggaagagtcctgcggcggtggcggcggctgctgctgctgatgcggctgtggatgcggcggcggctgatgcggtggcggctgctgcggcggtggctgctgcggtggtggctgttgctgctgttggtgtggaggcggtggcgggatcggaggcttagggccgctctggcccgggccaggacccatggggccgcgattctgattgaggcccatgccgggcggcggagaacggaagtcgtggaggccgccgcggccgccgcctcctccacgcctgtggaagccaccaccgccaccgccacgactccggaaccgatcccgagacatgtctgtggtcaaggggcggtcgaggcaaaagcgaagaagacgctcaggaaacgtggaggccaccttgcttctcacaaaatggcggatgacacaggcggcgcgccgcctttgtcctcgtcttatataggccagctggcacggccccgcctactccacgatcgacagctccaatagccaattgcaattactatgcttgatgacactaagttgcgaacctctgatcattcctattggcccctgggtgagaggcgggaggcatggggggactgaagtttccagttggccagtgagcgaagaaggcgttggctgtaggccactatgatttgctaggagaaatttgaatgggtatgccagggcaattttcacttgcgagcaaataaccagggctctatccgctcctgcagagaagcgttggaggtctcttttctttcttgattgtccctaggagcaatctactgatatccttgcccagaaaaacagatgttttccgattcaaaatcagaaattgagtgcctgctgtctaccctacctcgtgccaactcaatgaaagtagagaagtaaaatcttaccgatttcaaacatacgcagtcttaactgatttcattatggaacctcataggaatacagatttattgtagcagcataaacttttcaataggcttctgtgggtgcgcgctttgttcaaaaagagcccttgtgtgtatgtgtgtatatatacacgtttacaaacaccaatcacaggaggaatgtaaatattccactcaacactttacgaacagactaa

SEQ ID NO: 2665 - DNA, 6000 bp, Homo sapiens
ctaaacatttcacacaatccttacaatgtccccaaaaagcaagtgtgtcagaaaagtgaaagatcttggaacaataccctgctcagatggaaacagcctgttcttcaccattatgcttttatttattcattcactcaacaaatgtttattatctctgtgctagtgtctgttttaggtgccagtgatacagccttaaagaactcagagtttcagtccaacagaggagacagacaatagacaagtgaagaaacaggctgcatgctgtggctcatgcctgtaattccagcactttgggaggctgttcgaggtcaggagtttgagaccagcctagccgacacggcaaaaacccgtctctattaaaaaaaaaaaaaaattagcgtggtggcacgtgcctgtagtcccagctactcgggaggctgaggcaggagaatcacttgaacccatgaggtggaggtttcagtgagcggagatcacgccactgcattccagcctgggcgacagggtgagactccgtctcaaaaaaaaaaaaaaaaaaaatctgatacatcaactaagtagtctccaggcggctatgtctaataaacagctggatatctcagaactgggtccttttttttttttttttttgagacggaatctcgctctgtcgcccaggctggagtgcagtggcgcgatctcggctctgcaagctccgcctcccaggttcacgtcattcttctgcctcagcctcccaagtacctgggactacaagcgcccgccatcacgtctggctaagtttttgtatttttagtagagacgaggtttcaccgtgttggccaggaaggtctcgatctcctgacctcgtgatccgcctgcctcggcctcccaaagtagtgggattacaggcgtgagccactgcgcccggcgagaactgagtcctaaaatatttcaatgtttggaggtcctacaaggaggaaatgggatgatcagtgaggcaggaagagaaaaatcctgagtgtggtgtcacagaatgccagtgaagaaaaagtgcttcaaaaaagacagattactatatatgttgaatgttgctaacaggtaaaaaaaagatgactatagataagtgtttactggatttggcaacatggaaatcattggtatcctccccaacagtttaggaggagtagtgtggacagactggggtggattgaagaggaaagagaagtgaggaaatggagactgtgagtgtagacaacttgttttaaaagtgttgttacaaacatggccgggtgcggtggctcacccccataaccctagcacttcaggaggcttaggcgggtggatcacttgaggccaggagtttgagaccagccaggccaacatagcaaaaccctgtctctgttaaaaatacaaaaaaaaaattagctgggtatggtggcacatgcctgtaatcccagctactcaggaggctgaagtaggagaatcgcttgaacccaaaaggcagaagttgcagtgagccaagatcggccactgcactccagcctggggtatagagcaaggctccgtctcaaaaaaaaaaaaaaaaaaaaaagccaggcgtggtggcttatgcctgtaatcccagcactttgggatgctgaggcaggcggatcatgaggtcaggagtttgagaccagcctggccatacgatgaaaccctatttctactaaaaatacaaaaattagccaggcatggtggcacgtgcctgtggtcccatctattcaggaggctgaggcaggagaatcacttgaacccaggaggcggaggttgcagtgaggcaagctgatgccactgcactccagccaggattttttgagacagagtgagactctgtcgcaaaaaaaaaaaaaaaaaaagttttgttacaaaaaggagcaaagatgagatagcataaaagaaacgggatggtgatgattcaatagaagtaattgatagactaaagaaaaattctggtgaaggcttgtgtagatggaatccatagcacaagaagaggatttgctttttttttttttttaaatagtgccagtcaagtgggaatggagaaggaacaaataaatctgtaactggttgtgatcaattagttgtaaacaccgccgcactcagaccagccatgggtttgccctttgataagggcaaagacacatttttcgtggtatcagggaaaaagatttaaaaagacaaggcaaatttaagtaggctcatggcttttccagttgggttggaaagttcctctccgatgactgttatattctcaaagaaatatgaggagaggggcagggcatggtggctcacatccgtaatcctagcactttgggaggctgaggcgggtggatcatctgaggtcaggatttcaagaccagcctggccaatatggtgaaacccccgcctctattaaaaataaaaaaattagccgggcgtgatggcacgtgcctgtagtcccagctactcgggaggctgaggcagcagaatagcttgaacctgggaggtggaggttgcagtgagccgagattgcaccactgcactgcagcctgggtgacagagcgagactccgtctcaaaaaaaaaaaaataatgaaaggaatcatgaggttactatgttatgtgagtcagaaagaaaagggatgatcagtaagaggcatgcttgaactaaagatttcagagatagtgcagttactggtaataacaatcaggagtgagtgtgatgaggggaggatgggagactggatggtgatacagggtagaagaaaatactaatggaggaggtaaggaactgagccattagggtgttgggtgggtcatctgcctggatctttttttggtttttatgagacggagtctcactctgtgcccaggctggagtgcaatggtgtgatctcggctcactgcaatctctgcctcctgggttcaagcgattctcctgcctcggcctcccgagtagctgggattacaggtgcatgccaccacgccctgctaatttttgtatctttactagagagggggttttgtcatgttggacaggctggtctcgaactcctgacctcaagtgaccctactgcctcagccttgggtcccaaagtgttgggattacagccgtgagccaccgcacccggtcccgcctggatcttgaatgaagagagttagatgcagaaaagaagatagaagctatgagctaatgttgagggaggaattattccgcaaaaggtctgtggacctcaaagaaactggagattgtgaaatacaggctgggcgtggttgctcactcccataatcccagcactttgggaggcctaggtgggtggatcacttgaggtcaggagtttgaaaccagcctggccaacatggcaaaaccctgtctctactaaaaatacaaaaattggctgggtatgatggctcgcgcctgtggtcccagctactcggaaggctgaggcaggagaatcacttgaacctgggaggcagaggttgcagtgagctgagatagtgccactgctctccagcctgggcaacagagcgagactctgtgtcaaaaaaaataagactctgtgtcaaagaaaataagagaaaaataattgatgcatctgactggttaataccctatagacattgtaacattgtaatttttttttttttttttttttgagacagtctggcacttgtcgcccaggctggagtgcaatagcgcgatctcggctcactgcaacctccgcctcctgggctcaagcaattctcctgcctcagcctcccaggtggctgggattataggtgtgcactatcaagctcagcaattttttttttttttttttgagactgagtcttgctctgtcgcccaggctggagtgcagtggcacaatctcggctcactgcaacctctgcctcccgggttcaagcaattctcctgcctcagcctcccgagtagctgggactacagacgtgcaccaccacgcccagctaatttttgtatttttagtagagacggggtttcaccatattggccaggctggtatcgaattcctgacctcgtgatccacccacctcggcgcccaaagtaagtgctgggattacaggcgtcagccaccccacccagccaaatttttgtattttttagtaaagacggggtttcgccatgttggccaggctggtctagaactcctgacctcaggtgatctgcccgactcggtgtcccaaagtgctaggattacaggcgtgagccacagtgcccagcctaacattgtaattttttaaaagtaccttagtctgttcgtaaagtgttgagtggaatatttacattcctcctgtgattggtgtttgtaaacgtgtatatatacacacatacacacaagggctctttttgaacaaagcgcgcacccacagaagcctattgaaaagtttatgctgctacaataaatctgtattcctatgaggttccataatgaaatcagttaagactgcgtatgtttgaaatcggtaagattttacttctctactttcattgagttggcacgaggtagggtagacagcaggcactcaatttctgattttgaatcggaaaacatctgtttttctgggcaaggatatcagtagattgctcctagggacaatcaagaaagaaaagagacctccaacgcttctctgcaggagcggatagagccctggttatttgctcgcaagtgaaaattgccctggcatacccattcaaatttctcctagcaaatcatagtggcctacagccaacgccttcttcgctcactggccaactggaaacttcagtccccccatgcctcccgcctctcacccaggggccaataggaatgatcagaggttcgcaacttagtgtcatcaagcatagtaattgcaattggctattggagctgtcgatcgtggagtaggcggggccgtgccagctggcctatataagacgaggacaaaggcggcgcgccgcctgtgtcatccgccattttgtgagaagcaaggtggcctccacgtttcctgagcgtcttcttcgcttttgcctcgaccgccccttgaccacagacatgtctcgggatcggttccggagtcgtggcggtggcggtggtggcttccacaggcgtggaggaggcggcggccgcggcggcctccacgacttccgttctccgccgcccggcatgggcctcaatcagaatcgcggccccatgggtcctggcccgggccagagcggccctaagcctccgatcccgccaccgcctccacaccaacagcagcaacagccaccaccgcagcagccaccgccgcagcagccgccaccgcatcagccgccgccgcatccacagccgcatcagcagcagcagccgccgccaccgccgcaggactcttccaagcccgtcgttgctcagggacccggccccgctcccggagtaggcagcgcaccaccagcctccagctcggccccgcccgccactccaccaacctcgggggccccgccagggtccgggccaggcccgactccgaccccgccgcctgcagtcacctcggcccctcccggggcgccgccacccaccccgccaagcagcggggtccctaccacacctcctcaggccggaggcccgccgcctccgcccgcggcagtcccgggcccgggtccagggcctaagcagggcccaggtccgggtggtcccaaaggcggcaaaatgcctggcgggccgaagccaggtggcggcccgggcctaagtacgcctggcggccaccccaagccgccgcatcgaggcggcggggagccccgcgggggccgccagcaccacccgccctaccaccagcagcatcaccaggggcccccgcccggcgggcccggcggccgcagcgaggagaagatctcggactcggaggtgagtgtctatgggagcgacgcgtcggctcccctaagatggcggcggccccctcctcgcccccgcccccgcgctgggcttccattttgtcggctgccggaaggggcgcttgcgcgcgccgctgcggg

SEQ ID NO: 2666 - DNA, 6000 bp, Homo sapiens
taacttgaataatcttaaaatgacccccacgtctcaaatggttttaggatagagtggcataaccaaggtctgccacacagtggcagtgtttccccagggacgaaggtaatttagcggcccaggactttggaaaagcaggtagttttaaactttactccagaggaatagcagtactaaaaatgtaacatggtaatcttcctcaatttgcagaaaaagaaataaaagacataattcagtcaattatcttcctccaaactttcttaagcctttggtttctgcttttgtctgccaaggagcacaatataaatagagcacttttagaactggctgagcatgttaagttccatggctgattttttcccagacttgtaatgtcagaattgctttttaaatatttttttgtgatataataatatatcctactagttaaaatgtttccgcattcaaatgaccagattaacagcatcagtactgcaaaatgcttcctatgaagtgctatactttcgggtgccctactcattaaacctatttgagaatcatgatctcatccagtgttttctagttacaaaaaagaacaagtttcttttctttttttgaaatggagtcttgctctgtcacccaggctggagtgcagtggtgcacgatctcagctcaccacaatctccgcctcccaggttcaagcaattctcctgcctcagcctcccaagtagctgggactacaggtgcccgccaccacgcccggctaatttttgtgtttttagtagagtcagggtttcaccatgttggccaggctggtctcaaactcctggcctcaagtgatctgactgcctcagcctcccaaaattctgggattacaggcatgacccactgcacccaacctccaaaaaagaacacatttctgagaaactaaattagttacctaagtttatgaagccctctatgggacaggttcagactaatccctgtaaagtgagcactccagatgtttcctttgttgccatttatcaacttgataaacaaggattgttggatgactacaacaatgaagggacagagaggtcaaggtgattcacaggtttctaaactggtgagtggatatggttccactcaccaaaattgagaatacaggttgctaattctaaatacagactcactttatcttggcacaagttaatgtgtaaaataaaagtttcctggggatgggaggagtatgaagttgttgcttaatgggcatagagtttcagttttgcaagatgaaaggagttctaggccaggcccgttgggtcacacctgtaatcccagcgctttgggaggccgaggtgcatgggtcacttgaggtcaggagttcaagactagcctggccaacatggtgaaaccccgtctctcctaagaatacatacaaaaaagtagccaggcgtggtggcaggtgcctgtaatcccagctacttgggaggctgaggcaggagaattgcttgaacccgggaggcagaggttgcagtgagccaagatagcaccattgcattccagcctaggcaacaagagcaaaactccatttcaaaaaaaaaaaagaagagaaaaagaaaagaattctgaagattggtagattggttacataacaatttgaatgtacttctgaactgcatactttaaaatggttaagatggtaaatttcatgttatatatgttttaccacaataaaaattgaatgaaaggttttcctttcctagcttacccatgtccacccattgttcaaattggagctttctctcttagcttctgtgatgagtgaaaaggtgctccccaaagatattttaaaatactaatataaggaatattatttcactcattcattttcagagggagctcaagaagttgtcaagtgaatgaattaattagttcaacaaatatttatcagttttcctaccttgaacctgggatgttctaagtcctttgttctcaaagtgtggtctccagatcagcaacactagcatcaccagggaatttgttagtaatatacattcctgtggggcacggtggttcatgcccgtaatcccagcactttgcgaggccgagatgtgcaggttgcttgagtccaggagtttgagaccagcttgggcaacatggtgacaccccgtctctacaaaataaaaaattagctgggcatggtggtgcacacctgtagtcccagccacttgggaggctgaggtggaagggttgcttgagcctgggaggttgaggctgcagtgagctgtgatcatgccactgcactcagggagaaaaagaaaaaaaggaaagaaagaagtatacatctctggaccccacttcagacatactgaatcagaaactttggcactaggacccaacaatagctgtttttaccagcctttcagattattctgatgcatgctcaagtttaagaaagacaattctaggttgcaatgatacagaggccaagaaaacaaaacgcctgttctcttggagcaacaacagacaaatagatataaataaaatttcaggcaaaggaaagtgttatcagggaaaccagcataggataaggaggcagaacacagaggatgctcaggcagggtctttctgaggggtatgagctctgaagtcacatagagtctgaaaattggctccaccagtttctagccttttaaaagtctggtttcctcatcttctaagaaagagataataatattacaagtttactctgaagattaaataagataacacttataaaatccttgcaactgtttctgccactgagtaaggcttcaataaacgttagccctccatatatgatggggagtgccatagatgtatacctgggaatcgttgatgtagaaattaatagtaaatggatgaaaaggtggataaaccaagacacaaaaagagaagaggatggatgatgggctcttgttggtggggacagaagtggattgagagatggtggggaagtaaagaaatgaagatgtggagagggagcttttttctgaacccagctaaaggtggaaacttggaagaggaggccagtggattgggtgaagaaccaaccatttggtatacctgtgactgaggaggttctcaggatgcaggacttttagtgctaaaactaggaaagtcctgggcaagctgggccaagctggccacactggcagtggatatgaccatggagggtgaagtgagcaataaatactctgacctttctttcctggtggcctctcatctccttacagtaaccttataaggtgtctttacaggggcctgacccaaccagaagggcaagggagctgggataatacagtctagagaggtcagccttgccttgacacacaccagggtaaaggaaggacagagaattgacctggagaggcaaaaaataatggccagcacagtggcaaaactgggattagaattgtctgggataggccaggtgcggtgactcacacctgtaatcccagcactttgggaggctgagacgggcggatcacgaggtcaggagttcaagatcagcctggccaaaatggtgaaatcttgtctctactaaagttacaaaaaattatctgagcgtggtggcacatgcctataatcctagctactcaggaggctgaggcaggagaatcgcttgaacccgggaggcggaggttgcagtgagccgagatcacgccattgcacccagccatggtgacagggagagactctgtctcaacaaaaaaaaaaaaaaaaaaaaaagaactgtgtctgggataaacctgatttcagagcttcaattctttttccagccttgtttaaaggtagaatgccctctaggagtgatgagtgctttctacatcctcaaattaactctacagagaattataaagattatccaaccatattctttggtatctgagcagcccacaaaacttttttctttagagacaaggtctccctctatcgcctacgctgaagtgcagtggtgcgatcataactcactctaacctcaaactcctggactcaagccatcctcccacctcggcctcccaaagcgttgagattacaagcgtgagccatggagcccggccctctttaaaaaataaaagtgggccgggcacagtggctcacgcctgtgaggggtatgaggcctcccagcactttgggaggccgaggcgaggatcatttgagatcaggagttcgagaccagcctggccaacatggtgaaaccccgtctctactaaaaatacaaaaattagccaggggttggtggcgggtgcctgtaatcctagctactcaggaggctgaggcacgagaatcgcttgaacccgggaggcggaggttgcagtgagccgagatcgcgccactgcatttcatcctggctaacagagggagactccatctcaaaaaaaaaaaaagtgtgtgtgtatacacatacatgtgtatgtgtatatatgtgtatgtatatatgtgtgtacatatgtgtgtgtgtgtgtatatatatatatatatatatatatatatatatatatatatattcagtggtaagtgtcatgtacaagaggcacacaggatctagctgctccagaaatgaagtcagtggagaaaatccccacgggaaccttggaattcctctaaaaagttcaggtacaggacactcccaggtgcccaggaaccgtttcccagctcacttccccccgaaagactcacccctccaatcgcactcgatgctttggcaagtgtcaaaggtcaaagaccacggctcgcctggtaccgactgccccgcccccgtgcacctccagctcccccaggctccgctaccagcagctgcgacccgccaactcagcctgggtaataggagattgggcggccagaggcgctgcgtgattggtgggtcggaagggggcggggactcgctggaaagccccctctggattggtgcaaaccatctgggtgggacctccactctggctgggcgggaaagcaagaacagcactgctgggctggagacggcgggagccgctgctctccggctgagggaatcagagacagctccgtccctagtggagcgcaggggaggcagaagtcatgacaggcgaggtgggttctgaggtgagtttatgcacacgccccccacgggggcttagaaggccgggcaccgagaggttaggtggggccggggtagaccccgctgacccgaggcgcccgggcgggaggactgcggctcccggcgttcgccgcgccggctcccgcggcctcgagactcggccgggatgggttccgaccgggcatcccgtcccgccgccgggcttcccgcgcttcgggctccgtggccggagagctccaggtctctgcggcgcgcactgccggcagcccagcccctcttcagccggttcctgccgccagccctcccctttggcgcgtttcctgtcgcggaagctcctcccctcagggtgctctgaaagccgggaggctctagccgaacccggccgcagcggtgcggggggattctccgcagagagagggcgagcgagggtgttagggagttccacactgggcctgggaggggccctggaggtcatcgcgcgcaggccctttgcgttttccgaccgggccccgagtggggaagtcaccgctggggctcctggctggtggctggcagctccctggcgaaattgggcatagaaaacagatgtttccagagctgtgtcctttctgggccggattcgggcaaggcactcccgccttaggagcaaaatttaaaggggcgccaaaaccctcaatcaaactcatattttaatgcaatatttttaaaaaaccaaaattaatgcaaaaactttttatgatttgatattgaacaaaatatcagacgtttaaacaaagacgagatccgaccagtcatttgcacgaccttgcctcaatcacctcaccctaattccatccctgtttccaataaactttatttacaaaagcgggcatattatttacctcatgagctgtagattattgatttaattttttaaa

SEQ ID NO: 2667 - DNA, 6000 bp, Homo sapiens
cctaatctcaagtaatcagggacacaaacactgcggaaggccgcagggtcctctgcctaggaaaaccagagacctttgttcacttgtttatctgctgaccttccctccactattgtcccatgaccctgccaaatccccctctgtgagaaacacccaagaattatcaataaaaaaaaaaaaaaaaaaaaaaagaaagtcagacaattaacaacctaattccatctgcagtcttaattcttctttgctaggtaacctatcatcttccagattctggagattgaggcatgactttttttttttttgagacaggatctctctctgttgcccaggctggagtgcagtggtgtgatcttggctcactgcaggctcaacctccggggctcaagagatcctcctactgtacctcccaagcagctgggactacaggaacagcccacaccaccacacttggataacttttgttcattttttgtagagatgaggtctcactatgttgcccagggtggtcttgaattcctggactcatgcaattctcctgcctggcctcctaaagtgctgggattacaggtgtgagccacccagcctatgaatgtcttttagatgctgttattctgtctaccacattcacatatttaccatttttggtgatcctcattccttcctatagattgttgggtgtcatttatttttatttttatgtatttatttatttttttagatggagtctcactctgtcacccatgctggagtgcaatggggtggtctctgctcactgcaatctccacctcctgggttcaagtgattctaccacctcagcctcccaagtagctgggactacaggtgcgcgccaccatgcccggctaatttttgtatttttagtagagacggggtttcactatgttggccaggctggtcttgaactcctgaccttgtgatccacccgccttggcctctcaaagtgctgggattacgggtgtgatccaccacgcccggcctatttttattttttggcacagggtctcactctgtcacctaggctggagtacagtggtacaatcacagctcactgcagcttcaacctcctgggctcattgatcctccttacctcagcctcctgaatagctgggactacaggcacacaccaccacgcccagctaatttttttttttttttaagacaggatcttgctctgtcacccaggttggagtacaagagcatgatctcagctcactgcaacctccacttcctggggtcaagcaatcctcccacctcagcctccctagtaggtgggactacaggcacacccaccatgcctggctattttttgtattttttgtagagacggggtttcaccatgttacccaggctgctcctgggttcaagcgatctgcccacctctgcctcccaaagtgctggaatcatagggatgagccaccaagcctagtctgttattttctttagtgtgaagaattttccttagtatttcaagtttggtggggatgaatctactgtttttgttgattttaaattgtattttgttgtcattttttttttttttaattaaaggctgggcacagtggctgacccctataatcccagcactttgggaggctaaggtgggaggattgcttaagcccaggagtttgagaccaccctgggtaacatactgagaccttgtctctacaaacaatcaaaaaattaactgggcatggtggtgcatgctcgtggtcccagctacttgggaagctgaggtgggaggcttgcttgagcccaggaggtcaaggctacagtgagctgtgatggcaccactgcactccagcctggatgacagagcaagatcctgtttgaaaaaaaaaaaaaaaaaaagacctactgtaatgccacatcatctcaatgtaacccatcatctcaatatatagaatgttttcatcccaggttgggcatggtggctaattcctataatcccagcacttcgggaggctgaggcagaaagattagctcaggagtttgaaaccatcctgggcaacatagtgagacccccaactctacaaataattcacaaaattagtcgggaatggtggcacatgcctatggttccagctacttgagaggctgaggtgggagactgagcctgggaggtcaaggctgcagtgagctgtgatagtgccactgaactccaggctggacaacacagtgagactctgtctcaaaaattttttcttatgccctttgcagaatttttctctgaagaacagcttttgttctggcaggcagctaatttggctagatttttaattccaaatcaatcatctccagcagagggcagaagccaaaatcttcacccagttctaccttctagctgctgcttttttttttttttctttttttgctgggtttcttgttacccctacacatgtatacgtaagcagtcaaccaaggaattgggaggacttgtcttacccaaatgttggggctcaccccctctgcaatactctcctttttaggatttctcctgtaactttttggttgctctgcctgcctcaaactctgttccctgacctgcctcaaactctgtttcctgacacctcaaggtagtaaagctgtgtcttcccaccagagttcccacacaggtagtaactctgtgtcacccaagagttccttgcagattggggaatgccctaagtaagaggccacagcttttctaatctcaccagttgcagttgttctttaagggtaggtagacttccttctggagcctgcttaaatttggccactgtccagtgccctggaataattggtttttcaaaatatttttttccctagagtttgtaattgttatttgtgggagggttaatctgactacatttatttgctattactggaaactagaaccagaaatatttatttattatttttgaaatggagtctcgctctgtcgttccggctggagtgcagtggtgcgatctcggctcactgcaacctcccctcctgagttcaagcgactctcctgcctcagcctcatgagtagctgggattacaggcgcctgccaccacgcccgtctaatttttgtgcttttagtagagacggggtttcaccatgttggccaggctgttctcgaactcctgacctaaagtgatccgctggccacagcctcccaaccgattaatacttaattaaaacgatatttctctccagaattctttttttttttttttgggacggagtctcgctctatcgcccaggctggagtgcagtggcacgatcttagctcactgcaagctccgcctcccgggttcacgccattctcctgcctcagcctcccgagtagctgggactacaggcgcccgccaacgctcccggctaattttttgtatttttagtagagacggggtttcacgtgttagccaggatggtctcgatctcctgaccttgtgatccgcccgtctcggcctcccaaagtgctgggattacaggcgtaagccaccgcgcccggcccagaattctttgttttgagatagggtcttgctctgtcgtccaggttggagtgcagtggcgcgatcttggctcactgcagcttgaccttccaggctcaagcgatgcttccaagctcagcgtctgcaatagctaggactacagctgtgcaccaccatgcctggctaatttttttgtagatatggggtttctccgtgttgcccaggctgatctggaagtcctgggctcaagcaatcctcctgcctcggcctcccaaagtgctggaattacaggtgtgagccaccatgcctgacctcagaattcttgataaccctgtgaggatggcttaagctatactcaggtgtgtgaccttgtacaagttactagcctatctaggcctgtttcctcacttacaaaatggggacaaaaataaacctacctcatagtcatgagcattacatgaactgttatatcttagaagctcagaaatgcctggtggtaaatgctataaatacacccttatcattattagtgagtacctaggttgtgcatgccactgttgggtgctttacgcacattaatttacttgtcagaatagccatgggggggaggtactattataatgccactttagatatgaagaaactgacgttttgagagattggatgattaaatctctgactccaaacacaacgcttcctccaacgcggtttggccttggagaggaaggcagcttctttcaagacacccctgagcgagaaagtcgcgtcatccgggggctcccattgcccgagcccgccacgtggcagtctgggccgaatgcctctccccactttctgggtgggcgaggcctgactccaaccccggccctccgctctagacctggtaccactgtagattcaatccaaactcccagaaatgtgccgcctttcataatccccagctgtccactacaggtggtaactcccctgctgctcaatgtggcgtaaatcttcccttccatagctgcgggaccacagctcaccgacctgggacaaacacccgagacgggccgaattccagctcgcaggtagtaattccgcccctcccctccccgctccgtcgcgtccagtccagctcttctagccctgccccgctcctctagcccaaccgctccccactgttggccccgcccctccccgccccgtccagctcttctcgccccgccccgctcttctcgcccaactgctcctcgctgttggccccgcccctcccccgccacccccgcccccgccccgcccctctcttctcgcccaaccgcccacctctgttggccccgccctcccatctaagtcacgcctcctagtaggtcaatttagcttctccagctccagagcccagactcctcattgggcgcagcactattcccgcctcttccttgggtcgcgagcgccgaactcatcgaacgcagccaatgggtgatacgacggcagcgcggcgggaggttcgattgacccggtcttggcgggtcggtgagtcttggcggctgttaacgcgcgctttgggaacaggaaggttgagagagaggtgctggggtctgcgtctatctctgtcgctcttttcagcccctcctggtattcccctcctaacctgggttttttacacgcccgcgtggcttcctgctcgacctccctgagtctgatcctggtttccacctccagccctgggaaatttcctttctccagactcgccctccccacccgggcctcggactttcaccccagcttctctctcctggccagtgattacccacccccaatcccaccccgccccgccgcgcaactacctcctcccttcacccggactgggaccatcatccccactccactccgcccagtctgggactccacctgcctcctccccaatcccacactaatctctgcttggtctcttcctctttggcctaatctctcgtctcggcttattggggacggccactctcacagtttggttccaaacaccagttcctggatggattcccgccatccatgccccctctttaattagccggtcctctcaataatgtagcagccccctctacagattagaccctggtcctacactcttagccgctgcctgcttttgacctttggctcatgggtacttgacgttttaaactcctaggcccaggatggtaagtgtgggcctaggggagactgggaatagccctgggtcagggtctagtaggcctaggctgcaggatccttgcaggcactgtttctgttctccctttacagaggaggagcttggctcccagccagctggccaagagaaaacctgaaggcaggtcctgtgatgatgaagactggcaacctggcctagtggtgagcactcaaggggacagggaaggtgggtagagctgtttggacagaaaagaagccaggatttggtttctagggttacatagccaattccagatgcctcttttgtatgttcaataaacttttagtgagtacttactatgtgccaggcattgaacaagattagta

SEQ ID NO: 2668 - DNA, 6000 bp, Homo sapiens
tgcctacttctgcattatgtatacatgataaagacatgaatattaattttagctaaggacacttaaaaatattctgttacttataaacaaacctattcctatcggatgcagagtttggttcctataaatttgtgctacacataaccttaaaagaaatgtggtttttagtggaagcatttgggcagtgggtggtaaagactcagatactgcaagatggaaaactggtgacctttgttctccagttgccagacatttggtaaacctgttgccagctttagaagacagatcacacgccaatcaaaattgtggcacgaagggaaatggctggaaatatctataaacttggtatttgctggctttttcttgacactttaaaccaagttctatgagatatgaattcaggccagaagtaaccaatttgcatgtagaaatggaaaagaatacagttttgctaaaggagaaattctgctgtaatccaagtggattaaaagtctcataatttgggcgggacgtggtggttcatgcctgtaatctcagcactttgggaggccgaggcggatcacgaggtcaggagttcgagactagcctggccaacactgtgaaaccccgtctctattaaaaatacaaaaattagctgggcgtcgtggcaggcaccagtaatcccagctacttgggaggctgaggcaggagaattgcttgaacccaggaggtggaggttgcagtgagccaagatcatgccattgcactccagcctgggggacagagcaagactccatctcaaaaaaataaaaataaaagtttcataatttgaagatttaaagggcggaaaaaaaccacacttcttctatacctttagactgaagtacagttggccctccacattcatgggttccatatacatggattcaaccaaccacagatcaaaaaatcttatgaaaaaggtacacaaagttccaaaaagcaaaacttgaatttgccacgtgccaagtgttaaatactatgttaaatccatgtgaatgatgtgtaggcattgtattaggtaattaagtaatctagagatgatttaaagtataggtgggatgtgcataagttgtatgcaaatactatgccattttatatatgggacttgagcatcctcggattttgatatccataacggtcctggaaccaatcccccatggataccaagggatgactgtacacagaaacagtgcctgtgaaactttggaaggaaatatgcctggcatttacccacacaagactgacaaatataggattgagaatgctgtgaacctattaaatcccattgtttccaaagggattagctgtcattaagagtggggtaactggggagcacacagaaactgggaaaaaagtttcggggcttaaaaactcatctaggcaagaactgtggctagaatttctcccacaaacaactgactgaaagcaaaagaatgagaagcatattaaatttttacattaatcatattgccagagacacaccaaacttctgctattgctgttgacaagcacagttgtggaggtgtttgatttttctgaagcagcattagcagaaacctcagtgtctagccacttgtcctgtgggccttgacagacgggacgtaggatatgcatggcactggtgcagatcatagtgggtatagtgtggttctagggtcagcggtgcacgcagctttctgatggtggtttcctaggcatggcagcagcagtgtgattcagagacgtcatttcctgatcatagaagagtcattgcttccttggtggcctggttctgggaagactttgggactcattcctgaaaaactaatctagagcctatttaatcaaccctcccaagtattcaatatctttgtgtttatactagctaaaatggattctattttccgcaaatgaatcttaactgataccacacattgtgtacaggaagaatagtggctgcagacaataggatctcaggaatatgggaaagtagaattgcttatctgttctcgtagagtttgaaagtagcaataattatgctagtactagaaaatgagacactgccactctgtggtgcacaatggctaagactgacctatatacattttctaatcttgtccttgtgtatttcgtgatctgctggttcaacatctgtttgtacgttaaacacctcaatcttaatattctaagaacgatgatccttcccattgagcctactaagacccccattttagcaaggaccaacactgagttgctcaggttaaaaaaaaaatcgttactctttgtttttttttcttttttcgggtgggagggtggagggcagggcctcacactgttgcccaggctggagtgcagtggtgcatctcggctcactgcagccaggggatcctcctccctcatcctcccgagtggctgggactacaggcacgtgccaccacgcacggccaatttttggagttttttgtagcgatgggtcttgccatgttgcccaggctgatcttgaactcctgggttcaagcggtccaccggccctggctacccgacctgttttttcttacattatcatacagccaatccatcagtagagctcgttggctgtgctcaaaatatatcttgaaccctaccagttttcaacatcccaccatcttattccagactaccataatttattccttggcttattgaaccagcatcttggctgacctttccgctggtacttttctttttttgagacagagttttgctctggttgcccaggctggagtgcagtgaggcgatctcggctcaccgcaacctccgcctcctgggttcaagcgattctcctgcctcagcctccggagtagctgggattacaggcctgcgccaccacgcccggctaattttgtatttttagtagggacggggtttctccatgttggtcaggctggtctcgaattcccgacctcaagagatcagcccgccttggcctcccaacgtgctgggattacaagcgtgagccaccacgcccgaccctgcttgtactcttgaaggtcaacgtgtaatcccgccactccccagctcagaatcatctaacgactcccatctccttactcggcttacccagggtcctgcctttctcactcatctcatctcctcccatcttatttcccaaattgactgcgctctaagcgccctggcctccttgcttcttttcaaaacaccaaccacattaagcttcaggacgtttgtaacttgctgttctctctgcccgcaccattcttccctcagattcctccaagctttttcattcagctctgctcaaatgtcaactcaaagaggtctttccaggctatcgtatctatcacttatcttagcgtcacttgtatctccctctccagaatgtaatgctcctttatgacagggaatgcctttacatccctcgcgccttgaaaaatgcctggcacatagtaggcaccttaaaaatacttgattaaatggatttgggctgaacgtatcctgcttaactgcagcacttgagctgaggtcacctcaccaaagcaggcacacaaacacaaaaggaagcacacaaccagatgaggcctgcctgccgctcctgaaccctttgggagggctcgcgcgggaaccctgggaagctcccgcggccggagctgggcctgaaactgttctttcgtttcctcctgcggccgagaaagggaagaggtaaacaggcgaaaatgaggcgagcaggggctgaggaccgggcctcagctctacagcattcgcctgagcatgtattgttatccgtggcagcgccttgtctcattggatggccctaggcctagtgtggccgcgactccgaactgaaagcccaagcgcggcggcgtccagccgggcagccattttccgaagctgctctcttggtaaccccgcccgggcgcgtacgcacgaacggaggcggggcttaccgcgagggcctcgctccggaagccgcaccctccgcggcgtcccaccgtcgaggattaacaaaacgccaaacaagattttaacagtcggcagcgaaagcgcgcactcgagcgccaatgagagcggaaggaggggcaccgcgcctgaggaacactccgtatgtcgaacaatgattggctggagcccacctttcttcttttttgctattagatgggcttgctgctcccgcccatctaattggctttggtctaggtacttctgattggcttcccccgggcggtgggaggcgcggttttggggattgttcatcatggattggtgaatttgggctccttctcgaggtggtggcccatcccgtctgctctctgtcccgtctcccgacccgtacgcttttccctcaactcgcgcgcacgaatggttaaaaaaagggtgtgaggctcgagcccgccagccaggccgctagcacctcgcgcgcgccctcagcgaggacccgcacgagctgcccggctctgtgcctgcgttgtttgaaactgtggaacccgttaggcttttggggaactacagtcccagctggctccggagcccgtgcgtgccaggggcgagtggccgtcgcgagacggctcctgcctttcgtgtctctgcagcgtggagactggaaccggcaatttcaaaggacgccacgttcaatcgcagcgctggcgcgggcggaggctaaaacacgggggtcctgagactgaggaaaacgcgccaagttcccctcggtggcggagtgctaaagaccctagcggttcaggcgttcggcgagcggggccgctgcttgttgcgctcctggctctcccggggcgggcgcagatgggcgccgctcccgggatgtagttggtgttggtgcaagacgggagcgagcggcggtcggggttcccgctcttgggagcggatggtcactcccccgcggggagggcgagccgaccagattttcctggggccggggacccggcgggctcggggcagggactcacctgtcgcacccacactcattcgggttggacttgccggcgtcaccgccgcggacttcgctttgggccatgaccaggtaaggagggcctgggaggaggggccggctcccgggcgcgggggcaagttcggccggcgcgggagaggagctgccggggagaccccgggaccgtgttggcctcgcaccctggtcgacctgccagggggagccgtgtgtgcctcgggcgtggcgcctgtcttgccgccgccgggacgcgagaaggcaggtgcgggctgggcgtaaataggccaactccgcggcgagggcgcccggcgcgggggtgtgggccgaggacgccgccgccagcctcccccgaccgggcagcctggtcgctgctcgtccttccagctttctttccgttcccgagagcggtgaaggatggggagaaagaaacgtttccacgcaggttgccctgtgtcggtaattgcgaaattttaccgcgcattttctttcacttacactttttcaagaagtgtttagaacgccgcgtgtcttaaaccttggcgaagatgtccttgtagatttttgttgaaaaatcggaatcgagtcgtgtcatcttataaagaatttaaaactattgggactgagtgttcacgctgtcaacagataatggtcgattcgtcgtgctttctgcgaaagttgatttagttacaggagaaatattttggatgtaacagccccccagttacaaggaaagccaggagcaagaaatagcaaggaagatactgcacctggcaaaatgttacattctcggtgtgagctttgctttgaggggctaggaggtttggttttttgattaagctgacgatccgctatttcacctgcctaatcattcttcccttctgtgtagtctggttactctgtcggtttgagatccagtttctgtcatccattaaattggctctcgagaaaaaccttttatcagaatcattaatgcttggcgatccctgagaacttagcgcaggttggtttatcattcagaagacagcgcttcctcagaagcatta

SEQ ID NO: 2669 - DNA, 6000 bp, Homo sapiens
ggaaaggcaaaagcagagggagaccagttgttacattttcctaggtgggagatgatgctggtggtagtggtgatgagaaatggttgaattattttacattttgaaatggagcctataggatttactgatggactggatgtggttgtgagaaaaaggaatcaagaatgacaccaaggtgtggggggctgaacagtgggaagaatggagttgccattgacctattgtaggcacagatttggccagacaatcaggagagcaacaattgtcattttaagtttaagatgcttactatatattgatgcagatatgatgaataagcgctgaggttcagaagagatgactgaccaggtttgaaatatatttgggagtcatcagcatataaataattaaggccatgggaccatatgaggtcaccaagagagtgagtacagagaagaggtataagcatgagctgttaagaagttaggaagaagaaaactttgcaatgaagttgatgggtgaatagaattgtttcttttatttcagagagagaaaactcacaaattggctgggcgcagtggctcacacctgtaatcccagcactttgcgaggccaaggtgggaggactgcttaagcccaggcgtttgagaccagcctgggcaacaaagcaagaccccgtttctttggaaaattttaaaattaggctggtgtgatggcatgtgcctatagtcccaggtactcaggaggctgaggtaggaagatcgcttgagcctgggagttcaagactgcagtgagctatgacagtgccactgcactctagtctggatgacagaggatgaccctgtctcaaaaaagaaaaaaaaaaaagcaaactcacaaatctgttcaaggtgcaaaaacaacctaccagtggccaatcaccaactcagaccacctacttccctcaccagtgattaggctacaaagcagagactctcagaacattcctcccatgatagaagccttctgatacgcaccgacagagaggtgaggggttagggggtgttgatcttgaagaatgttctagttagtctcttcatctgacttctccactggctgggccttgcttggctggtgaaatgtgagcagctgatggcagcacaaggtggccagcccaaagctcaaattaacactatgattactaccatgattcttaatagctgaagagaatttccacaggataaggatttattgaacacacaaaaaagatggcattaagaatattatactagttttttgttgttgtttttgtttttgttttgagacggagtttcaatcttgtcacccaggctggagtgcaatggcaccatctcggctcactgcaacctccacctccagattcaagtgattctcctgcctcagcctcccgagtagctaagattacaggtgcctgccaccgcgcctggctaatttttgtatttttagtagagctggggtttcaccatgttagccaggctggtctcaaactccttagccaggctggtctcaagctcctgacctcaggtgatccacccgccttggcctcccaaagtgctgggattacaggtgtgagccaccacacctggccccaactaatttttgtatttttagtagaggtggggttttaccatgttggccaggctggttttgaactcctgacctcaggtgatccgacctcctcagcctctcaaagtgctgggattacaggcgtgagctactgcacctgaccaggaaccttatgatttttaacaagaaaaaataatacaatacaattctaggtaggtggaaaatacatccatcatagttgaactgatcttctcctttgatgtggacaatgatctaatactgaaataacaagcattatatttctttcagatgttaaagcattgattgttttttgaaagaaagaaagaataattctgcattatggaaccagtagtaggaatgtatgtaggataagcatgactaaaatatcaaaaagatctttaatatgcaaagcaagtagcagtgctaaaataattgaacaattcttgagtatatatttccatatgatttctaaatataatcatttggtatctttacaaacattactacaagagcattctactcctgtgtacttggcagttgtcagagttacctgtagtggtttttaaaatgacatcacatattggagttatcacactgattataaagaaatatatatatatatataatattgatataggaaaatttctctgatttaccattgactatcaatgtcctccaggactaataaacagttaatgataaatcaactatgtccattctaatgtgtaactacaatctaactgtgtagctaaatgcagtttttacttccagtcatgaggcccaactttgaagataatcactgagaaaacattctaggtatactcagcaatcaggcaaaatgatgtaacgtatctgagtcagaaagtatgacaaatgaatatttttgcatactggaagcccaagcttatctcagagaaaatccccaaaatacttgggcaaataactttctgatgaagtcaaatatagcatgcagtataatttttgagtggaggactaagcctataataagaagtaaccatttgatatcacatttttactggatatagtcgacttgggtggggcactttaggactgtggttcatttgaattggtgtaaacaatacaccggttctactgtcctacagcctccattcagatgactgaagtcatgggactttcagcatagctagctgatgacagtgcatactattttgtcccaaaatccagttcaagcatggacataccaataagagcctaagctctttaaaggcaaaggaccaggaattgtacagttcttggtatagaagaagacaggcaaaagtgtttttgaactaacgttaaatgtgcaatatgttagaattcatgcaatgcacaggactgcaggattctgatatcttatttaactctcaaattctattcaactcaataaaccttgactgtgcttctactaaatgcaggtattgtactaggagctgaggacaccaaactgatgaagtccttgctgtcaagaaactcacatgattccctaattctttgtcagcttgctgtgatcacattttcttcccaagaacctctaagaaatgcctagtggatagaaccttggagttccacggaacatattaacaatcgccaaatgatgactcaggctagattgtgtaattcaggttttgtctgcaaaactgaaaatgcttcggtaacctacctaaatttcaatgttgaggaattctttaagaaagacatcaaatgttaagatttaaggcatagatatgagatacatagtcatgcttaggtgaattatgcactgaccatgaccatttctttactcaaatgttgtccatggctgacaacacagtgaaaaaatgagtgcaaaatgacaactcaaataaatgaaccagaaaacctatcacttttcttttccaccaaattaagatcaagagagctggagaatattttgtctagagtgataaaaacataagggtgcaaaacttccaggtacctttgcagaaattacttctgtgacctttggctgtacagcaaccttaataatgcaagcactgttttgaatgcaagcatgtgggagccattttcaccacttttgatgacttcagtaggtttaagaaatgtttttgcttttattgcataaaccataaaacaaaggaagggacttttgaactactcagtgagagtctatatattaaagtttgtttttcaaaaatgtgtaactaccatttgcagttttaaaggtctgctttccacctacaagttgccattatctcaaaggtgaaattttagcatatgactaaaaacttcctatagttacagcttcatgattcagcatctaacatcaataattcacagtgagatcataggaggctctctgtggaaggtaacgacatacatacgttaggaaaggaagcttagggcatatcgagagcattttgaatttagacttgtgggctgtgtgggtgtcagatggttgtctctcagctggtgggcgtccagaaggatccttgtttgggcaaggctctttgagaaaggagaatctgggttgccagggattcccacatgtggtcaccagctccccacgcagaccagctcacgatttcccagttacaccgggcaggtgggaaaccgttctgctttctgtggaaaagattctaacttggttccctgccatccctgaatacaaacgggttggtttttcttttttcagcttccaacccttgcagctttccaaaaataaatcaaaccagccatcagggcaccgaaataatactactgctaataagcagcttcgcctagacttagataaacaacacttctgaggtaaactttgccccggaggtctggagacacttttttaatgtaacctgcttactaataattactagacttcagtgcattaaccctggaaatagattttaatagccaccccttaaaacaaaagacatgaaaagataataagaaaaaagtgccgcaactattatagaaaaacacttggcagcctgcttcagcccaagctgaggccacctctagcctctgctaaagccccccactcccaatggtccccgccaaccggataagagtgcgcgcgggacccgccttcccctctcggcaccgcccccgcccccgccccctcggctcgcctcccgcgtggctcctcccttttccgctcctctcaacctgactccaggagctggggtcaaattgctggagcaggctgatttgcatagcccaatggccaagctgcatgcaaatgaggcggaaggtggttggctgagggttggcaggataaccccggagagcggggccctttgtcctccagtggctggtaggcagtggctgggaggcagcggcccaattagtgtcgtgcggcccgtggcgaggcgaggtccggggagcgagcgagcaagcaaggcgggaggggtggccggagctgcggcggctggcacaggaggaggagcccgggcgggcgaggggcggccggagagcgccagggcctgagctgccggagcggcgcctgtgagtgagtgcagaaagcaggcgcccgcgcgctagccgtggcaggagcagcccgcacgccgcgctctctccctgggcgacctgcagtttgcaatatgactttggaggaattctcggctggagagcagaagaccgaaaggtgagtcggcctgcggactcttccggcccgaacttctcttacctaccccgcgctccccggtgcagccgggctgtggaaggcttgcaggggaggaagctaaaaagtttgcacagggcaactcccgcccttgctccctcgggactctccgtggagctcccacggactgaaagagcgtgccccccaacccgaacgagccccgccggggcctttgcaaagggcagcagtggccgtcgctgcccgtgcggctcccgtggctggcagcctgtggcaggggcactctcgggacttctcacgggacgcccggtccttgggcgtgcaggggtcatggggggtgacggggccgcgggagcgccgggttttcgtagagcccaggtgcgcggtggtgcttgcattcgagagggaggggcgtggtaccggacgaggggggcggcgatggccccgagggcaccggggctgacgggacccctcgcccttgcccgcgtgtaggatggataaggtgggggatgccctggaggaagtgctcagcaaagccctgagtcagcgcacgatcactgtcggggtgtacgaagcggccaagctgctcaacgtgtaagtggggcccttgcgcgtcccccatggcaccccttcccgccccagcccgggaggtcgccttggctgggcgcccctcgcccggccgcgccacttcctgtcgcttttctgcctgtctcggaagggagggggcgagcgggccgggcggcgacccccagggacccgggcagtggttgagggcgcccgcg

SEQ ID NO: 2670 - DNA, 6000 bp, Homo sapiens
ggaagttctggccagggcaatcaggcaggagaaggacataaagggtattcaattaggaaaagaggaagtcaaattgtccctgtttgcagatgacatgattgtatatttagaaaaccccatcgtctcagcccaaaatctccttaagctgataagcaacttcagcaaagtctcaggatacaaaatcaatgtgcaaaaatcacaagcattcctaaacaccaataacagacaaacagagagccaacttatgagtgaactcccattcacaattgcttcaaagagaataaaatacctagaatccaacttacaagggatgtgaaggacctcttcaaggagaaccacaaaccactgctcaatgaaataaaagaggatacaaacaaatggaagaacattccatgctcatgggtaggaagaatcaatatcatgaaaatggccatactgcccaaggtaatttatagattcaatgccatccccatcaagctactaatgactttcttcacagaactggaaaaaactactttaaagttcatatggaaccaaaaaagagcccacattgccaagtcaatcttgagccaaaagaacaaagctgcaggcatcatgctacctgacttcaaactatactacaaggctacggtaaccaaaacagcatggtactggtaccaaaacagaaatatagaccaatggaacagaacagagccctcagaaataatgccacatatctacaactatctgatctttgacaaacctgacaaaaacaagcaatggggaaaggattccctatttaataaatggtgctaggaaaactggctagatatatgtagaaagctgaaagtggatcccttccttacaccttatacaaaaatgaattcaagatggattaaagacttaaatgttagacctaaaaccataaaaaccctagaagaaaacctaggtaatactattcaggacataggcatgggcaaggacttcatgtctaaaacaccaaaagcaatggcagcaaaagccaaaattgacaaatgggatctaattaaactcaagagcttctgcacagcaaaagaaactaccatcacagtgaacaggcaacctacagaatgggacaaaatttttgcaacctactcgacaaaatgtttgcaacctactcatctgacaaagggctaatatccagaatctacaatgaactcaaacaaatttacaagaaaaaaacaaccccatcaaaaagtgggcaaaggatatgaacagacacttctcaaaagaagacatttatgcagccaaaaaacacatgaaaaaatgctcatcatcactggccatcagagaaatgcaaatcaaaaccataacgagataccatctcacaccagttagaatggcaatcattaaaaagtcaggaaacaacaggtgctggagaggatgtggagaaataggaacacttttactgttggtgggactgtaaactagttcaaccattgtggaagtcagtgtggcaattcctcagggatctagaactagaaataccatttgacccaggcatcctattactaggtatatacacaaaggattataaatcatgatggtataaagacacatgcacacgtatgtttattgcggcactattcacaatagcaaagacttggaaccaacccaaatgtccaacaatgatagactggattaagaaaatgtggcacatatacaccatggaatactatgcagccataagaaaggatgagttcatgtcctttgtagggacatggatgaagctggaaaccatcattctgagcaaactatcgcaaggacaaaaaaccaaacaccccatgttctcactcataggtgggaattgaacaatgagaacacagggacacacgaaggggaacatcacacaccggggacggttgtggggtcgggggaagggggatggatagcattaggtgatatacctaatgctaaatgacgagttaatgggtgcagcacaccaacatggcacatgtatacatatgtaacaaacctgcacgttgtgcacatgtaccgtaaaacttaaataataataaaaaaaatcaaaataaaatagaagttgaagaaaaggaagaaaaacaaagtcaggaaacaacagaagctggataagatgtggagaaataggaacacttttacattgttggtgggagtgtaaagtagttcaaccactgtggaagacagtgttgtgattcctcaaggatctagaactagaaatagcatttgacccagtgatcccattacggggtatatacccaaagattataaacacacatgcacacgtatgtttattgggcactattcacaatagcaaagacttggatccaactcaaatgtcatcaacgatagagtggattaagaaaatgtggcacatatacaccatggaatactatgcaaccataaaaaaggatgagttcatgtcctttgtggggtcatggatgaagctggaaaccattattctgagcaaagtatcacaaggatagaaaaccaaacaccgcatattctcactcataggtgggaattgaagaatgagaatacctggacacagggcagggaacatcacacacaggggcctgtcatggtgttgggggaggggggaaggatagcattaggagaaatacctaatttaaatgatgagttaatgggtgcagcaatccaacctggcacatgtatatccatgtaacaaacctacacgttgtacacatgtaccctagaacttacagtataatttttttaaaaaaagtaacttccaatatttttactattagcactctccgaagaagtgtttgtggtggcggtggtggtggtggggagggtggcctgtgtgtgtggcgaggagagggggcgggtacagggctggaccttgagatagataaggcaaacaggaaggaaatgtgaacatttcattaatattcatttaaaaaatattcattgaacacttactacgtgtaagcaggcactctactaattaacagccatttcagattttcagagtgcaaagggcctcaagaacaaatgatttatttttttgagacatggtctcgttctgtctcacaccctgcagtgcagtggcattatcaccgctcactgtagcctccaccccctgccccacagctcaagtaattctctcacctcagcttccccagtagctgaaaccacaggcttgggcaaccacgtctggctcatatttttattatttgtagagacgggggtcttgcaacattgcccaggctggtctggatctcctggaaccgcctttgcaaaattataactgaggaaattatggcagtgaaagaaatcagacctaacggattccatcttgcttctaacttttgtttttgagactagtctcgctctgtcgcccagggtggagtgcagtggcgtgatctctgctcactgcaagctccgcctcccgggtttaagccattctcctgcctcaacctcaggagtagatgggactacaggcgcccacccccacgcccggctaattttttgtatttgtagtagagacggggttttagccaggatggtctcgatcccctgacctcgtgatccgcccgccttggcctcccaaagtgctgggattacaggcgtgagccaccggccgcttctaacttttaagctgtccttcttcattcctgagcctaggctgaaccaatttagggaggaattcagtttatggtttgactctgaaacaaaattgataatatccctttcccaaaaagaccgcttttttgcctggggaccagtctgcctttgcagaaccaacagattagctacaagattagaaattacagtttagaggtcatgcagcctctggctccaagtttctgaacctccccaaattgctcctggggataacatcactattgtaaaacctaagataagttcttgagatattttgcagaccctgctctccatggatcagttgaaaccacccagattggtaatttggctcaaccagttctgccatcctacccaggaacagaaaacagcaagaaaaactcacgtctacccactatgagtccatctccaacctgacccatcagcactccctacttcccaagcccctaatcgccgaattatctttaaaaactctgaatactgcttggggagactccattgcaagtcccctgtcttgataaatgggctatcggtcagcagcaggcaaagtgaaccacaatattgggtggttacactcctaggatcaagcaatcctgctgtccggcttcccaaagtgctgggattacaggcgtaagccaccgcgtccagctagaacaaatgatttcttaaaagcaactcagatatttaaatattatttaaaactgtttctagacaaatcggagtgactatgggacaagcatatggtcgcaggactttggacgcaggcagtgaggacacctatgagcgatcagtggggtcctacggcagccgtggaactgctctgccttgcaggcgaaagtgtggtcagctatatcggagcgcgatgggggcctgagaggcgcatctgcgcaggcgcccggctcctaagtctacccaggaactgaccctgctctctcctttccctgttagacatggtaagtgtgagtttagcgctgctgtccggatgggttggtagcagacagggtggagtagggttaagcacactggtcaccttaggattggtttcctggtgctggagaatggttaggacacaggccttggaaggttttttgagtgtgaaatattactcagcgttttctgcagacctcgcgggcaatgccgcttctaattttatccaggccttcttctgtagggagggcctgttaagagttgagcagcccgatttctgaacccctctaaaaagctgtggctgattggtggcttttttttttcttggagagggggtgtcaaagatttctttaaaatcgttagtgatgtggtctcgctttaagatttttaatgggatcagaagaaaattcggtacttaatcacttccggtaatcttcatgacctgttatagtgactgcagtgtactctcaatgaggaagatatagatacgaaaagaactagagccgcatcacatggggacttctgcaaatacagagactcggattaaaggtggagaagatggagctaaaggaactgcttatttaatacatttgaacaacttttggggtacttagaaggtgctttgaaacctgcatttgattaagcaagaattcgcttgcaagttaagggttagatttttttattttttaaaaatatgctttctgccacatgtaaaccgtaagttgtcctgaaatgataagctttgatattctatggtgtttattttttacttatctttttgaatgaaaagtgaacaacaagaaatgctggtggtaattttttgggtcaatgatgagttggcatgtattctgaatctaaagttgattattactactttagctctagaattactctgagacctgaaaattacctgaatcgtgactaagacgaagcctgaatgatttaagttcttttttgttggatacaatttgttgttgttgttgttgttttggttttgtttttgagtcggtctccggtcgcccaggatggagtgcagtgacacaacctcagttcactgcagccttaatttccctggctcaagcgatcttctacctcagcctccctagttagttacaatttttaaatggaacgttttcctattacaagatgaaatcaagtgaaaattgagatgtatgttgaatctatgctgtggggcagaagaacgttgtagaggtaaacattgatgagattaccactttattttgaaagggcactccacagaaggatgttattatcaagtcagatgcaccggacactttgttattggagaaacatgcagattatatcgcatcctatggctcaaagaaagatgattatgtatgtataatttttttatgttggaaagtttattttaaagaagtgtgacagtcataagcagtgagacagtatttatgtcttaaaatggcatccaac

SEQ ID NO: 2671 - DNA, 6000 bp, Homo sapiens
gaaaactggctagatatatgtagaaagctgaaagtggatcccttccttacaccttatacaaaaatgaattcaagatggattaaagacttaaatgttagacctaaaaccataaaaaccctagaagaaaacctaggtaatactattcaggacataggcatgggcaaggacttcatgtctaaaacaccaaaagcaatggcagcaaaagccaaaattgacaaatgggatctaattaaactcaagagcttctgcacagcaaaagaaactaccatcacagtgaacaggcaacctacagaatgggacaaaatttttgcaacctactcgacaaaatgtttgcaacctactcatctgacaaagggctaatatccagaatctacaatgaactcaaacaaatttacaagaaaaaaacaaccccatcaaaaagtgggcaaaggatatgaacagacacttctcaaaagaagacatttatgcagccaaaaaacacatgaaaaaatgctcatcatcactggccatcagagaaatgcaaatcaaaaccataacgagataccatctcacaccagttagaatggcaatcattaaaaagtcaggaaacaacaggtgctggagaggatgtggagaaataggaacacttttactgttggtgggactgtaaactagttcaaccattgtggaagtcagtgtggcaattcctcagggatctagaactagaaataccatttgacccaggcatcctattactaggtatatacacaaaggattataaatcatgatggtataaagacacatgcacacgtatgtttattgcggcactattcacaatagcaaagacttggaaccaacccaaatgtccaacaatgatagactggattaagaaaatgtggcacatatacaccatggaatactatgcagccataagaaaggatgagttcatgtcctttgtagggacatggatgaagctggaaaccatcattctgagcaaactatcgcaaggacaaaaaaccaaacaccccatgttctcactcataggtgggaattgaacaatgagaacacagggacacacgaaggggaacatcacacaccggggacggttgtggggtcgggggaagggggatggatagcattaggtgatatacctaatgctaaatgacgagttaatgggtgcagcacaccaacatggcacatgtatacatatgtaacaaacctgcacgttgtgcacatgtaccgtaaaacttaaataataataaaaaaaatcaaaataaaatagaagttgaagaaaaggaagaaaaacaaagtcaggaaacaacagaagctggataagatgtggagaaataggaacacttttacattgttggtgggagtgtaaagtagttcaaccactgtggaagacagtgttgtgattcctcaaggatctagaactagaaatagcatttgacccagtgatcccattacggggtatatacccaaagattataaacacacatgcacacgtatgtttattgggcactattcacaatagcaaagacttggatccaactcaaatgtcatcaacgatagagtggattaagaaaatgtggcacatatacaccatggaatactatgcaaccataaaaaaggatgagttcatgtcctttgtggggtcatggatgaagctggaaaccattattctgagcaaagtatcacaaggatagaaaaccaaacaccgcatattctcactcataggtgggaattgaagaatgagaatacctggacacagggcagggaacatcacacacaggggcctgtcatggtgttgggggaggggggaaggatagcattaggagaaatacctaatttaaatgatgagttaatgggtgcagcaatccaacctggcacatgtatatccatgtaacaaacctacacgttgtacacatgtaccctagaacttacagtataatttttttaaaaaaagtaacttccaatatttttactattagcactctccgaagaagtgtttgtggtggcggtggtggtggtggggagggtggcctgtgtgtgtggcgaggagagggggcgggtacagggctggaccttgagatagataaggcaaacaggaaggaaatgtgaacatttcattaatattcatttaaaaaatattcattgaacacttactacgtgtaagcaggcactctactaattaacagccatttcagattttcagagtgcaaagggcctcaagaacaaatgatttatttttttgagacatggtctcgttctgtctcacaccctgcagtgcagtggcattatcaccgctcactgtagcctccaccccctgccccacagctcaagtaattctctcacctcagcttccccagtagctgaaaccacaggcttgggcaaccacgtctggctcatatttttattatttgtagagacgggggtcttgcaacattgcccaggctggtctggatctcctggaaccgcctttgcaaaattataactgaggaaattatggcagtgaaagaaatcagacctaacggattccatcttgcttctaacttttgtttttgagactagtctcgctctgtcgcccagggtggagtgcagtggcgtgatctctgctcactgcaagctccgcctcccgggtttaagccattctcctgcctcaacctcaggagtagatgggactacaggcgcccacccccacgcccggctaattttttgtatttgtagtagagacggggttttagccaggatggtctcgatcccctgacctcgtgatccgcccgccttggcctcccaaagtgctgggattacaggcgtgagccaccggccgcttctaacttttaagctgtccttcttcattcctgagcctaggctgaaccaatttagggaggaattcagtttatggtttgactctgaaacaaaattgataatatccctttcccaaaaagaccgcttttttgcctggggaccagtctgcctttgcagaaccaacagattagctacaagattagaaattacagtttagaggtcatgcagcctctggctccaagtttctgaacctccccaaattgctcctggggataacatcactattgtaaaacctaagataagttcttgagatattttgcagaccctgctctccatggatcagttgaaaccacccagattggtaatttggctcaaccagttctgccatcctacccaggaacagaaaacagcaagaaaaactcacgtctacccactatgagtccatctccaacctgacccatcagcactccctacttcccaagcccctaatcgccgaattatctttaaaaactctgaatactgcttggggagactccattgcaagtcccctgtcttgataaatgggctatcggtcagcagcaggcaaagtgaaccacaatattgggtggttacactcctaggatcaagcaatcctgctgtccggcttcccaaagtgctgggattacaggcgtaagccaccgcgtccagctagaacaaatgatttcttaaaagcaactcagatatttaaatattatttaaaactgtttctagacaaatcggagtgactatgggacaagcatatggtcgcaggactttggacgcaggcagtgaggacacctatgagcgatcagtggggtcctacggcagccgtggaactgctctgccttgcaggcgaaagtgtggtcagctatatcggagcgcgatgggggcctgagaggcgcatctgcgcaggcgcccggctcctaagtctacccaggaactgaccctgctctctcctttccctgttagacatggtaagtgtgagtttagcgctgctgtccggatgggttggtagcagacagggtggagtagggttaagcacactggtcaccttaggattggtttcctggtgctggagaatggttaggacacaggccttggaaggttttttgagtgtgaaatattactcagcgttttctgcagacctcgcgggcaatgccgcttctaattttatccaggccttcttctgtagggagggcctgttaagagttgagcagcccgatttctgaacccctctaaaaagctgtggctgattggtggcttttttttttcttggagagggggtgtcaaagatttctttaaaatcgttagtgatgtggtctcgctttaagatttttaatgggatcagaagaaaattcggtacttaatcacttccggtaatcttcatgacctgttatagtgactgcagtgtactctcaatgaggaagatatagatacgaaaagaactagagccgcatcacatggggacttctgcaaatacagagactcggattaaaggtggagaagatggagctaaaggaactgcttatttaatacatttgaacaacttttggggtacttagaaggtgctttgaaacctgcatttgattaagcaagaattcgcttgcaagttaagggttagatttttttattttttaaaaatatgctttctgccacatgtaaaccgtaagttgtcctgaaatgataagctttgatattctatggtgtttattttttacttatctttttgaatgaaaagtgaacaacaagaaatgctggtggtaattttttgggtcaatgatgagttggcatgtattctgaatctaaagttgattattactactttagctctagaattactctgagacctgaaaattacctgaatcgtgactaagacgaagcctgaatgatttaagttcttttttgttggatacaatttgttgttgttgttgttgttttggttttgtttttgagtcggtctccggtcgcccaggatggagtgcagtgacacaacctcagttcactgcagccttaatttccctggctcaagcgatcttctacctcagcctccctagttagttacaatttttaaatggaacgttttcctattacaagatgaaatcaagtgaaaattgagatgtatgttgaatctatgctgtggggcagaagaacgttgtagaggtaaacattgatgagattaccactttattttgaaagggcactccacagaaggatgttattatcaagtcagatgcaccggacactttgttattggagaaacatgcagattatatcgcatcctatggctcaaagaaagatgattatgtatgtataatttttttatgttggaaagtttattttaaagaagtgtgacagtcataagcagtgagacagtatttatgtcttaaaatggcatccaactccatgcagagaactgaggatgtgctgtgcctttgaacttcagttaagtgtgctttggacgtctgaggctgtgggcttattagaatctcagtttttacctatactgagagggcttgccagacaaagtagatgagggtttgaggtacaaaacgggtttctctttttgtagttaggggtaatactttcaaggtcaatgatgtgttggcatgtattatctgaatctattgctgatgtgtaataacactttagctctagaattactctgagaccttgaaaaagttttaccttaaatttttaaatttcgaggaaaactctgggacaatcttagcaaaaagtagtaaacaacttagttaagagtaaatgtttttccctgtagtatccaaactcagttgtcttagtctaccgatttgtgggatatatggtatgtattaattttttacttaagtgttaggttcccataaccttgaaaatactctattagcaatcatggagttaaggccatatggatggggctggactcgtttctgcctttatctgctatctatctttatgccctgaatttgggttagtagcaaactaagatgcaccacctgttaaaaaaacttctttttttccttttgagagctataacctcactttgttgcccagactggaggacagcggtgcgatctgggctcactgcagcctccatctcctgggtttaagtgagccacctgaatagctgggattacaggcacattccaccatgcccagctagtttttgtatttttcgtagagactgagttttgctatgtt

SEQ ID NO: 2672 - DNA, 6000 bp, Homo sapiens
caataatatttcagtgcagaattgcatactagtaatagtatgcttggattttttcagatatgtggtattaatacatgtttggaattttaagtgtcagatcaagaagaaaaacttaagatataaagtggtgttttaataatttgagttttatcacttttaatgtcaagaaattattatacacataaactttatgtctgtaattttagatctattgttgcacaggatttctggcaattacaagtcagttgcatcaagtaaattctgatttacttggctggtggctttgtgaacgacaattaccctcaggcgggctcaatggaaggccggagaaggtattgtttgataagccatattctgctagctttagaaccttgagtgaatgctgctgctttgtcttgcctgtttctatattgtaaattggccatgagcttatttattacctttccctgttgtgaattttcagtaatatatcctactaaaagactccccttgacaaagtagacccccatgagttgaaatactcattgatcctaatgtccatttccagacagtcttgtacaggaatctccatgtttaaggacagttgattttggcaaattggattttttaaaaattagactacagaatttttgtttgcaatcttcttatttaaggaatacccagataatttggtttggagagaagattattaaattttcctccacataataggtctctcttatcaggtctgtaagggacaaatagtgaatactcatttgcaactatgtaattgtcctgtagagcaagtgcagccataagtggtaagaaatgaatgagtatggctgtgttccaattacaattattatggatggatatacttgtatttcctatgtcagatggaatcttgctctgttgcccaggctggagtgcagtgacgccatcttgattcactgcaacctccgcctcccaggttcaagcagttctgcctcagcctcccaagtagctgggactacaggcgcacggctaatttttgtatttttattagagacggggtttcaccatattggccaggctggtctcaaactcctgacctcgtgatctgcctgcatcaacctcccaaagtgctgggattgtaggcgtgagccaccgtgcctgacccaggactatatttaaatgatttataaatgtaaaaactattcctacactatagatttgactcaaggattgtagcttgctgtgcccctgccctctgaatgggacgtggtggtacagtagctgggattacagtcatacaccaccacgcccatccaattttgtatttttagtagagatggggtatcaccatgttcatcaggctgatcttgaactcctgacctcaggtgatctacccgcctcaacctcccaaagtgctgggattacaggcgtgagccactgtgctcggcctgtatttttatttttaaaccttagtatttctgaataacaacgggtagagaaacacccgcagtagctgtctacaatagagtgaaataaaaagcctgaggaactgtcaacagaaaaatgggtggccgtggggagcaccgggacctgcacttgcacacaatctagggcagcttctaatgagtctatgagttactcagggatctcattaaaatgagatcagccttgagtggggttttctttatagacttctgtcaccatattttgaagagcaagggtttagttgattttaagcaggtgtgtacccccctggacagtgcttgtagaaaaacagaactatacccatggatttcatgattatactgctagcttcttggttaaggggctgagttaggcattcattgcagatagaaacaaagcagatgcatgcttatcagtgagtactgagatatttagcatggttacctatgaattgaagtttggtctcttcttacccattaattgattatctttcattctaagcaagtatttcataccctgcatatcagtatatccctggatttcgtccttccacatggtttgacactttgaacatcagattacctaagagtgagacttaacccacttttaaattgttctcaaaattagggaaataaaagagaatgaaattgtggcaacttttttccctcctagttaccagatgtatgctactcatggtgggtcctggcttccctaaagataattggaagacttcattggattgatagagagaaactgcgtaatttcattttagcatgtcaagatgaagaaacggggggatttgcagacaggccaggagatatggcaagtaatatttctgacatatttctataaattatttcagcgtttgcattacttcatggttccatggatttccagggtggcattccgagtgttgctttgaaagcagtttttttttctatttattgtagagtgtatgaaggatatagaacaatcttacagaaatttcttgtcgcttgttgctaacaaaattagtatatggtaaaggtcaggtattcataatttgaagttaaagaagttttcattttgtgatctgtatataaattcttttttaaataggtggatccttttcataccttatttggaattgctggattgtcacttttgggagaagaacagattaaacctgttaatcctgtcttttgcatgcctgaagaagtgcttcagagagtgaatgttcagcctgagctagtgagctagattcattgaattgaaagttgcatagtatagttttgccattttaacatttctgtatttgaagtgcttatcgaatctaaaagtgactactgttaatattttgtatattgtgttaaattaattttaataaattatataattatacatattgtaaaataaagaccggtattttattttctgctttttattctgaagtcctgttattctgactacagttctttgtgtatacttctgtgtctgttatgttcaataactgagctaacataaaataactctaggtttctacttgatttttcccccatgtatacctttcatctgttctatagcaagttgatgtaaattggtttgtcaacaagaatgttaactgatgaaagtggatagaacccatacatgaattaaatgatgcacaaaataaatggctgttgaaatttggaaatgattgataggtttgaatatggttattctgaattggtcacagacttaggttaaatggcaatctaccatcttaaaatggggttgtgattcggactgtcctttttttttttttttttttttttttttttagcattttatatatcagaattacccaaagaaggagttgtcttcaaataaggaaacactaacgggtaagttgatggtcaccacagtatttttttgcacctgtctttttcttaaaaagctaaaatgggtacaatcactcttttttatttttttgtgacagaatctctgttgcccaggctggagcgcagcagcacgatctcagcttaactgcaacctccgtctgccgggtttaagcaattcagccgcagcctctcgagtagctgggactacagccgcacaccaccatgcccggctaatttttatgttactttagtacagacagggtttcaccatgctgaggagctggagaccagcctgaccttgtgatccacccacctcggcctcccaaagtgctgggattacaggcgtgagccaccacgcctggcctaaaatgagtacaatcactctaggggtttacagttttggtgaaagtgaggtattctctatttttaaattttattttttagagacagggtcttcctttcttccccaggctggggcatagtagtgcaatcacagctcactgtaaccttaaactcctgggctcaagcagtccttccacctcagcctcctgagtaccagggtctacaggtacctgccaccatgcccactatgcccagctgatttcttaattttggggacaggcactgtcttccccaggctggtctccggaggtgaagtaatcctctggcctcagtctcccaaagtactgggattacagggaggagccatcgtgcccgatctgaaaataaggttttttgatggaaattgagatttttctcaagtatgtttggaatgccctgtgcaataatcattccaagaacagagatgttcttaaggactgttgtcactgcatgtgggtaaaccgctgtgcataactggtttattgagatactcaacagtggcaggatttcagtagtggtgtaaattaatgtcttctaatagcttctgtatggcagtatccagataatttcgtcatgtttaatccatggatctctggtaagttggtactattggccttatttaaggaattttctaaaggtcaccactgcaaagctggagtttgaacttctagtgtgccattaactgatttatatgttagaaaccacagtactagaaattggtagatggggaattgttaactgagagatcttacccagtcagtctttccctgtttcctactctactatgcacacagccatgtgcatactatcttttgataatataactatctttcctatatttggtcacaagatcaaccttaggtgggttatgctgtgtgagcattacacgttctcattgtgtcaaaggcactgggtgtactgtgttgggtggtttctacatttaaagataagctagtgtgcttggacgtgtgggaaatgcatgtaacatttgcaataagggagattgggtgctgtgagaataatggggctaacaaatcgggtggtcattgatgggccttgcagagttctggtcagtctgatacctgcaggctgaggatgttccagtgaggttcatgtggaaagtgatgggtttgggaatggctggaagcagggtcatagacctgaagtacgtgaatccatgtggaaagctgagcctgcctgcgcctgcgcagtgcagcttagtgcgtcggcgcgcagttctcccgcccgtttcagcggcgcagcttctgtagttgggctactggaggggtcgctcagaaacctcatacttctcgggtcagggaaggtttgggaggatgctgaggcctgagatctcatcaacctcgccttctgccccggcggtttccccgtcgtcgggagaaacccgctcacctcagggtccccgctacaatttcggactccaggagactccacagagccgcccttcggtccaggtggtctctgcatccacctgtcctggcacgtcaggagctgcgggcgaccggagcagcagcagcagcagccttccctgccccgcgccaaactcccggccagctcaaggcaaggagtgattgggtggaggagtctccttgaggctagaggccggcagttcatggaggctcgggggcacgtgggtggtggttaccacagtgaagttgtgatttggttggggcgtgagatctgagtgccctgggaatttggtgagtctgggtgattagaagccttgacttttcaaattggttctattgcaagaccttgactgtggatggctcagttctgagaaaggctgaagtatcccatataacgtccctcacagtgtctgacaaatgacagtttgtgcgtgagtttgctgatagaagttgtgagctgatctttggctgctgaatttaattctccaaatcctgctaaggtgggataaaatagattaaattgaacatttcatctaattcagggaaaataatatgtttagtattaaaagagtgggctgggcggtggctgacgcctgtaatcccagcactttgggaaaccagggtgggcggatcacttgaggccgggagttccacaccagcctggccaacatggtgaacctcccacccccatcccctatctctactaaaagtacaaaaattatctgggtgtggtggcacgtgactgtggtcccagctactcaggaggttgaggtgggaggatggcgagtccgggaggtcgaggctgccgtgagctgagattgcgccactgcatttcagcctgggtgacacagtgagaccctgactcaaaacaaacaaacaaaaaagatgcatgtcct

SEQ ID NO: 2673 - DNA, 6000 bp, Homo sapiens
tttattcatctttatatccccactgcctattggatacttggtacttagtgggtagaggcttattacatatttgcaaaattaattaaggcttactatagcatcctcctagccagctttgcttttttgagaaaattctgcattaaaatattaagaatggttaggtctttataagtagctaagcaatcctgagagtagaggatatttctcaatcgatttggtagtcaccctggaagttatataattttttcaatgcctttgtttagtctcattttgaaactcctttcagagttgagacatgtccttttcaaatatttataatggtggcaagtctttgtccttttgtagactcacaaatttggaaacaaccaaaaaagtaatttagaaccaaatctattacatttatttattttataaaacaaaaatgtattttcataaactattccaaatggcaactccaagaaagagtcctcaacaatgttttatactatttataatcagtacaacaagcacaaacctgttttttcagtatacttaatttaaagcacaacgctcacttaaatatctatgttctgataaatttcattcattcatattgaatgcttctgtgtcaggcattagtgtaggcatttgtgatacacccataataaaacagagactgccatagtggaattcacattctagcagggggaatcagacaataaaaagtccaataaatacataaattatagaatatattgcaaggtgatgagtgcatattgtccctcttctacttaaaatccttcaatagctcttggttgggtttaggatcaagtccaaaatggcttaacagcacttcagcccctcttgccttttcagcctccttgcccactgtgtgcctgtcatactgactgctgcttctctgttccacaaacacacaaagtctcttcccatttccagtgatgctcttaaggagtttatgcttgtgtgtgtgtgtgtgtgcacgcgtatgtgcatgggccagaggaagtgcatgatagacaacaagtaagcaatagcatatttaaaaatatatatagtatatgagtgctataaaaaaatgaaaaaaatgaattggtatggatgatcaggagttgggaatggggatggtgggcaggttgcagttttacttatttcattcattcattcatttattgagacagggtcttgctctgtcatccaggctggagtgcaatggcacttacatggctcactgcaaccttgacctcctactggacccaggcaatcctcctgtctcagtcccctgtgtagctgggaccacaggcacgcaccatcgtgcccaactgatttttaaattttttgtagagacagggtcttgccatgttgcccaagctggtctcaaacgcctgggctcaaatgaccctcccatcttggcctcccaaagtgctgggattataggcatgaaccaccacacctagccaggttgcaattttaaataaggtggtcagtgtaggagaaagtgagaactgcacaaagatctgaaagatgtgagaatccttaaagaatctagttcactatctacaggtgacaggaaactgaaaggaaacaactcaccaatctttatgttatgttgtgggtgttttcgaatgagctggacaatctggtgggcagcttcttgtcgggaaggaagaaccagggctggattgcaattggtgttgtctaggtataaagtatggatctgtttccccagtgtcagggctggctcctttagcatggatggtgtgtatcgaaaatcacctggaggaatatgtacatgggggcagaaggtcagagacaaaagaatagaagacaagcctctcctacctccaacaatagacaggcgtttgcttactagtctgtgaaaaaactattatgtagcctggcactgaactaggcagtatagctgcatggtttctttgttgtaatgtctccatcctactcctatttttcaattactcttcacaaggttcggacccttaaagagtgggaaatcggccaggcgcagtggctcacacctgtaatcccagcactttggggggccgagccaggtggatcacctgaggtcaggagttcgagaccagcctggccaacatggtgaaaccccgtctctactaatagtaaatacgaaaattagctgggcgtggtggcaggcgcctgtcatcccagctacttgggaggctgaggcaagagaatcacttgaacccagaaggcggaggttgcagtgagccacaatcacgccactgcactccagcctgggtgacaagagtgaaactccgtctcaaaaagaagaaggaaaaaaaaacagtgggaaatcagttgagatggggtcactatgctcatatgtgatgaagttagaaggcctccagcgcctccagacttctattgagttaaggctgctcaagaaaagtctgccaggtgtggtggcttgtgccaataatcctagctactgtggaggctgaagcgggaggattgcttgaggtcaggagtttgagaccagcctcggcaacactgcgaggccccagtctatacattaaaaaaaaaaaaaaaaaaaaaaaaaaaaaacatctagtctggagaagtcactgggattccttgagaggcccacctgtgtagaggatggttccaaaatatccttcaaagagaaacatgacagaaccaggacagtgattggcatcgaggagggttacggtcatggtctcttgtccaatttcatctaggggtaatacatggctctcaccaacctccagggcttggatccattgcttagatacctgagaaaacagttagtcatcccagtgaccactgactcctctccgttacctccccgggtcagggactatcccttacatgaatcaggaaagctgaccaaatcctgagccaccgggagcagaagctgtaatggggattcccaagcaatctgcccttcctccttccacttcccatcccaccctttgtacaatttaagagttcagctggccgggcgtggtggctcacgcctgtaatcccagcactttgggaggctgaggcgggtggatcacgaggtcaggagatcgagaccatcctggctaacacggtgaaaccccgtctctactaaaaaatacaaaaaaaattagccaggcgtggtggcgggcgcctgtagtcccagctactcgggaggctgaggcaggagaatggcgtgaacccgggaggcggagcttgcagtgagccgagtttgcgccactgcactccagcctgggcgacagagcgagactccatctcaaaaaaaaaaaaagagttcagcaaacagtctagtcagcaattcccaaacttactcctgatcttaatctcttggagacttaagggtggggtggggagagagctggagaaccacccagcacattaggtggattcttaagatgaggcaagtttaggcggggcgtggtggctcacgcttgtaatcccagcacttggggaggctgaggcgggcggatcacttaaggtcaggagttagagaacagcctggccaacatggtgaaaccccgtctccacaaaaaatacaaaaaattagctgggcgtggtggcgtgcgcctgtaatctcagctactcaggaggccgagacaggagaatcgcttgaacccgggaggcggaggctgcagtgagccgagattgcgccactgcactccagcctgggcaacagagcgagactccgtctcaaaaaaaaaaaaaaaaaaaaaaaaaaaaggcaagtttgggaaacatcggcctagcttacttataaaggtaggaatagtttccttggctggattaaaatatctcctcaacttatggctaactatctcaagttggtcacttcgaaaacacgttcctattctgggttaaagatgcatttttgggttcaaacaacttccaaatcagttttcgtggcccccattctatgactccaagaatgacaggttgaagtcccaacccagatgcctggaccagctctcggagaccgactccagccccatacctgtaggtgacgatgcaagaggtgggctgtaattggggagcagtagaggggccgggcccaggtgctagacaggcccacggtgtggtccgagtgcatgtgagacaagaagaagagacgtgcggtgccagcccggcgcaggctccagaagtccactgcgatgggcgtatgggggatcaggaccccattcatggtggtagggttggagtcaccagtgggatcttctccacgggggcagggctcctgcgtgaggcttccacaacggcgtcccgataaaagtcatgctggggcaagaacagggccagagaccctaagggaaagagcccagcagagcaataagttaccagagtgggcagaaaaaggaagtcaccctgcccgctggagcccaaatcgcggagggcgctggacactcccaaccgcgcgggagcggaggccgagccgggcactcaaagcgcgcgctgcagggaggagacaggccaaagtagccgatttccgattgcccgccgcagctccaccagagggagccgcgcagctgcgcctggagagtgagaggttgggggaagggcatcctaaggtcggagtcgggactacgcttagcgctcgctcgcggggagaccggcagcggtcttctgtttggtctcttgacaagggggcgggacttccgcagaaagcaagattgggcctatccgcgatgagaacggcgtggagggggaattaaggctggaactggagagggaggggtctgcggtcagtcggacgcggcgctggaaatccggcggaggacctagaagtagcgggagcgatctgtgggcggggcgaacggcctgccggccgacggtagggcctgaagagcctagggtggggctcgcggtgtcgcggagggcgtggaagtgtgtcagggccagcgtgccggccctacggaagccgagcctgaggcgagatctcgccttttgtattttcactgactcatatttcctttactcaggctcccacatcaggacgagaaggagccctcgagttaccgtgggagctgtgggagctgccctgtgactcttaggaagatgccgtaccttggctccgaggacgtggtgaaggagctgaagaaggctctgtgcaatcctcacattcaagctgataggctgcgctaccggaatgtcatccagcgagtgattaggtatcacctacctcccttcgcgtgctaactgctccctttgcaatccccatcagggctcactagccccagtctctctgaaagggtgaattagctttcacacgtggcagttatatggttcggtcttcgtcctgctgctttggagtaccatgtcagtctcccctctgcagcatcttttactcagctgggtagtttcctccatatcacgggcttgagcaattactggtgactcttggatctataatatagctagtacagacttccttttttagcttcagacccacgtatcccactgcctgcttggcatttccacgtgcgtggtttatcaaaagtatgtccgaaatagcccggacattcttccgtcttcctcaaacctgttcagcttacatttgtgttgatgaatgccaccagcagccgactatgcgtgggagccaaccttgaggacacctgatctctcacttcttatgtcagatggtttgaattcataattctaaatatccatcctctcttgtttattagcattgttgttctggtccaggccttcatcaataaagcaattgcagcagcttactagtaggccactttgcctcatttgagacagaatttttccattatacatacctgaacacataactcttgcctacagctatggttcacaaactttactatgcataaaaatcccttggggtgctttttgtcatccagtccagggactgattctgatttcagtagggtgggagggaacccaggaatctgtatttttaataaacatttcagttggttccagtaggagaccagtctgagaaacaataaagtccaaacttat

SEQ ID NO: 2674 - DNA, 6000 bp, Homo sapiens
acaaaagagctattttagcaacaaaattaggaccatttccatgccactgccatatgaccaggtggttgttcatcatagcaaagggagaattcttaaaaataggctgtgccataattaagtcacttttcatgtactatttaaagtttacacaaaaaaggcttaaaattccaagatgagttgttaatacaaatgcacactcctctaagaccaaagacatgatcagcatacactgggtccaggttccttacattttaagacactataaatggcttagtttgggggacatgactagagaagggtagaacctattcccacagtatatttctatttccctatatcaataagggaaagtaaggcaaataaaagaaattctctcagtggaatgtgagggagttaatagtggttaactggccgggcgcagtggctcacgtctgtaatcccagcactttgggaggctgaggcgggcggatcacctgaggtcagaagtttgggaccagcctgaccaacatggtgaaaccctgtctctactaaaaatacaaaattagccgggcatggtggcgcatgcctataatcccagctactcgggaggctgaggcaggagaattgcttgaacccaggaggcggaggttgcggtaagccgagatagcgccattgcactccagcttagacaacaagagcaaaactccgtctcaaataataataataataatggttaactttcttttctaccccacataagttgttcaatactttaatacatcaacaagatcccacaaggtagcagatctcataataaaaagagtgctgaggcatccaaaccgatttaagagatggtgagcaatgggcttattgatgacaacgcctccttcctgtttcagaatttcctctagagacctcaagcagttcacaactacaattggatcctggtcacgcagcaaactgtataattcatttaccagggcaccatctataaaaaagaacaaagttcttagataaagaaggaaagcttcagagtaacaaggatgtagccagagtaatagctccaggtagacaaagttgaacttctctgctacaaaaatgacaaaggccacactaaagtgcaaggcaaaaaaaaaactgccatgtccagactgttctaagcagctaatacaaaggatctcattggggccccagagaaaggacttctcatctccagaagataccaagccctgcatcctacttaaagagatatgtacagaactggggccacattattattttctaccaaagccacacaatcttttttaaagttatacataatggaggcacattgaccatgatggattacactgaacttacctacttcagagtctccatgaagattatgcatcttggcacatccaaggactgccactctcctgacatatgaagccttatcccgcagaccattgagaataggctgttgtatatactcctgcacaccaggcatcctaagcaacacatcctggagttagccagattctgaaatactaattttgacatacctcagcccctgttcacctaacagatggtttagtagatgctgcacccatcagatcatgaagaattgcagaaagcctctatcaagcttaaaaagccataatttgacttttctgtttttttcttgtttttttcaagatggggtctcactttgtcacccagtggcccgatcatagctcactgctgccttgaattcccgggcccaagccatcctcctgcctcagccttcctagtagctgagactacaggtgcgtgtcaccatgcccatttaattttttgtagatataggctctcaccatcttgcccagctggtctcaaattcctgggctcaagcaatcttcctgtctaagcctcccaaagtgctgggtctacaggcatgagccactgtgcccagcctaatttgacttttcatttggaataatgatgcacaggcagcaaaaaaagatatacacataattgtttagagatatttaaccaaaactgaggactattttacttagagtgagaatcaaaaactccctctaataaaattatatgatacaggttattaagccaaagcagtggctgaaaatctgagttcagggtacaataatgttttccccagtattaaggagctcaaataaattatcctctttaaaaacctaccctgtgatcacttgaattcatcagccatttaggaccagacagagaagagggtactcacctgaggctacacatgctccgtaacgccagccctcgcaccattggattggggtctgagcagtctttgcacagcgtattgatggccaggagagccagatctggtttcaggggagcatatgtgcacatgtacagataaaccaacttcttctggacaatatctacagtggcactggccttcaccatttccataaaaacaccagacatgtccaagccttgagtcatgtacctgaacaacgcacatgacagaaggaagtaaaatgcaaaatccccaacttacaatggagggagttttacttacatatctcctgattacccaactagattgtgatctcttagagggtagcagccaggattaccttgtctattatatcacacagtacttcataccataggcctacaataaacattattcttctattcattcaacaaacacttattattatttttgagacagagtcttgctctgttacccaggctagagtgcagtggcacaatctcggctcattataagctccgcttcccaggttcaagcgattctcctgcctcagcctcccgagtagctgggactacaggtgcgtgccaccacgcccagctaatttttgtatttttagtagagacggggtttctccatgttggccaggctggtctcgaactcctgactgcaggtgatccacccgccttggcctcccaaagtgctgggattaccagcgtgagccaccgcacccagcctcaacaaacacttattgaatccctagtactttggtgaaattcaacttttacatccagggacatgctcttgggacataatcttgaagaaggtgtggtctcaaacctctaggaacttcaaatctattaatgagccagatgagaataccgttaattacagtatgatagataagtacttaaacagaagtattgtacaaggtgtagaggggattcagaggtctgacactggcaggaagtcagaaaatgtttcttcacagaggaagtaatactttagctgaatgagcaggagctcactaggcagatgtaatagcaaggtaaagatacatgctatgaggtaagtagacatgagcaggagcagcacacatttttttaagagtctgtaggtagttgaattaacagcttgttccttgggtgctgtgataagtttggactttattgtttctcagactggtctcctactggaaccaactgaaatgtttattaaaaatacagattcctgggttccctcccaccctactgaaatcagaatcagtccctggactggatgacaaaaagcaccccaagggatttttatgcatagtaaagtttgtgaaccatagctgtaggcaagagttatgtgttcaggtatgtataatggaaaaattctgtctcaaatgaggcaaagtggcctactagtaagctgctgcaattgctttattgatgaaggcctggaccagaacaacaatgctaataaacaagagaggatggatatttagaattatgaattcaaaccatctgacataagaagtgagagatcaggtgtcctcaaggttggctcccacgcatagtcggctgctggtggcattcatcaacacaaatgtaagctgaacaggtttgaggaagacggaagaatgtccgggctatttcggacatacttttgataaaccacgcacgtggaaatgccaagcaggcagtgggatacgtgggtctgaagctaaaaaaggaagtctgtactagctatattatagatccaagagtcaccagtaattgctcaagcccgtgatatggaggaaactacccagctgagtaaaagatgctgcagaggggagactgacatggtactccaaagcagcaggacgaagaccgaaccatataactgccacgtgtgaaagctaattcaccctttcagagagactggggctagtgagccctgatggggattgcaaagggagcagttagcacgcgaagggaggtaggtgatacctaatcactcgctggatgacattccggtagcgcagcctatcagcttgaatgtgaggattgcacagagccttcttcagctccttcaccacgtcctcggagccaaggtacggcatcttcctaagagtcacagggcagctcccacagctcccacggtaactcgagggctccttctcgtcctgatgtgggagcctgagtaaaggaaatatgagtcagtgaaaatacaaaaggcgagatctcgcctcaggctcggcttccgtagggccggcacgctggccctgacacacttccacgccctccgcgacaccgcgagccccaccctaggctcttcaggccctaccgtcggccggcaggccgttcgccccgcccacagatcgctcccgctacttctaggtcctccgccggatttccagcgccgcgtccgactgaccgcagacccctccctctccagttccagccttaattccccctccacgccgttctcatcgcggataggcccaatcttgctttctgcggaagtcccgcccccttgtcaagagaccaaacagaagaccgctgccggtctccccgcgagcgagcgctaagcgtagtcccgactccgaccttaggatgcccttcccccaacctctcactctccaggcgcagctgcgcggctccctctggtggagctgcggcgggcaatcggaaatcggctactttggcctgtctcctccctgcagcgcgcgctttgagtgcccggctcggcctccgctcccgcgcggttgggagtgtccagcgccctccgcgatttgggctccagcgggcagggtgacttcctttttctgcccactctggtaacttattgctctgctgggctctttcccttagggtctctggccctgttcttgccccagcatgacttttatcgggacgccgttgtggaagcctcacgcaggagccctgcccccgtggagaagatcccactggtgactccaaccctaccaccatgaatggggtcctgatcccccatacgcccatcgcagtggacttctggagcctgcgccgggctggcaccgcacgtctcttcttcttgtctcacatgcactcggaccacaccgtgggcctgtctagcacctgggcccggcccctctactgctccccaattacagcccacctcttgcatcgtcacctacaggtatggggctggagtcggtctccgagagctggtccaggcatctgggttgggacttcaacctgtcattcttggagtcatagaatgggggccacgaaaactgatttggaagttgtttgaacccaaaaatgcatctttaacccagaataggaacgtgttttcgaagtgaccaacttgagatagttagccataagttgaggagatattttaatccagccaaggaaactattcctacctttataagtaagctaggccgatgtttcccaaacttgccttttttttttttttttttttttttttttgagacggagtctcgctctgttgcccaggctggagtgcagtggcgcaatctcggctcactgcagcctccgcctcccgggttcaagcgattctcctgtctcggcctcctgagtagctgagattacaggcgcacgccaccacgcccagctaattttttgtattttttgtggagacggggtttcaccatgttggccaggctgttctctaactcctgaccttaagtgatccgcccgcctcagcctccccaagtgctgggattacaagcgtgagccaccacgccccgcctaaacttgcctcatcttaagaatccacctaatgtgctgggtggttctccagctctctcc

SEQ ID NO: 2675 - DNA, 6000 bp, Homo sapiens
ttttatagttttgggttttacatttaagtctttaatccagcttgagttgatttttgtatatggtataaggaagaggtctagtttcaatcttgttcgtatgggtagccagttctcctagcaccatttattgaaaagggagtcctttccccattgcttgcttctgtcagctttgccaaagatcagatggttgtaggtgtacggccttatttctgagctatctattctgttccactggtctgtgtatctgtttttgtaccaatgccatgctgctttggttactgtagccctgtagtatgtttgcagtcaggtaacatgatgcctccagctttattccttttgcttaggattgtcttggctattcgggctcttttttgattccatattaattttagagtagatttttctagttctgtgaagaatgtcaatggtaatttgataggaatagcattgaatctgtaaattgctttgggcagtatggacattttagtgaaattaattcttcttatccatgagcgtgaaatgtttttcaatttgtttgtgtcatctcagatttctttgagaagtgttctataaccctcaatgtagaaatctttcaccttcctggttagctgtattcctgggtattttattcttttattggcagttgtgaatgggattgaattcctgttttggcgctccggttggcagttgttagtgtataggaatactacttatttttgtacattgattttgtatcctaaaactttgctgaagttgtttatcagctgatagagctttggggctgagactatggttttttagatatagaatcatgttatctgcaaaaaaggatagtttgacttactcttgccctttattgttttttctcttgcctaattcctctggcctggactggaagtactagaacattatttattctttaagtgttggagtgcacgacttaatctttgcctggcatggccctaggtcctgtgtataatttggtattttttggccatgaagagtctgttctgtcagttttatgatctctgttttaacaatcctgatcagttgttgtgtctaaaccataaaagggaggtagggtatagtgaagtgtgtctgacctcccacccatcatggccagaaactcagttttaaggttttcctggggtccccttggccaagaagggatctgttcagtcagtgaagggcttaacattttacttttcattgataagccacacgtctttctccatgctttttgtatgtgtggaacagtcctcagttacctggacccaggtgtttctaacttaggggttcatcaatcatgccctgtcaggttctgtagattcaactagaactggccagagctgctgacaccagtgtgcatagccttccttacaaagggccatttgtctagccaccaaagccaccttttgcactcaatgtgcactgattctgcatggatgtcctttctaccaggtaccgtcttacccaaaccacactttcaatttccccagcctgccctgagggcacagacctgggctttcttcctctataaagaaaacacttttatcttcccagtcaaactgaaacacagttgtctacacccatgtcacatgttcaaaaaaagagtacctatctttttgtttgtttgtttgtttgagacagagtctcgctctgtcgcccaggctggagtgcagtggtgcgatctcagctcactgcaagctccacctcctgggttcacgccattctgctgcctcagcctcccgagtagctgggactacaggcaccggccaccatggccggctaatttttttttttttttttttttttttgtatttttagtagagacggggtttcactgtgttagccaggatggtctcgatctcctgacctcgtgatcacccgccttggcctcccaaagttctgggattacaggcctcagccaccgcacccagccaggagtacctatcttaattgaaaacctttgagcagtgggcagccttctcacattttggtgatggcacttgggctggaactgattaaatttctggtctggtgttgaccatatggaaagggtcacatgaacctggcaatgaaagaatcccatggtctgttctacattcttccctaatggaagttagcaacgcagtccagtgatttttagtataaatttaagtgcatctgtatgtttgtcagcatgtgccttcacattttctttatccattcatccactagtggacacttaggctgaatccacatcaatcaatgtgaattgtgaatagtgccattcataaccgtgaatcgtgctgcaataaatacgagagtgtagagagctcttcaacatactcatttcattcttcttactataagaagtgggactgctacatcatatggtatttctctttttaattttttgaggcgcctccatactatttcccataatggctttatgagtttacattctcaccaacagtgtaaggagctcctttttctccacatccttgctgacatttgttatctcttgtctttttgataatagccgttcaaactgggatgaggtgaaatctcattatggccttgctttgcattactcaatgtttggtgatgtggagaatttttcatatacctggtggccatttgtatgacttcgtttcagaaatgtctattcaggcttttatctactttgtaatcaggttattttattttgtttttgtttattttataccaagtattgagttctttgaattccttatatgttttgaataatcacatgaagaagaataaaattagactcttatgtttcacaacatgtgaaagtcactcaaaatgaattaaagacttaaaggtaagatccagaactatgaaactactagaagaaaacacagagaaaatgccttaggacattggtatgtgtaagaattgtttgaataagacctcgaaagcacaggcagcaaaagcacaaatggataaatgagattacatcaaacttaaaaacttctgcacagtatacaatcaacagaatgaagggacagcttacagaatgggataaaatatttgtaaactatatatctaacaatatgtcactacatttcaaacaatagaaagtcatggactctgtcagggttagtgtaaaggaatgtctactctaagaagtagtaaaactaactttcaaaggtagcttagtttcatgaaactggtttcagagaggtatgaagataaagtttcccttctgtgttgagagtatacgagaaaaaacagagtgaagggaggccaagggaatcagcctatcattctaccacatcacatcagtcatatttcatctcccacacagtggtaccgatatttgtggacgagtatgtctgcccactgtaaatctctttttcattaataatcagatgcagaattctcacttattatttcatttatcattttcaactttctattttaatcttgcaggacttttacagaatttgatcacaagctctctcagcttcctttttccaggcttaagtgtcctcatactttgtcatctctctttccatctactgatctttcccataaaatgattattaaccgtcttcattaaagatttctccagatctcctctatcttccatgaggtgagatcgtgggtagaatactgtatagtgctccacatgcaggcatagcactggttatgcagaaagaactttcaagaaggaatgaaaattgaaacctacagaaaacacaacaaaaaactggtttcctccagggacagttaagggtagcatggggcacaaataaataaatttgctactttcaaagtaggcctaggcgtgatctagaatagaaatttagagctgtaaaggaacttaattgatttctgcaggtcggttagttgcttccgcacattatgtgaagttactgccaccttgtggcaatacctaagcactacactttctgactttgaataacctagaaaaatataatgcataagacaacaagccctttcgctaaagcgccttaaatattgcctaacagtttatatctgtatagatctgtggcttatattatcacttacatggtttcatctcgacttcatagaaatcatgtaaacatagaaaccatgttatccatgttgcgtgcctgcgtgcgtgcgcgcgcacacacacacggagtaaaagatgtcgtataagttttgctgttagagttgaacttaaaaatctctaaattgttacatttggaggctctcattttgggggatcctagtgtgagatgctcctttgttggtcaattttaattatacagacataaataaaggatatattaattatagagaaaaagatcagaaatgtaaacaaaatgcagataagatggagacattcaatgatttgtccaataatataaaaacagtttttgtgtgcgggtagtttgttgtcattagtggaaggaaatagagagaaggataaataatatttgaatttgaaagagcggatgtatgaatacaagactcccttgaagaagaaaggatcgtctgggaccacagcaggccggggacagggagaagaatgagcaggctgtgtggaagaacaaaacgacctagtatcccagtttattttttttccagtgctatgatttctttcctttatcttaaaatctttggtaaacatgtaaatgaggttttgagaagttaagattgaaattccatgttcatgttcgctgcaattgaactggagaagtgaaaatatgacaaatggaagtggcagccctaagggctggaacaagagatgcaaacaaaggctgggatggatttgtggaatttgtaacaaacacttcctaggagtgatttctcagtaaaagggggcaacgaggctggtgtagtaagttagcaaacaaattccagcagccttccctgggggactttcatgctgaaatgcaatccctagtgttggaggtggggcctgatgggaggtgtctggatcacggggggtggatccctcatgaatagcttagtgtcatcccgtttccctcatcaacatgcattcccagaaatgccatgaaaggaaagaccaagtcttgactgagaaacggaccgggcagatgagggactcccacatatacctgtttcctgctcttcccgaagacattttgccacaagcatataattcagcttctgaaaaatacggtcttcctcactgcagacaccatgccagcgttttaaatcaagttggctactcgtgctgtttagagtatgcagtttgcctgtggcaatattaaactcatctggaagaaagcacttaaacctatccagttcctcatcggtgatgttatccaggctggttagcaagagtatctccttatatttactctccatctcacgacttttcagcttataagggatccaaactatgtaagattataccaccaaaagtgattcaacattcaaaatgaagcaaggtgagctgttactattttttaaagggaaaataaaatgtttacagtacagtaaaagagattttggtgaaatataagaaataactttttaagcaagatagtccttcttcctgggaaagacatcttcagagggtatacaaccacctccagaattcttagaaaatgggatccattttcctgttatttttaaaacagagttattcaggcataactgacatacaacacaatgcacatatttcacatgtgcaatttaaattttttgacatgtatacagtagataaagctcaatttttcaatttcttctttcatggatcatgtttttggaatcatatggtttggatatttattttccccaaatctcatgctgaaatgtgattcccagtgttggaggtggggcttgacgggaagtgcttggctcatgggggtggatccctcatgaatggctcagtgccatcccctggttgatgagtgagttctcctctgagtcacagagatctgattatttaaagtgtgtagcacattgaagacctaatgtgaccagtaacccattagaagaaaacaggataatctcaatatgttgagg

SEQ ID NO: 2676 - DNA, 6000 bp, Homo sapiens
ctgattaatgccactctaacgggcatgtagggggtgaattcgccccgtttgtcatgtgaggacacagcaagaaggcctcaccagatactgatgcttgaccttggacttccacctcaagtactgtgagaaatacatttctgttctgtataaattacccagtctatagtattccattacagcagcactaaatggactaagacagtgggaaagtatgcatgtccattacagggagggtcagagaacaggagttttcatgaaccagaaacttctttcactcatattttctccatgagacatgcaataaacagatgaatgatgccaactctggccttgtacagtatatcatgactggttcacatcactccccaggtttccatatgcattcactctcctctcctgcctcaacactgagtctcttttattccactccaaagtaaagaggtcatccctagaactacagaagctctttctgccaacagagttgtctggagtttatggcattagctttgagcaacaggaaaagtagaatacaaaactgcaatacagaaactacaaaatttcaaggaaggactggctgagagaagccttgaggttggaggggaaggaatggcattgttgtgaaaacgtgttctgggaactgagcttaaattgaattgtaggaggctgcagtcccactggaaaatgcatactggcaccaagatgactgctgcttccaggaacatcctcccactccttagcaatgtggaacagattgaaggaagctcaaacaatccatttaagcaggaagtaaatagattaagagagcaaccagatggcctaaggcactatcggtatagctatccccacccctcagcgcccccatcagcttttccttccttgtttcttctcactgtctgaaagactactcaggcgtgcactgcgaggtggagatctgacttctcttgttcccgcttaagactgcctcctgtgtaagtttctgctatctagatctttgactaccaaccagccaggagtggtctgcctcttctttggtctgagcttgccttgtgcttatattgttgtacccaagcgagttaagaaaataccccacactttgagacgaattaagagtcctttagtaagccagtggccaaagagacggctaatgctcaaaattctctcggccccgaggaaggggcttgattaacttttatacctaggtttaggaaggggagggggactcaaatgcaataattctacagaagcaaaaacatgccttaaaagacaaatggttacaagaagagcaacggtaccaggtgcaaggttgtaaatctttcattgtaattagatatagggtctatgccggacacgaactcaaggttttatgttgttatctttttgagaaaaagcctgggaacttcatacattgttggtgttactaccttatcagttaattgggctcttttgaaacgctgaggatctgtttacccaggccaactccttactaaagggggttgggtaaggagcccttagtgtcttgtaaattaaggggtcaattggagtttgtccgaccttcccagctagagagagtcttatttacatgagaagcaaggctgggtgattaaagagacaagcaggacaaaattcaaagtaacgagttagagtaaaaacaaggttaggcatttcaatatagggtggttcttagtccagcagggcgttttcccgataaccacctgtttaactacattcacccttggtgcaagtgccaaaaaacaaacaaacaaacaaaaagaccaaggcgataggtatttgcaccataaacttctcccatcttttatgtccgtaattttgtgttatttcgcatttctgactgtttatagaattgaattggcctttaccttatcatataataatatactttaattttaatcacaaatacatatgttaagtagaacacaatctaggaaatacaagataatacagagaaaaatggaagtattggggaaaaggaaacagcacaaaaccaagtgtgacgaaaaagataaactttgacttctaatttcaactgagaatcaatggacaaaacatcaaagccattatctgaaatgcatggttccattcatgtgagagttggagagacaaatgttagtattccaaaaaagaaaataattcggtttaggctttgggaaaatcagattctgtgtcttaacagcaaaggtccagccccagcaggaagcatgagaacccaaacaatgcccttgtgctaatattgttaagtggagaatctgtaaagaaataatgaagaaaatgacattcacacaagcttaaaaggacatggatgttttgctaaagaaaaaaatatgtgtagaaattagtaaatcaaggaagtaattttgcttagcattcaagtgcatgggctttggaataaggtagatctggtttgaatttggctccaacactaactaggcgcctagtttttagaaaatagcttcaattactgctacacactggattatgttatctaaattcatatgatgaagccataacctcccagtgtgatgatatttgaaaacgaggcctttggtgggtagtttatgagggtggggtcctcataatgtgattagcacccttataagaagaggtatcagagagtgctctctctctctctcaacactaggtgaggaccctgcataaatatggctatgtgcaagccaggaagagggctcataccagaaactaagttggccatccttgatcttggaaccctcagcatccagaagacccaaatcaactaagatagtagtcttctctaaaaaggggaaactttgctgcatagagttgatttgcaaaacaagtgaacaatgcatatgccacagtctattgcatcatgaaaaaccagtgtgcaataggtctttttgttcttagcaaggtaaagacatttgcaatactgacaggagaaatgtcacctacaaatactctaaagtgtgaagtgacataaatgtttctgcacagctaaaactttggtatatgtggaacagtatggaaaatgaggccagaaaggtaaaatagtaagctgctttttgtcataaagagagaaatggaacactcattgttcaaaaataggtacataattgagagattttattcagaataatgcctgattaatataaatttagtcactgtaataatgtagctacataatttatatatatgtatatatattcgcacattttttgctttatcaggaatttttgtatattctactaatgacttttctgtatgatagcacaaattgcaattgttggccactgccacaaagtgggggaaaatgcacatttttaagcatttctttgcttcatctatgaaaatttcatctttgtggtatgaattatggagcattgtcctgagttgcccttataggtgaccgcagtttgtgtgttgtatgctggagtcccaattgaggacattactgcatataaaatgattataagtaaaaggcagaaaatgttctgaagggtcataacttccaagggttctctaccctttgacctctggattggggttcccagtgactgccttaatatccttctctacctactgccttaaggccaactcaatgtatccacgtaaagagtaccctaaagccagtaaaagattatcacgaacacccagagatgtttatggccatcattccagatcctctttgctttttcttgacttactccttttttgataaagttattcatatggtttcaaatccagaattcagctattcacttcatggccctagtttggattaaaacaatcagctttcttttgctctgtagatggccttggacagtacatattaacagtctatggggccccttttccactcatgaccacatcctgcttgcagatctgctgctgggttaacaccacatcatctgctagttgatgccatttatttgacatcctggggttacagcacgctaaagggcacccactgtccttaacagagaaaaatacactgctgagcagaggattaaacagactcctcacactaccggaagttcagtgcattttccaggattttcaagtcttcgatgctgtcatgttgagagtccactatccacgtttgtttatccaggaataatgcagaaaatctgagcattcgtgaatctaatcattgaggtaaagtaacctagtcatggtcaagaggacagctagtgttaaactccttcatataaatttaaggaaggatttacatattcataatgactttctgatctggaaagcccaggcttgtcagttattaataattggatgaatacttcaggtagtatttaaacaaatagcgatttcatagcagacatttccccaaccaggagatgcagtaaagtattggtagcaatagatgctcctaccaagatctcctcctgccactgccactctgtgcacaggaaaggaggggagaagaagccatgttgcttctcttatatttgagcatcatttaagggaatataagtctctaatgactcacatgtaagtctgctgggtaagaaagttctaatgttggaactcctttcagctatcgaattttgtaagaaaaaaaacttatttgtgtttatatacatttatgagatacaagtgtaatttcgttacatggatatatgccatattggtgaagtcagagatttcagtgtgcacatcacccgaaaaatgttaactgtacccattaaagtaatttctcatcccccatttcccctcaccacatgctccagcccttgccaggaaactgttcattttctctgactaacagaaacgaaagctaaaaacactggtgggaggagtctccacattgtttcctactccattttctctggggcaatagcagaataggagcaagccagcactagtcagctaactaagtgactcaaccaaggccttttttccttgttatctttgcagatacttcattttcttagcgtttctggagattacaacatcctgcggttccgtttctgggaactttactgatttatctcccccctcacacaaataagcattgattcctgcatttctgaagatctcaagatctggactactgttgaaaaaatttccagtgaggtgagtactgttcctgattttgtaaatatgatcttgttccttccttgaagtccccagaatcacaaggggacaatcagtattggttattcagggtcatgggatgatgggagtagggctgagtattcagaaaagtgaaaactgagttgcttgatatgaatccttcatttacttaggaagataacaggcatcttctattccaccacaactgaggactgaacaagagaaaatgcattttgaccgttgcagattttaaaattaattatccgagtgtatactggcataagttggtacttagaagagggcttctgttattttggctggaagaagtgttggaaactcggtagctgtggtgggttctcaagatagtgacatgaaaaaagtatcatgaaagaatattaagtaaaaaacatatctgagcatagagatgtattatatgacatcatcccaattttacaaaacataagaacaaatgtacacagagtagaaaatttttttcagtttcacaaacacagttactcaagcacatggtgtcttaatattttcataagtatattgatcctttactttagctccattctgcaccgggtgctagcggcagaatttcaatcattttggaattactctctgccctcctgaaagttaatgattttttttttccttgtggcaaggtataggggagtggaggggaaggcagttaggaaaaggttactattgtttacttttcaaatttttaaaagatgttttctatagcctggtacaatatttcatgtgtgcttaaatggaatgtgagattcttaaatgttgttttcagaattttattagataaatgttgttaattacgttgttcaaatttattatatcattacagattttttcaccttgttcatttagtaattgaagcataaactgaaa

SEQ ID NO: 2677 - DNA, 6000 bp, Homo sapiens
atgaaatgaacgactatcaaaaacaagatgcataagatggagatctggctagactagggaatgttcagactagaaccctgttacttctagcatcttcacagggaaattagaatcctcattaaaggtggaagtaggttgggcgcggtggctcacgcctgtaatcccagcactttcggaggcagaggcagggggatcacttgaacttaggagtttgagaccagcctggacaacatggcaaaaccccgtccctacaaaaaatacaaaaatcagctgggcctgatggcacatgcctgcaatctcagctactcaagaggcagaggtgggagaattatttgagcccaggaggcagaggttgcaatgagctgagattgcaccactgcactccagcctgagtgacaaaactgtctcaaaacaaacaaacaaacaaacaaaacggagggaagtaaggagctactttccaggaaagaggggatgcttggaaatggcccagccatacaaccagatttttcttttataccacccacatgctatagattgtctgagtgcaagtgaggagaaatactattaaacacaaagaaaggatttggatctgaaagggaaacacaaatgtacaacgtgaggattttaacttctctacaccacacaagtttatcctactacatttttattaaagtaacaaaaaggtgtacatttgtccataagctgtacattcttccatataaaaacactatcatacaattagtaacctttgtcttttctgtcagaatagcttacaaacatactactactatttatttttacttaataggagagacaggcctgctcaacagtccagctcaggggttttgttgtttttaaagtgaacatcataaagaagagaagagagacaagattaagcatgagaccatgaggctgcttctaaaaaggcagggacctgtttgcagacaagatgcaagaacacagcctgcagtgattcacagctttgtttcaacccacaaaccagaaaattagctcttgggtctgtgggcccaaagtgaactttaaagcaataaagactggaagcaggtctgggaaggcaatacaaaatgtggagagttgaaaaggaggcagagctggcaggaatgggtagggagagtgtttggtaaatagcacctttgagtcaaaattgagcagtttagaaatccaggaaaggggactggctgtggggaggagaacctgggggtagaggaagtggggtgaagattcctcactaaggggcaacagcaggagggtggccatcctggccaaatgccctagccctgtccttcttaaggtgattcggtttgggaaactcgaggtcttttgaggacccctcatcaatgtcactgagaaattgaaggaagggagtttcttcccagtgtagctttccacttttctccaacccacaacagtatatattgcacaagtctacgacaaatttggattgtactgagacagacagcaacctttcccacaggtgctctgagcaccagggagaaaaaacagtgcccaaggtttggcttttatttagtgtcggccctacaagaataccaagtagtcttgcagaacatggggcactctcccattcagccaaggaatacatgcaaggctgactagccagccatcatcccaaggagagcaggagagatggttccctaagcccaccagggcatcaggaggttctgatagccagttttcctccagaccctcctgggacccagggggcatattgcacagtgactgagaactcttgtcctagaaaatacggtagctctatgacccgaccagaagggaagggggaggggagggttagaggagagttgtgcttttgaaaagaaggcagtaataaaggacctggagttccctgtagcttttgagccacctctcaaagggatcatggcagcagcatcaagactttcatgtggttccaaaaggaagagttttggccaaaaaacatccccagtggatactctttgggtcccaaaatttcattgcaaatcacccccaaattatttgccacacatacacacaaagcagcactagcaaagcaaaggttttgtgcagagttcccttccatcctaaccccaataacctccagttccctcctcccccccctcagaaaacccaaagctttagattcctggctggaaagcaacatctacaggcccctgagggtagaattagaaacaagtcatgatttcaagaaaagcagcttaggacagtaggaatcaggagaggccttttcactctctgcccaggacctcattagaaaaataaaagaaaagataacatagtattgtttaagtccaggcatgaatgcccctgagtaatagaggagccagggatgcaggtgtctggctgggggagacagagagctctgaacttggcctctcttcctcccccagggcaaatcccgacctctctgttcacagttgctaaccttgcttgctccctctcacatcttcctggggtgctagccaaacgtctcccacttctccttggctaggtctaccccctaacagctccccctcctataggcagacactggctcacagactcaagcacgcaacagttctctccaaaggcacctggggaggccacttccaagcagctcccttgaaggattttttttcttaaaaaaaacttttggtttcttttcctcctttcttaaaaaaaaataatatatataaatagctcttcatttaaaaatacagttccccaggttgaggtatgtggtggcctgttgtcacggcagcatgagcacggcggcgcccagggcgggggcggaagggcctagctggagactgccatcacgtagttcttggaggggctgctccggcccagcagcacttggttcttgcaggtgaggagcccacaggaggcggccagtggggcctcctcgtacaagacgcagatggagccgtcctccccaatgcggtaggacacctcataggggtccacccacagggtcagctcgctgggcagcagctggtgcagctggggctggctgagtccgatctggctggccaccctgctgatgatggggtccatcttgtggttgatgcgaatgcagcggtagccggagcccttggacggcttttcgggaaaccagtggtgtttgtagtgctctgtggagacaggaccaggggcagatgccctggttagagcagctaggccatggatactaccatagggcggggtggagggtcaagggacaggaggagagaaaggggccctttaagtaagggaggtggattcctctgagttctaggaccctctttccacttagcagagaaaattttatggaagctggaaagatccactttcctgcttccaggacaagtgtatgtgagagagtgtgtgtgtgtgtgtgtgtgtgtgtgactgagtgtgtgtgtgtgagagagagagtgtgtgtgtgtgtgtgtgtgcgtgttgggaggggattctagagctctagggtactctctagtggccagtgtattgcttttggcacacccccaaagcaagggaagggtgtgactgggactggcatgtccaggcagggcctctggagacctgtgagctgaagtttcagggccaggaaggctgccaacattgttgggtccacagcaagtcactggacctcccaccctgtgttccctctgcttccttcagaagagtcagagaaccttccttagcagtgcctaagggagtgaaaactgggttgttttgatgaaacatctgttttcctcagaaggcagggtctgtgtgggtgcgttccgagatggctatcgcttcccaaaactgacagtaaccagctagaaacagctgggagagaggtctctccccagccagcgagcgggctgcttatctcttcacctcccaacttgaaggcccgcacggcagggtcacgagctacgaggctctcctccctaccacaataggtggcagatggctaaggggaaccaaagataacacaaagggggcccaaattccaacttgaagccagtcagcaaccagtggactaccccaggcacagcgcaccccgaccggcaggaagaaccgcactgggactccaaattgttgaaaaggctcgactgcaccttcttccctcatcgggacccctcggccgaccgggcggcccgcaacaacatccatcgagggtcttaagatctcgagggtccagcgagggagacgagcccgtaatgagacaggggcataagctggggactcgggctggcactccaggaccagggtctgcgcctccgagagcgtagaggggcgcgccccatcagaaccgccacggccgagacccgagcacagggctggggaggaggacccaggaaactggggactgcgggccgccccgggggtcggaggagggccaccgagtcccaaagctgctcccgtgggtcaccctgccgcaggagtagaagaaagacggccctggcagggatggggccgacccccggtggcgccaggcccctcggcatgcgctcacctgtgagtgcctcctggagcgccccgctgaagaccttaagcctctgctcgctcacgcagccccgggtcctcaggaggctggagaggaagcccacggcggcggcgatctccgggagcatgtcggttcccttcccgtggctcatgtcgcgcgcggctcgggctcagtgagaggtctcgggtgggaagtgcgggtccacaagacagcgttaccctggccgctgctcgggctctgcccggactttccccgggcagcgtttttcaggaggtccagggaggtaggggggcagccggcggcggcgctcattggtcgcggccagaggatgggggcggggcccggagccgctccgctcggccccgctccggcgcttttccccgcccccgccaccccagcccccgccctcgcagccttggcggcgctgaggtcatcgctcgctgtcgtcagtgctaggaacctgcgcccggctgagctgagcgaggcgagaggagaaagcgaggcccggggacgggactgagagctctgaaaggagggaggcggctcccgagtactccgcgcggggcaggccccggcctcgcctcttcgcccatttttaaggctcgagttagaggccacctcctccgagaagccttcggtgacaccacctctcccagacggttcccctttctgattcccacagcattttccaaccattcacggtcagaaccactcaccaggacgtgttgtcaccattttaccgctttgcctcgtctcttaactagacgaaatgggttccttttggctctttggaaagggaggctgtcttctatttatttccgtggtaatcccacctcccacaacaagttccattctacagcaatgtcttttctcttgctgagaaccattcaagtctaagttttctggtgggtaggggtagggggtgtgttgcaagacttttgtcttctcaacttatttttctagttctcactttccttaagtgctaatttttttgaattagtggtctgctctcaactgtacgtatttttccgtccactccctccttcccccagccgtcttccttcctcattgtggtttggaccttctcgagaaagaatctggcctcagtctccctcttccacactcagggaccgccaccatcacaggcactcggtagatgtctgctgaatgaggataacttctacccaacaccgtgaagcctggcccagggtctggcatacagatgccgtgtttgtaaggtgactaaaacccagtggcctctgtaaattcctattttccttggactctgagccctctgaccaccttctggaagccgtgtccctgtcttttttccttgtgccccaggcttctccacccccctgtctggctgtgctgcccctggatcccttcgtgccccgttccccgcactatgtctcctcagtcctcctcccttttctctaggctgcctttccttggagaggtcctatgcatgtagcctgtcttgatgtttactgttttacagtggcttt

SEQ ID NO: 2678 - DNA, 6000 bp, Homo sapiens
atcagctctgggcagcacagtcaagttgtcaccaatgaggtctgtaaagaggaaagatcaaattagtatttgcaccagctacactcagacatactccaccaaaatgtacactctaccataacacccacatttcacaagacgactttcttcaacagataccattatatgtgcttactaacatagtgaacacatatccatatcccctgctacccacaaacatcagagcccacatgcaatctaagtatgtatgctcactcaaatatacatactaatacctccctaaccacaccgacacacagaccaacaaaaactacactctgcatggtggagaaatgacctgatattaccctcctacaatatctcagcccagccactgcctgcctcactcaacctcaggtttctacttgtactcagaaaattgagccaaccaagccaagtccccacaggcccaacagggcgctgggaaagatagaaatcacttacaacgatccagttgcttctgagctggaaatggagagcagggctgcttgctaaccccacagacggggccagcacagaggcctgaggagtgggacccacttctgcgtgggaatatggcctgaagagagcaggtgggtcaatcctgagtcggccacacaggtgggctgtgcaagtgggcgagatgagcaaccaggactagaggaaccaataggtctgaggtcacatgggacagaaattctggtccagatgaggcataaatgaagtccaccctcacttccatcaccccattccccctcttcagtgggtgaagtcactggtcagcacaagtcaacatttaaagttcaaaattcaacccaagacccttgggtgggagtggagggaggtagagaagaatgaggaggaagaggaggaggaagggcaggaagggagaaggagaagcaggaaggacaggtggggagggagaggaaacccactctccttatcttgctgctcaaacagcaccttgattataccaaggaatgggaagcaacaggcaacatgcaaagagaaaaagcaggggtgatatcttgacttttagagtttctaaggattctggtcctagcaatataagagtagtttcaggaaatttcaaaaacaattgggactgctataatgtattcagaaattgattgagaacctaaatccagagttgagtacaattacactgtgtgtatatatatattttttttaaattattttttattttttactttttgagatggagtctcactctgttgcccaggatggagtgcaatgtcgtgatctcggctcactgcaatctctgcctcccaggttcaagcgattctcttgcctgagcctctggagtagctgggattacgggcatccgccaccacacccagctaattttttttttttttttttttttttttgtatttttagtagagactgggttttgccgtgttggccaggctggtctcaaactcctgtcctcaagtgatcagtctgcctgagcctctgaaagtcctgggattacaggtgtgagccaccacacccggctacactgtatattgacttgggaactttgaatgtgagatacattaagtttcctctccctaggcttgtgtatagaaagaaaagaggagaggctgggcacaatggctcatgcctgtaatcccagcactttgggaagccaaggtgggtggatcacgaggtcaagagatcaagaccatcctgaccaacgtgatgaaaccccacctctactaaaaatacaaaaatagctgggcatggtggtgcatgcctgcagtcccagctactcgggaggctgaggcaggagaatcgcttgagcccgggaggcagaggttgcagtgagccaagatcgcgccactgcactccagcctgatgacagagtgagaccctgtctcaaaaaaaaaaaaaaaaaaaaaaagagagagcagtgggactgccttctggtatttatggatcatctctgccctacacaaagttcacaaactaatcaccaatgacgaggccaaggcacaccctgggtaatggtggagacgaggggttccagcctcctggctcctgtcccattcactgcatcatcgcctgcaatgacagctctgtcggaccacggcccatgcaacagcagcagaggggcccaacagtctaatgaaaaggccccatacttgaagtcagaaaatttggtcccagtcctggctctcttgagaattcactatgtggcctggtgtgggacagaaaaatctacataaggacagaattctattttctgaagcaaaaaacagtcgaggggctaccataagatttttttcagcagttcagttgcaagagatgttaggcatctcctacaactcacacctgtcaaagacatacccaggaagatgttcagcgttttcacatttaggtgctgaacaaccctatatagctgtctatatcttgacctatttccctgacttccttggtggttgaccttggtcagttccggccttgctgacacctggtctccatggctgggtatatctctaagttatcttgtttccagggtcagccctgtttcctgtaacaaataattctttcccctcagtgagcagaagtaatggcctcatctggcctgatccagcatttggggagaagccggtgaaagaggccatctaagagatatgtttaatgccaaactattagaattttgggtcatttttatttgttatatgaagcagtagagcaaaatatttgaattctgaattgttccagaaatgtgggacatgtgagcatagtaacctgttttcaattaacttgcaagctctggttgaatctctaaaaagatcactaacaataccaaatgatagattatgaatgcccaaagaatggtatggatgactaactcagcctcgagagaatggtcagcataggttttcaaggtggaagaccaagattacactgtaccttcagtagtgtgagagattgaggcaggggtggggcgtggtatagacaatgatgtatgcaggagataaggacatgagccacggagcagcagggtcacgcatgttcaggcatgcatggaatggggaccacgttacagggcagagatggggatcatgggcaagctgttgagggatccaggctgtagatttgctgatacttagagggcagtgagaagagtgaccctggagcacaaagtagcagcaacctaaaaaggcagatggggctaaattatgaagggtcttaaacattaggcaaaggagtctggacttgatttagtagacgaatgggggaggggatgtttcagaatgacctgagcaagagaagagctagggaatgaagtcttttaggaagggaactccactaacagtgggaagggtggtctggggatgggactggatagaatccactgcaaccatctagatagtaagaagcagccgatttggggactggatttagggagcaaagtacaaggaggggctgacctttctggacggagtgactgggaaatgatggtatcgctgacagaaatggagatcaagagctttggagagacactgggcttcggctgacattgaggtggtggctggacatctgagggagaggacagagccggtgggaacaggagcaggatggaaagacaggaggacagactatgcagatgagaaaagccactgtaaaacagtaaacatcaagacaggctacatgcataggacctctccaaggaaaggcagcctagagaaaagggaggaggactgaggagacatagtgcggggaacggggcacgaagggatccaggggcagcacagccagacaggggggtggagaagcctggggcacaaggaaaaaagacagggacacggcttccagaaggtggtcagagggctcagagtccaaggaaaataggaatttacagaggccactgggttttagtcaccttacaaacacggcatctgtatgccagaccctgggccaggcttcacggtgttgggtagaagttatcctcattcagcagacatctaccgagtgcctgtgatggtggcggtccctgagtgtggaagagggagactgaggccagattctttctcgagaaggtccaaaccacaatgaggaaggaagacggctgggggaaggagggagtggacggaaaaatacgtacagttgagagcagaccactaattcaaaaaaattagcacttaaggaaagtgagaactagaaaaataagttgagaagacaaaagtcttgcaacacaccccctacccctacccaccagaaaacttagacttgaatggttctcagcaagagaaaagacattgctgtagaatggaacttgttgtgggaggtgggattaccacggaaataaatagaagacagcctccctttccaaagagccaaaaggaacccatttcgtctagttaagagacgaggcaaagcggtaaaatggtgacaacacgtcctggtgagtggttctgaccgtgaatggttggaaaatgctgtgggaatcagaaaggggaaccgtctgggagaggtggtgtcaccgaaggcttctcggaggaggtggcctctaactcgagccttaaaaatgggcgaagaggcgaggccggggcctgccccgcgcggagtactcgggagccgcctccctcctttcagagctctcagtcccgtccccgggcctcgctttctcctctcgcctcgctcagctcagccgggcgcaggttcctagcactgacgacagcgagcgatgacctcagcgccgccaaggctgcgagggcgggggctggggtggcgggggcggggaaaagcgccggagcggggccgagcggagcggctccgggccccgcccccatcctctggccgcgaccaatgagcgccgccgccggctgcccccctacctccctggacctcctgaaaaacgctgcccggggaaagtccgggcagagcccgagcagcggccagggtaacgctgtcttgtggacccgcacttcccacccgagacctctcactgagcccgagccgcgcgcgacatgagccacgggaagggaaccgacatgctcccggagatcgccgccgccgtgggcttcctctccagcctcctgaggacccggggctgcgtgagcgagcagaggcttaaggtcttcagcggggcgctccaggaggcactcacaggtgagcgcatgccgaggggcctggcgccaccgggggtcggccccatccctgccagggccgtctttcttctactcctgcggcagggtgacccacgggagcagctttgggactcggtggccctcctccgacccccggggcggcccgcagtccccagtttcctgggtcctcctccccagccctgtgctcgggtctcggccgtggcggttctgatggggcgcgcccctctacgctctcggaggcgcagaccctggtcctggagtgccagcccgagtccccagcttatgcccctgtctcattacgggctcgtctccctcgctggaccctcgagatcttaagaccctcgatggatgttgttgcgggccgcccggtcggccgaggggtcccgatgagggaagaaggtgcagtcgagccttttcaacaatttggagtcccagtgcggttcttcctgccggtcggggtgcgctgtgcctggggtagtccactggttgctgactggcttcaagttggaatttgggccccctttgtgttatctttggttccccttagccatctgccacctattgtggtagggaggagagcctcgtagctcgtgaccctgccgtgcgggccttcaagttgggaggtgaagagataagcagcccgctcgctggctggggagagacctctctcccagctgtttctagctggttactgtcagttttgggaagcgatagccatctcggaacgcacccacacagaccctgccttctgaggaaaacagatgtttcatcaaaacaacccagttttcactcccttaggcactgctaaggaaggttctctgactcttctgaaggaagcagagggaacacagggtgggag

SEQ ID NO: 2679 - DNA, 6000 bp, Homo sapiens
gtgtctctcttctttcttttttttctttttgagacagtcttggtctgtcgaccaggctagagtgcagtggtgcaatctcggctcactgcaacctctgcctcccaagatcaagggattctcctgcctcagcctcctgagtagctgggattataggcatgcaccaccatgcccagctaattgttttgtatttttagtagagacagggtttcaccgtgttagtcaggctggtctcaaactcctgaccttgtgatccgcctgccttggcctcccaaagtgctgggattacaggcacgagccaccatctcttctttccactcctgatcaatcttgacaaaatataaaaccaaaccaagacaaatcaactttgtaaaataaagataaagttggaggtctcacactttctgatttcaaaacttactatgatgtggcgttggaataaagacaaacatatagaccaatggaacagaatagagagcccaaaaataaaccctcaacatatatggttaaatgatttcaacaagggtgccaagatcattcagtgggaaaaggacagtctcttccacagatggtggatctccacatgcagaagaatgtagctggacccataccttacaccaaatgtttgttgtgagtttatttacttttttgtgtgtgtggagacagggtcgtgctatgttgtccaggctgatctagaactccttacctagagacactgccaaggtaagtgagggccaagtggacactgagtgattctgtgcctcactgagcaaaaataactaaacatgggcgaaggagagcccaatgatcccagggacaaaatgtcatcacgggcattctgcgcacgcttgccaggatacaggagaagcaaccagacacttcattcatcttctcagaatgttcattaacatgttcagaaaggtggaaaaccttacttgctaaagagaaggaaattggaggcatggccaaaagtattcaaggccctttatgaaaaagaaatgaaaactgatatccctcctaaaagagaagtaaaacagaaattcagagattctaatgcacccgaaaggcctcctttgggctttcactttgtgttctgagtactgccctcaaatcaaaggagatcccggtctgtccactggcagtgatgccaagaacctgggagggacatgagtgaccatgctgcagatggcaagcagcccaaaaagaaggcttctcaactgaaggaaaagtaccaagagcagaatgctgcatatccagccaaaggaaagctgatgtggcaaaaatgatgctgtcaaggccgaaaaaggcaagaaaaaaaaacaaagcggagaaagacagagaaggtaaggaaaataaaaaatgaagtcgatgataatgacaaataaggtggttctatggcagcttttttttttttctcttgtctataaagcatttaacctacctggacacagctcattccttttaaagaaaaaaattgaaatgtaaagccacctaagatttatttgtaaactgcatgatggcgttctttttctgtttttgtattattaacaagaattatcaagtaattcttcagacaaccctgtcctggtggtattttgtatagccaccaactttgcctggtatactataggggttataaatcagcatgggaatttcaaatttaaggcacagtataagttagttatatacaaatgtgaagtaacattattaattaaactgttggcctgtgcgaagggagggccaactgtgggattcagtcattcattcaacaaatattggtgagtgcctgacactgttccaggcactgaggctattgcaacaaaacagacacaagctcctgccctcatggagcttacattctggtgagggatacagagccaccaaaaaggatggcagctgggccatgagaaaggatcaaagtcaggaagttagaattcggggatggattgaacatgggacaaaagagaagagtcaagttgactacaaagcatttggcctaagtaatgcaaagaatggtgggccatttcctgagatgggaagcactagggtagttttggacataaatggagatgcatataagccatccaaactgaaatattgagaaggcagtaggtgatagttggctttccttaggttctagggcaggaattcttaaccttttgtgtgtgtgcctaggacccctttggtggtccatgaagccctttccagaataaatattgtggaggaacctaccttaatgcaatagtagcttctaggtacattatcaggcaaactatcccacaagttacaaaacagaaagcctcacagaccaaattatgatgcttgaattgcagggtttattgaatcagtttaaaaccacttacagcaagaactcgatggggtgcataacatacacaggatagggtacaggcgaggcagatggaccacaccaccagaacctagaattagggaatcctcccctcccctcccctcccacccctccccccttccccctcccctcccctcccctcctcccctcctctcccatcctcccctcccctcccatcctcccctcccctccccttttctcttcttttctttttttgagactgtctcactatgttgcccaggctggagtgcaatggcgtgatctcggctcactgcaacttccacctcctgggttcaagcgattctcatgcctcagcctcccgagtagctgggattacaggcacgcaccacaatgcccagctaatttttgtattcttagtagagacggggtttcaccatgttgaccaggctggttttgaactcctgaccttaggtgatccacccgcctcagattcccaaagcgctgggattacaggcatgagccactgcacctggctaatattgatatgttttccctctctctgccgcatcagcctgtcccactgacagagttgaggatgctcaaggcggctcaacagagggtacctggagcaactcacactgcactatcagagagacacaagtgcaagcacactcagccacagctgcagctcaccaatcagcctgctgaacagacctgaactttagctgcatttttggggcagagcatatgggtgccaggatgggaccataatcttatcaccaatgagtggccatttagggatgatatagttgtcaacccagagatggcatgatcatgccttttgacttggtcattctctaagtaaaacttttatttgttccatcatattttccacttattctgtttaccttcaaaatatcttttttttttttttttgagacagggtcacactgtcacccaggctagagtccagtggcactatcatggctcaccacagcctcaaccttcagggctcaggtgatcctcccacttcagcctcccgagtagatgggactacaggcacctgccaccacccccagctaatttttgtagagacaaggttttgccatgttgtccaggctggtcttgaactcctgggctcaagggatccggccacctcagcctcccaaagtgctaggattataggcatgagccactgtgcccagcctaccttcaacgtatctaactggttactaacttttaggattcggcctatgtctcacaaccttcttgcttactcaacatccttgtctcttaagccactagcttcttctctatggttaacactttttatgagttttattcatctgcttatttttcttatcctctataccagaattgaatattttcaaataaagcacactcatgttacaatctttgaaatgaaaaaaaaaaatgcataggattagaaaagaaaccaattttaataaactatattttgaagtatagttctatattaaacaacaagatctaggccaggtgcagtggctcatgcctgtaatcccagcaatttgggaagtcgaggtgggaggattgcttgaggccaggggttcaagaccagcctgggcaacatggagagattccccatctctttctttacacacacacacacacacacacacaaaatatctgatagcaacaggtgcagtcattaccacaatttcgagtagtgatgagcttaataatatttcgagttatcaccaacaactgtaaagtaacatgaaaacgtctgtgatgactattgcccacaaagtcacaggtactgctaatactcctggtatttgtagtcaaattcataataaaggaaatgctaggtttcagttggtattttgtcccgacggtctgtggacggcaggttagaacgcccgtccaagccaggagggtggacctagcactgcagggtccacctcgggccaatcaactatattcccgaggcgggggcctgcgcttcccggacccagctgccctcaggggagagaggacacacttaagagtttggggccggcgtggtagctcatgcccctgatcccagcacttcgggaggctgaggcgtgaagatcacttgtagcaggagtttgagaccagtctagccaacttggcgagaccctgtccctaaaaaaaatttttttttaattagccagttgtggtgagcgcctgtagtcccagctactcgggaggctgaggtgggaggatcgctgggctcaggagttccagactgcagtgagccatgatggcggcactgcactccagcgcggtgagactcagtctcaaaaataaaagggggaggggttgggggtaaaattagttgtgaaatcaagtaagacttcctgggacagaacaatcaaaggggtggcgccgggtcctccaaagagctactagctcagcccaagccccgcctcggcccccagggcagcggcccgcagagctccacccggcaggcgcccgggaaactccgccccccggccggcagggggcgcgcgcgccgccggccccgccccgtggacgcgggttccgtgggcgttcccgcggccaggcatcagcaatctatcagggaacggcggtggccggtgcggcgtgttcggtggcggctctggccgctcaggcgcctgcggctgggtgagcgcacgcgaggcggcgaggcggcagcgtgtttctaggtcgtggcgtcgggcttccggagctttggcggcagctaggggaggatggcggagtcttcggataagctctatcgagtcgagtacgccaagagcgggcgcgcctcttgcaagaaatgcagcgagagcatccccaaggactcgctccggatggccatcatggtgcaggtgcgggccgctgtgcgggcggcggggcggggacgcggcgccccgggttaactgtgtccgggaaggctgggggagggcgggcccagggagcgagcgggcccgggccctcggagcggcacttggggcctatggggccgcggccgcccctcctcccgagcggcccggccgacccttccggaaggttttgctgatgttgcaggaaaagcccgggaaataaagtctgcagctggtgttgcctttcgctttgtgaaaacgaggagcctcttctcttctcctttctgggtggcggtgttttattactgccgttcgcctcaggggttgggggggaattgtacatggtctctttaagctaatctgattttgacctatcttgttctggagggtttttgttctacatggatggtggcgactgacatgtgggttttttttttttttgttaaacctatttttggcagtcatttcaacacgtcatttaaacgctcactctcattttttattttaattaggcagaactatgcagaaaggtgtcatttctgtacagtacattcactttgagcctaatttgtgctttaaagtaacattttccccaaattttccagattcacagacgcgttctcttggtgcatttgcagctgtctggtttgagtaagagtggctccaggggggtttctcatgtgggctttttgatagattgaatccccttctgaggtttcctgagccttctgtgaggtggtgggcttgaaggcccctgtcatttcccaggggctcctgcctccagcttccagtttgccgatgtctacctttgtattaata

SEQ ID NO: 2680 - DNA, 6000 bp, Homo sapiens
gcctggccgggcatggtggctcacgcctgtaatctcagcactttgggaggccgaggcgggtggatcacctgagatcaggagttcgagaccagcctggccaacatgttgaaaccccatctctactaaaaataaaaaaattagccgggcatggtggcgggcccctgtaatcccagctactcaggaggctgagacaggagaatggcttgaacccaggaggcagagattgtagcgagcagagatcacgccactgcactccagcttgggcgatatgggaagactctgtctcaaaaaaaaaaaaaaaggccaagccttgtcatttagttcctaggtcttgtggcctacattttattttctttatttagagatgtgcagatggtataaaatctacttttttataataaattcacattttgtacctctgaaattttccattcgagggaattttaaaaaattgagatctgatttattcacaattctgacggtaagcagaacacttacttaatttagcaaacagcttcctaagtatcctccccacataaataaaacaaaaaactagggtcttcaaagaatatttcagtaacaagaatataaaaatattgaataccaactaaagaagagcaatagatataatatcttaatatcacttttatccagtgtaagacaatttttaagctttatttttatgaaacatttcagattccctcatatcacagcacatcaataagcagtatgtacatagactgacttttatagtacatgtcatgtcccaaattcccaatcctaggtaagatatcaagttacaaaatacaagtgccgataattaaactataggtagtatattaaacaaaaatgagtttttagcaattatgtgaaataaggctttaaccaaagcaagacttaatgccacaaggtgtcttttttccccaagagtaattaattcaatcaagcccatgattccaagctcaagtaacaagttttatattcttgaagcaaacaagaaaaggcaatcaatgcttaagtggtatattttagtatatattacatttctggacaatctctcattgcattcaatttttagaacttgtcttgggtctaataaaacagaagaattagagaagaaagcccatgccactttgaggaatgtaacataattgttttgtctgggtacaaaggtacgttacaacactgggggtctttagtcaagttcccatactaattgactcaccaaagcatacttccttcagctacaactgtaattggaacacacagattttacctgaagaaaatcctgtacttccagttttaaaaagcagacaattctatgaagaagcaaccatttaaatatctaactatacacattcaagtttttacaacttcatgccttatgaggaattttgatttcagaagtatcattccacagactcagcatcatatatttatacatatttcatacagtatagtattagaaactgtaaatggcacagaataatcataattatcacaaaattttatcaatttccagtgatcttaaaaagacaaattataaccgcctttgctcagctaagatatccagttatggttacaactttcgaaaatcctaaagttatgtgaaaaaaattagtcaaagaaaatctgtaaatctgatactttccaatattttaaatatgcacagctaaagagaaaataaaggggttgatctggcacatgaataattaagtcaatgaattttacaaccctgagccactttggcaactactttaggtttcacataattttcacagtcttagtaccaccattttcattcagataaaagaaatgaccttttgaaatcatgggcatcaaatttggtgcttatggacaagaatcacaactagaagctagagacaaaatggatcacagcaagcacagtttccctcaaagaataaggaacgctatagaatatacaacagcgatagtttagaaaccttgggaagctcacatttctttagttattttgttttactaaacaatttgaagtaagcattatattcatgtttaaaaacaaagcaaggaaaaataaaaaatgaaacaaaaatgcagcatggaacattttaggagtcacagaaggttctcttcttccctttgttttgggcacattgtctcacctgttttcactttgttacaaaaggaaacaaaaccaaatctctgctcagagtggtcatagtgagaacactgagatttgcatatgtttttctactttcccatccatctagaccctgaaatctaaataaatatttcagttaaaactttttttccatttgcatgaagtctgggtcactatatctcctaccctgaatgggggaagatgggacagctatatctcatactgaagcggtggcagctaaaacctggcaactgctgccagtgtccccaatgtgtcttgcttattattttttaaaatgtgacaaagacaaaagctacagctggaaactcacacaatttagaaatatgttgaaaacttttattatagtccttaggatttccaagtaaatgctcccaaatcaagtattacaaagctgctaattaattagcaactgaaaattagccattcaaattatattggaaatatttgctgaattgtttttatgaaagcttcctcttggattctgtaaggatcagagtatctgaatccacaaaccagctagtttcaagaaagaattcttttgactaaaacttaccttaaaaccaattttcccaactcttttccttttcccaaatagtccaacgttttgaggagaaatatatgaggcaggttgttttatacggcactgtaccctttaggaaacctaacatttcagtgaactgggaaacttcacaacataaactctatgtatttatagatattatgactgctgtataatatatactgtggggaaaaaaaaaaagaagaaagaaaagactagcctgggcaacatggcgaaaccccatctctacaaaaaatacaaaaattagctgggtatggtggtgcctgcctgtggttcctgctacatgggaggctgaggtgggaggactacctgggcccgggaggtcaaggctgcagtgagtcgagactttgccactgcactccagcctgtgcgacggggtgagaccctgtctcaaaaaaaaaaaagaaaaaagaaaagttttatcaaaggataaaaccgaaatgctatagtatatagtgtgaccataatttcagaagaagagaattagcataatttaaaaggatagctagcatactatacgttttaataattccagtatttttgttacttgggcttaatttaacttattttcctctttttgatttttgtatttttaagagggcacttttaattttcaagttgtgtttgaaactatagagtatgctaatacaacttaatataaatataaataatatataagctctctctctgcatatatacacatataaacagacccaagcattagaccactgatgttgtactttcaggattcacacgaataagtctagatgcattcctcagatcttggagttgcttggcaggtttccccacaccttcttcaaaccttttctccaccacagggaggactgtttcatataaaaaggatgcattctgtctgataaaagctttcttctctggatcctgctcacatcgaagactataatccacatgctgaacagcaaccaaaatgatttccaccaggctctccaaaagtaccatgtgcagctctgggaaatacagcttcagggcctcttccaagaagcccatggtctgtttggtgaaagcaaccactgtgtaacttaggttcacccagcagtcatcccctgtgtactgctcaaagttacttaccccacaacttttcatctcttctttgagcttacccagggcttctggcgtcatcaagttcatcctcctccacatctcttcagagttgcgatgtttagtggcttcaatgatgatttctttgtaactgtgcaaggccccttggatgtctttcaccagaagggcatggatgatgaaggtgagatccagtccgatatcacccagttgctggcaatgctccttagccacttttacacactcagctgctgtagagaggctctccttactatcaaacacctgcttgctaaaagcatccacgaacatgcccatggctgatcttgcccagaccacaaaggcagagtagcagccgctgtcagtgcctgcaaaatcgatctcaaattctcttgcagtctcgagaaggctggtaaagaagacatggcacagcttatgaatatagagtaaagtggcaccttcgatgcgaagctgacgaattgcagtatgaacagcggctgccctgtttctcaaaaatagctcacaggccttcgtgcactggcccagccggatcagttgcgaaactgctctgcgagtagccttcggaccacctctcagggaacgatctggggagagttcgaaaactagcacctcagtgagctgtcgaactcgctcctccactttggcccttagttcttttacaggaggtgggctaggtttatcttccaggtaatggttcaatttatccagcaggtcaaccgccccttcaaagtctctctgcgcaatgcagacatccaggtcttcaggtaactcctggatccattccatggagaggtccaccttctcttcctctacctcaggaacagctggttcttcttcttcgtcatcctcaaatgggttagtggccttggaagtcacttggggtggccctcgaggggccgctgcctcctcctgctcccttcgccttttctcactgagggccctcttggtgtcctccagcacttccagccactctcgtttgattttagcattttcggcctggaaaatacggctctcggggaacataagcagcttgaacatgtccttcatgggcgggttgtccttgacattgactacggccaaaccatctagggaatagagagcgttgtagcgatacatcccacgccgctgaggcagccaggtagccaccaacaagcaatcgttcatgagaaagccgtgcacccgctgcagttgggccatgtggtccgcatcgtattccactaggtccccattgtacaccaagtactgtcccggcgtctccagcagatgcctgcagccttccaccttctcaagcagggtggtgagagtgcgctgctttccttcctcgcctggaccggagccgtcgcgggaggcacccccgggggtggagaaaaagccggcctggcctcggaggtggtctcggccccccgccccaccgactccctcctcccctccagaggcggcggcggctccggcggcagcagcggcaggcagcaacgtaagcgggatgctctccaggctgcttttctgctcggtcagcaaatggctgagctggtacatctcgctctccaggtaggagatctcgcgggccgtctctatgaactgccggtagttctggtagacgttgcgcttcaggttctgcgccgtctcctccgccagcgcctggatgcgctgccggtgctcctggaggtcccggtccccatccgactgctgcgagagctgcttcacgtacagccgcgcctcaaaaccccctgactccagctgccgacgcaggcggctcgccccactgtccgacatcgccatcgccatttctctccgggtctcacgcactcactgtcactatcggcgccgcagccgccgcggctgtctagacccacccaaggccaaccgagctcctgggctgaggaagcaggaatgggaacgagacgagtacgcctgcgccgggtctgagcgtcagacactgcgcctgcgcaagtgggccgagcgcagacattgcgcctgcgcagcaatgccatcggttaaagcgcatgcgcaagatgagctattgcggaagtgaggggagggagaggccgagagaaatttcggtactgcgcatgaaccgagcgtgacgttgaggtttgaaataaccggcaaagagtaaaggctgaaactagcttcctgaaagctt

SEQ ID NO: 2681 - DNA, 6000 bp, Homo sapiens
agtggagatgcgccactgtactccagcctgggcaacagagcgagactccatctcaaaaaaaaaataaataaatatagtcctggccgggcatggtggctcatacctgtaatcccattcactttgggaggctgaggcagaaggatcacctggggtcaggagtttgagaccagccaacatggtgaaaccccgcctctactaaaaatacaaaaatcagccaggcgtggtggcgcacacctttaatcgcagctacttgggaggctgaggtaggaggatcccttgaaccagggaggcggaggctgcagtgagccgagatcatatcattgcactccagcctgggcaacaagagcaaaactccatctcaaaaaacaaaaaataaaaataaataaataaataaaaatatggtcttataatcttatgggaccactgttatatatggggcctgtcattgacgaaaatgtcattttgtaactttctgccaacaggaaatgctcacttgatactattatacattccccattctcttctcacccactacttaaaaacatttttttctcatgtgtttatgtaatcatttacccaatacatattcattaagcaactcttccagttagggctccttctaaggctgatttggttaatcatgctgttcaactttttaaaatgtgtattatttttttccgcttattcattgggttactaagaaggttgtgttaacattcttcaagtatgagtctgggtgtcttggctgacacctgtaatcccagcactttgggaggctgaggcgggaggattgcttgggcctgggaggttgaggctgtagtgagacagggtcttgctctgtcaccccaggctgtagtgctgtggtgtgatctcggctcactgtaacctccacctcccgagttcatgcgattcttgtgcgtcagcctcctgagtagctggtactacaggctgtgtcaccacacgcagctaatttttgtatttttagtagagacggggtttcaccatgttggtcaggctggtctcaaactcctggcctcaagtgatccgcctgtctcagcttcccaaagtgctgggattatgggcgtgagccaccgcacccagcctgattgtatattctttttgcttctgctaatttatgcctcataaaatttaaagttatgttattacttttggagagattatgtattgttgcttaatagattattttattattataaaatatcccacttttcctctagtaaaacttcttcccttgaagtctttagtctgatactaatactggttgaacatccctaatttgacaatccaaaatctgaaatgctccaaaatctaaaactttttgagcacttacaagatgattaaaggttaagttctaaggaaatgctcactaaagccatttcagatttgggacttttggattagggaagctcaaccagtaagtataatgcaaatattccaaagtaaaaaaaaaaaaaatctgaaacacttctggtcccactttggataatgagtactcaaccttatagccacaatagttttctgcttttaagtgtttggatgattacttttcctcatccttttaaacttaaaataagtgtgtctttactgtaagcatgtctcttttaatctagcatgccattccatgtatttaatggagtgtttagtccacttacatttaactgatattttgtttacacctacctttctctttatcatctgagctctgttctttttcattaatcaagtatttctactgtaccactttacatttagtagctactttttaaacaaactgtggtaaaaaaaattaacaaaattccccaacttacccatttttatgtgtacagttcagtgttgagtatattcacactgttatgtaatccattgccttttattatccttaaaaacagcatctctcatctccaagcatgttttaacatgcttcccaccccatgctcagaaactaccactgtgctcttttgtacagataattctttctttttttttttgagacagagtttcgctcttgttgcccaggctggaatgcaatggtacggtctcggctcactgcaacctccgcctcccgggttcaagagatcctcctgcctcagctcccactgctccattctgctagcagaagtaagtaccagctctaaatgtgaagcgtgccctcacactggtttgtgctgccagctcagctaggtgtcctgagagcacagcagtgttgcagcccaactgaggagaatcaaaatttgtgtttctcaacaggaacatgtggatcctgttttctctgtttctaaataagtaacttaagccagttacttaacctctctgaaccttaatttctttactcataaaaatgaaaacagcaacacatgaacataaacagggctgttgtaaaatcaaaacagataatatacctagaaggcttttatttttttgagacagagtcttgctctgtcacccaggctggagtgcagtggcgcgatctcggctcattgcaagctccgcctcctcagttcatgccattctcctgcctcagcctcccgagtagctgggactacaggcgccggccaccacgcccggctaattttctgtatttttttttttgtagagacggggtttcaccgtgttggctaggatgtttttgatcttctgacctcgtgatccgcccgcctcggcctcccaaagtgtcgggattacaggcgtgagccagcgtgcccggcccctagaagccttttttttgttttttttttttttactatgaagcactataaaaaacataaggtgttcattattgtttgccccataattcaagctttcactgagggcaaagtgactttttttaacgatacatacaggcgaattcacagcagtctaaatcattgacaagtatttgtaaattactgcgctaggaagcaagtttacacgaaaaatacctctacaagatcctttcttggcctcaacttcaaaaggggttcgctgagacggatggaacacattccacccttcccttcatagctgcatatcccagcacacctagaaaacaatcaccataaaaatgtgttacattggccaaatatgcccaagtccttacacattcttgggcagttcacactaactcagttggcagatggctttcatgaaagtataccccccttggttagcagatacttgcatttcacctaattaattagttacaacccccgcgggcgcctcccgcgatggctccgatccccgccgggcaaggaaggaaagcagcgtgctctcaccaccctgcttgagaaggtggaaggctgcaggcacctgctagagacgccaggaccgtacctggtgtacaacggggacctagtggaatacgatgcggaccacatggcccaactgcagctccccttgccctagctaggctgcaacagctcaaaggcaatcctattctgctactcccagtctccttccgacaagttacagttcggtgttattaacaagcagatatctccagtagcatatctccaaaatcataacagacgcctgtataaaggaaattggtactttaaacacaatttaatatcatatcttaatttgtttgacagtaggttgttttctatcaactcaaaaacaagcatgctgggatacaactgtatcttaaacttaaccctgttcacgtgcaggagtagattattatttcaaatagggatttctgaaatttagcgtgtagaaaaagaatcgttttaaaagcatcactgaagatccccaatgcaacacacgagctaactaaagtgggtttcctaacgggaatagaggaggagaacacacatcctttggcagttactctgcgtcctcagcactttcttaggtgcagatttggttgcttctcccttctgggtcctacagcactatcataaggcaaatcaggaacttgttattttcaagtgaagtgagattcaaataaaaatctcttttttgttacggccctgagtccaaccgtggcggtgtggtctacacagctttcttattgttcgagtgggagaaaaggtaaggaagacagaaacacgccgaggcaggaattgccaggtccaaaaccagactcccctcatttaacgccccctgggaccgtcggactagagaaaggagagaaaaccagggccgggggctgcaggaaagctgccagtcccgcctctttccccagcggggctcggaactcacagggtcattcgcacgctccacttcacctcgacggcctccagctggccccagaagaattggtcgttaaactgaacaaacagtgcctgcaagtccggtgtggggtccaccaactcccacgacgcgtccactagcgacagggactcctgggcatgatcgcgctccgcctcctgcaagttccactcctcctgaagccgcagtgccaacatcaagtcatcatccatcgttgccaggatcacaggcggggtccgccggcgtcaggctggctccccagttacgccgcgaccccaagccgcctagccgaggaccaggactagctcctaggagatgccggctctcgagacggcccgtcaatcccgcgagagttcgcggaaacgcgcttgagaacgagaacggagcttaccccaaacgccgaagccaagattctagggctttaaaaaaagcagtcagcatgacacctcctagtgggcgcagaacctgggctcacagggctcgggccctacgaagctttcaggaagctagtttcagcctttactctttgccggttatttcaaacctcaacgtcacgctcggttcatgcgcagtaccgaaatttctctcggcctctccctcccctcacttccgcaatagctcatcttgcgcatgcgctttaaccgatggcattgctgcgcaggcgcaatgtctgcgctcggcccacttgcgcaggcgcagtgtctgacgctcagacccggcgcaggcgtactcgtctcgttcccattcctgcttcctcagcccaggagctcggttggccttgggtgggtctagacagccgcggcggctgcggcgccgatagtgacagtgagtgcgtgagacccggagagaaatggcgatggcgatgtcggacagtggggcgagccgcctgcgtcggcagctggagtcagggggttttgaggcgcggctgtacgtgaagcagctctcgcagcagtcggatggggaccgggacctccaggagcaccggcagcgcatccaggcgctggcggaggagacggcgcagaacctgaagcgcaacgtctaccagaactaccggcagttcatagagacggcccgcgagatctcctacctggagagcgagatgtaccagctcagccatttgctgaccgagcagaaaagcagcctggagagcatcccgcttacgttgctgcctgccgctgctgccgccggagccgccgccgcctctggaggggaggagggagtcggtggggcggggggccgagaccacctccgaggccaggccggctttttctccacccccgggggtgcctcccgcgacggctccggtccaggcgaggaaggaaagcagcgcactctcaccaccctgcttgagaaggtggaaggctgcaggcatctgctggagacgccgggacagtacttggtgtacaatggggacctagtggaatacgatgcggaccacatggcccaactgcagcgggtgcacggctttctcatgaacgattgcttgttggtggctacctggctgcctcagcggcgtgggatgtatcgctacaacgctctctattccctagatggtttggccgtagtcaatgtcaaggacaacccgcccatgaaggacatgttcaagctgcttatgttccccgagagccgtattttccaggccgaaaatgctaaaatcaaacgagagtggctggaagtgctggaggacaccaagagggccctcagtgagaaaaggcgaagggagcaggaggaggcagcggcccctcgagggccaccccaagtgacttccaaggccactaacccatttga

SEQ ID NO: 2682 - DNA, 6000 bp, Homo sapiens
agcccatgattccaagctcaagtaacaagttttatattcttgaagcaaacaagaaaaggcaatcaatgcttaagtggtatattttagtatatattacatttctggacaatctctcattgcattcaatttttagaacttgtcttgggtctaataaaacagaagaattagagaagaaagcccatgccactttgaggaatgtaacataattgttttgtctgggtacaaaggtacgttacaacactgggggtctttagtcaagttcccatactaattgactcaccaaagcatacttccttcagctacaactgtaattggaacacacagattttacctgaagaaaatcctgtacttccagttttaaaaagcagacaattctatgaagaagcaaccatttaaatatctaactatacacattcaagtttttacaacttcatgccttatgaggaattttgatttcagaagtatcattccacagactcagcatcatatatttatacatatttcatacagtatagtattagaaactgtaaatggcacagaataatcataattatcacaaaattttatcaatttccagtgatcttaaaaagacaaattataaccgcctttgctcagctaagatatccagttatggttacaactttcgaaaatcctaaagttatgtgaaaaaaattagtcaaagaaaatctgtaaatctgatactttccaatattttaaatatgcacagctaaagagaaaataaaggggttgatctggcacatgaataattaagtcaatgaattttacaaccctgagccactttggcaactactttaggtttcacataattttcacagtcttagtaccaccattttcattcagataaaagaaatgaccttttgaaatcatgggcatcaaatttggtgcttatggacaagaatcacaactagaagctagagacaaaatggatcacagcaagcacagtttccctcaaagaataaggaacgctatagaatatacaacagcgatagtttagaaaccttgggaagctcacatttctttagttattttgttttactaaacaatttgaagtaagcattatattcatgtttaaaaacaaagcaaggaaaaataaaaaatgaaacaaaaatgcagcatggaacattttaggagtcacagaaggttctcttcttccctttgttttgggcacattgtctcacctgttttcactttgttacaaaaggaaacaaaaccaaatctctgctcagagtggtcatagtgagaacactgagatttgcatatgtttttctactttcccatccatctagaccctgaaatctaaataaatatttcagttaaaactttttttccatttgcatgaagtctgggtcactatatctcctaccctgaatgggggaagatgggacagctatatctcatactgaagcggtggcagctaaaacctggcaactgctgccagtgtccccaatgtgtcttgcttattattttttaaaatgtgacaaagacaaaagctacagctggaaactcacacaatttagaaatatgttgaaaacttttattatagtccttaggatttccaagtaaatgctcccaaatcaagtattacaaagctgctaattaattagcaactgaaaattagccattcaaattatattggaaatatttgctgaattgtttttatgaaagcttcctcttggattctgtaaggatcagagtatctgaatccacaaaccagctagtttcaagaaagaattcttttgactaaaacttaccttaaaaccaattttcccaactcttttccttttcccaaatagtccaacgttttgaggagaaatatatgaggcaggttgttttatacggcactgtaccctttaggaaacctaacatttcagtgaactgggaaacttcacaacataaactctatgtatttatagatattatgactgctgtataatatatactgtggggaaaaaaaaaaagaagaaagaaaagactagcctgggcaacatggcgaaaccccatctctacaaaaaatacaaaaattagctgggtatggtggtgcctgcctgtggttcctgctacatgggaggctgaggtgggaggactacctgggcccgggaggtcaaggctgcagtgagtcgagactttgccactgcactccagcctgtgcgacggggtgagaccctgtctcaaaaaaaaaaaagaaaaaagaaaagttttatcaaaggataaaaccgaaatgctatagtatatagtgtgaccataatttcagaagaagagaattagcataatttaaaaggatagctagcatactatacgttttaataattccagtatttttgttacttgggcttaatttaacttattttcctctttttgatttttgtatttttaagagggcacttttaattttcaagttgtgtttgaaactatagagtatgctaatacaacttaatataaatataaataatatataagctctctctctgcatatatacacatataaacagacccaagcattagaccactgatgttgtactttcaggattcacacgaataagtctagatgcattcctcagatcttggagttgcttggcaggtttccccacaccttcttcaaaccttttctccaccacagggaggactgtttcatataaaaaggatgcattctgtctgataaaagctttcttctctggatcctgctcacatcgaagactataatccacatgctgaacagcaaccaaaatgatttccaccaggctctccaaaagtaccatgtgcagctctgggaaatacagcttcagggcctcttccaagaagcccatggtctgtttggtgaaagcaaccactgtgtaacttaggttcacccagcagtcatcccctgtgtactgctcaaagttacttaccccacaacttttcatctcttctttgagcttacccagggcttctggcgtcatcaagttcatcctcctccacatctcttcagagttgcgatgtttagtggcttcaatgatgatttctttgtaactgtgcaaggccccttggatgtctttcaccagaagggcatggatgatgaaggtgagatccagtccgatatcacccagttgctggcaatgctccttagccacttttacacactcagctgctgtagagaggctctccttactatcaaacacctgcttgctaaaagcatccacgaacatgcccatggctgatcttgcccagaccacaaaggcagagtagcagccgctgtcagtgcctgcaaaatcgatctcaaattctcttgcagtctcgagaaggctggtaaagaagacatggcacagcttatgaatatagagtaaagtggcaccttcgatgcgaagctgacgaattgcagtatgaacagcggctgccctgtttctcaaaaatagctcacaggccttcgtgcactggcccagccggatcagttgcgaaactgctctgcgagtagccttcggaccacctctcagggaacgatctggggagagttcgaaaactagcacctcagtgagctgtcgaactcgctcctccactttggcccttagttcttttacaggaggtgggctaggtttatcttccaggtaatggttcaatttatccagcaggtcaaccgccccttcaaagtctctctgcgcaatgcagacatccaggtcttcaggtaactcctggatccattccatggagaggtccaccttctcttcctctacctcaggaacagctggttcttcttcttcgtcatcctcaaatgggttagtggccttggaagtcacttggggtggccctcgaggggccgctgcctcctcctgctcccttcgccttttctcactgagggccctcttggtgtcctccagcacttccagccactctcgtttgattttagcattttcggcctggaaaatacggctctcggggaacataagcagcttgaacatgtccttcatgggcgggttgtccttgacattgactacggccaaaccatctagggaatagagagcgttgtagcgatacatcccacgccgctgaggcagccaggtagccaccaacaagcaatcgttcatgagaaagccgtgcacccgctgcagttgggccatgtggtccgcatcgtattccactaggtccccattgtacaccaagtactgtcccggcgtctccagcagatgcctgcagccttccaccttctcaagcagggtggtgagagtgcgctgctttccttcctcgcctggaccggagccgtcgcgggaggcacccccgggggtggagaaaaagccggcctggcctcggaggtggtctcggccccccgccccaccgactccctcctcccctccagaggcggcggcggctccggcggcagcagcggcaggcagcaacgtaagcgggatgctctccaggctgcttttctgctcggtcagcaaatggctgagctggtacatctcgctctccaggtaggagatctcgcgggccgtctctatgaactgccggtagttctggtagacgttgcgcttcaggttctgcgccgtctcctccgccagcgcctggatgcgctgccggtgctcctggaggtcccggtccccatccgactgctgcgagagctgcttcacgtacagccgcgcctcaaaaccccctgactccagctgccgacgcaggcggctcgccccactgtccgacatcgccatcgccatttctctccgggtctcacgcactcactgtcactatcggcgccgcagccgccgcggctgtctagacccacccaaggccaaccgagctcctgggctgaggaagcaggaatgggaacgagacgagtacgcctgcgccgggtctgagcgtcagacactgcgcctgcgcaagtgggccgagcgcagacattgcgcctgcgcagcaatgccatcggttaaagcgcatgcgcaagatgagctattgcggaagtgaggggagggagaggccgagagaaatttcggtactgcgcatgaaccgagcgtgacgttgaggtttgaaataaccggcaaagagtaaaggctgaaactagcttcctgaaagcttcgtagggcccgagccctgtgagcccaggttctgcgcccactaggaggtgtcatgctgactgctttttttaaagccctagaatcttggcttcggcgtttggggtaagctccgttctcgttctcaagcgcgtttccgcgaactctcgcgggattgacgggccgtctcgagagccggcatctcctaggagctagtcctggtcctcggctaggcggcttggggtcgcggcgtaactggggagccagcctgacgccggcggaccccgcctgtgatcctggcaacgatggatgatgacttgatgttggcactgcggcttcaggaggagtggaacttgcaggaggcggagcgcgatcatgcccaggagtccctgtcgctagtggacgcgtcgtgggagttggtggaccccacaccggacttgcaggcactgtttgttcagtttaacgaccaattcttctggggccagctggaggccgtcgaggtgaagtggagcgtgcgaatgaccctgtgagttccgagccccgctggggaaagaggcgggactggcagctttcctgcagcccccggccctggttttctctcctttctctagtccgacggtcccagggggcgttaaatgaggggagtctggttttggacctggcaattcctgcctcggcgtgtttctgtcttccttaccttttctcccactcgaacaataagaaagctgtgtagaccacaccgccacggttggactcagggccgtaacaaaaaagagatttttatttgaatctcacttcacttgaaaataacaagttcctgatttgccttatgatagtgctgtaggacccagaagggagaagcaaccaaatctgcacctaagaaagtgctgaggacgcagagtaactgccaaaggatgtgtgttctcctcctctattcccgttaggaaacccactttagttagctcgtgtg

SEQ ID NO: 2683 - DNA, 6000 bp, Homo sapiens
actaattgactcaccaaagcatacttccttcagctacaactgtaattggaacacacagattttacctgaagaaaatcctgtacttccagttttaaaaagcagacaattctatgaagaagcaaccatttaaatatctaactatacacattcaagtttttacaacttcatgccttatgaggaattttgatttcagaagtatcattccacagactcagcatcatatatttatacatatttcatacagtatagtattagaaactgtaaatggcacagaataatcataattatcacaaaattttatcaatttccagtgatcttaaaaagacaaattataaccgcctttgctcagctaagatatccagttatggttacaactttcgaaaatcctaaagttatgtgaaaaaaattagtcaaagaaaatctgtaaatctgatactttccaatattttaaatatgcacagctaaagagaaaataaaggggttgatctggcacatgaataattaagtcaatgaattttacaaccctgagccactttggcaactactttaggtttcacataattttcacagtcttagtaccaccattttcattcagataaaagaaatgaccttttgaaatcatgggcatcaaatttggtgcttatggacaagaatcacaactagaagctagagacaaaatggatcacagcaagcacagtttccctcaaagaataaggaacgctatagaatatacaacagcgatagtttagaaaccttgggaagctcacatttctttagttattttgttttactaaacaatttgaagtaagcattatattcatgtttaaaaacaaagcaaggaaaaataaaaaatgaaacaaaaatgcagcatggaacattttaggagtcacagaaggttctcttcttccctttgttttgggcacattgtctcacctgttttcactttgttacaaaaggaaacaaaaccaaatctctgctcagagtggtcatagtgagaacactgagatttgcatatgtttttctactttcccatccatctagaccctgaaatctaaataaatatttcagttaaaactttttttccatttgcatgaagtctgggtcactatatctcctaccctgaatgggggaagatgggacagctatatctcatactgaagcggtggcagctaaaacctggcaactgctgccagtgtccccaatgtgtcttgcttattattttttaaaatgtgacaaagacaaaagctacagctggaaactcacacaatttagaaatatgttgaaaacttttattatagtccttaggatttccaagtaaatgctcccaaatcaagtattacaaagctgctaattaattagcaactgaaaattagccattcaaattatattggaaatatttgctgaattgtttttatgaaagcttcctcttggattctgtaaggatcagagtatctgaatccacaaaccagctagtttcaagaaagaattcttttgactaaaacttaccttaaaaccaattttcccaactcttttccttttcccaaatagtccaacgttttgaggagaaatatatgaggcaggttgttttatacggcactgtaccctttaggaaacctaacatttcagtgaactgggaaacttcacaacataaactctatgtatttatagatattatgactgctgtataatatatactgtggggaaaaaaaaaaagaagaaagaaaagactagcctgggcaacatggcgaaaccccatctctacaaaaaatacaaaaattagctgggtatggtggtgcctgcctgtggttcctgctacatgggaggctgaggtgggaggactacctgggcccgggaggtcaaggctgcagtgagtcgagactttgccactgcactccagcctgtgcgacggggtgagaccctgtctcaaaaaaaaaaaagaaaaaagaaaagttttatcaaaggataaaaccgaaatgctatagtatatagtgtgaccataatttcagaagaagagaattagcataatttaaaaggatagctagcatactatacgttttaataattccagtatttttgttacttgggcttaatttaacttattttcctctttttgatttttgtatttttaagagggcacttttaattttcaagttgtgtttgaaactatagagtatgctaatacaacttaatataaatataaataatatataagctctctctctgcatatatacacatataaacagacccaagcattagaccactgatgttgtactttcaggattcacacgaataagtctagatgcattcctcagatcttggagttgcttggcaggtttccccacaccttcttcaaaccttttctccaccacagggaggactgtttcatataaaaaggatgcattctgtctgataaaagctttcttctctggatcctgctcacatcgaagactataatccacatgctgaacagcaaccaaaatgatttccaccaggctctccaaaagtaccatgtgcagctctgggaaatacagcttcagggcctcttccaagaagcccatggtctgtttggtgaaagcaaccactgtgtaacttaggttcacccagcagtcatcccctgtgtactgctcaaagttacttaccccacaacttttcatctcttctttgagcttacccagggcttctggcgtcatcaagttcatcctcctccacatctcttcagagttgcgatgtttagtggcttcaatgatgatttctttgtaactgtgcaaggccccttggatgtctttcaccagaagggcatggatgatgaaggtgagatccagtccgatatcacccagttgctggcaatgctccttagccacttttacacactcagctgctgtagagaggctctccttactatcaaacacctgcttgctaaaagcatccacgaacatgcccatggctgatcttgcccagaccacaaaggcagagtagcagccgctgtcagtgcctgcaaaatcgatctcaaattctcttgcagtctcgagaaggctggtaaagaagacatggcacagcttatgaatatagagtaaagtggcaccttcgatgcgaagctgacgaattgcagtatgaacagcggctgccctgtttctcaaaaatagctcacaggccttcgtgcactggcccagccggatcagttgcgaaactgctctgcgagtagccttcggaccacctctcagggaacgatctggggagagttcgaaaactagcacctcagtgagctgtcgaactcgctcctccactttggcccttagttcttttacaggaggtgggctaggtttatcttccaggtaatggttcaatttatccagcaggtcaaccgccccttcaaagtctctctgcgcaatgcagacatccaggtcttcaggtaactcctggatccattccatggagaggtccaccttctcttcctctacctcaggaacagctggttcttcttcttcgtcatcctcaaatgggttagtggccttggaagtcacttggggtggccctcgaggggccgctgcctcctcctgctcccttcgccttttctcactgagggccctcttggtgtcctccagcacttccagccactctcgtttgattttagcattttcggcctggaaaatacggctctcggggaacataagcagcttgaacatgtccttcatgggcgggttgtccttgacattgactacggccaaaccatctagggaatagagagcgttgtagcgatacatcccacgccgctgaggcagccaggtagccaccaacaagcaatcgttcatgagaaagccgtgcacccgctgcagttgggccatgtggtccgcatcgtattccactaggtccccattgtacaccaagtactgtcccggcgtctccagcagatgcctgcagccttccaccttctcaagcagggtggtgagagtgcgctgctttccttcctcgcctggaccggagccgtcgcgggaggcacccccgggggtggagaaaaagccggcctggcctcggaggtggtctcggccccccgccccaccgactccctcctcccctccagaggcggcggcggctccggcggcagcagcggcaggcagcaacgtaagcgggatgctctccaggctgcttttctgctcggtcagcaaatggctgagctggtacatctcgctctccaggtaggagatctcgcgggccgtctctatgaactgccggtagttctggtagacgttgcgcttcaggttctgcgccgtctcctccgccagcgcctggatgcgctgccggtgctcctggaggtcccggtccccatccgactgctgcgagagctgcttcacgtacagccgcgcctcaaaaccccctgactccagctgccgacgcaggcggctcgccccactgtccgacatcgccatcgccatttctctccgggtctcacgcactcactgtcactatcggcgccgcagccgccgcggctgtctagacccacccaaggccaaccgagctcctgggctgaggaagcaggaatgggaacgagacgagtacgcctgcgccgggtctgagcgtcagacactgcgcctgcgcaagtgggccgagcgcagacattgcgcctgcgcagcaatgccatcggttaaagcgcatgcgcaagatgagctattgcggaagtgaggggagggagaggccgagagaaatttcggtactgcgcatgaaccgagcgtgacgttgaggtttgaaataaccggcaaagagtaaaggctgaaactagcttcctgaaagcttcgtagggcccgagccctgtgagcccaggttctgcgcccactaggaggtgtcatgctgactgctttttttaaagccctagaatcttggcttcggcgtttggggtaagctccgttctcgttctcaagcgcgtttccgcgaactctcgcgggattgacgggccgtctcgagagccggcatctcctaggagctagtcctggtcctcggctaggcggcttggggtcgcggcgtaactggggagccagcctgacgccggcggaccccgcctgtgatcctggcaacgatggatgatgacttgatgttggcactgcggcttcaggaggagtggaacttgcaggaggcggagcgcgatcatgcccaggagtccctgtcgctagtggacgcgtcgtgggagttggtggaccccacaccggacttgcaggcactgtttgttcagtttaacgaccaattcttctggggccagctggaggccgtcgaggtgaagtggagcgtgcgaatgaccctgtgagttccgagccccgctggggaaagaggcgggactggcagctttcctgcagcccccggccctggttttctctcctttctctagtccgacggtcccagggggcgttaaatgaggggagtctggttttggacctggcaattcctgcctcggcgtgtttctgtcttccttaccttttctcccactcgaacaataagaaagctgtgtagaccacaccgccacggttggactcagggccgtaacaaaaaagagatttttatttgaatctcacttcacttgaaaataacaagttcctgatttgccttatgatagtgctgtaggacccagaagggagaagcaaccaaatctgcacctaagaaagtgctgaggacgcagagtaactgccaaaggatgtgtgttctcctcctctattcccgttaggaaacccactttagttagctcgtgtgttgcattggggatcttcagtgatgcttttaaaacgattctttttctacacgctaaatttcagaaatccctatttgaaataataatctactcctgcacgtgaacagggttaagtttaagatacagttgtatcccagcatgcttgtttttgagttgatagaaaacaacctactgtcaaacaaattaagatatgatattaaattgtgtttaaagtaccaatttcctttatacaggcgtctgttatgattttggagatatgctactggag

SEQ ID NO: 2684 - DNA, 6000 bp, Homo sapiens
ttattttccccagagtcagttttagtctaatcaatttccagaaatctcaaatgcaatttgactgttgtgggggtagtgggtgaggaaaaggccttaaggaaaatgtagaaggacagaagtattagggagaagaggggaagaaaagacgaagaaatttccagattactggttcttctcttatttcctgagagcaccaaattcattttcttaaagatagactgttctctcctaagataatttattttaacttattcaccaatttatcctttttagagagatttaggctggcagggcagaagaacaacagtccttggtctggctgtctctcaggttcattattttctcagaacaaagtgtggaaaatgatggcaccatgctgatggtatcttttcataaaatactgctagtcatgtcagcattagtgccagtatttcagggttatgaaaataaatgtgaccagttttgtcatcttgttccagtgttgcagctacgaaacctgacagcttgaagttccaaaccaagtactgtggcttctctccaggcctcttgtgtcaaaccagtcaccaaagctgtcaaagccaaacacgcatggcccttaccagagctcccaatccaactgccacagggtgaatcctgctctactgtgacatgttcttgctctggctgggggaaattcaaattctggcattactgtcctcattctcaattctggttactttcctaagttaaagggagttaaggctgggcgctgtggttcacacctgtaatcccagcacttcgggaggccgaggcaggttgatcccctgaggtaaggagttcgagaccagcctggcctacatgatgaaaccctaactctactaaaatacaaaattagccaggcatggtggtgggtgcctgtaatcccagctacttgggaggctgaggcaggagaatcgcttgaacctgggaggtggaagttgcagtgagccaagacctcgccccgcactctggcctggataacaagagcagaactcatctccaaaaaaaaaaaattaataaataaagggagttaaatatagtgcaataaatttttgccagaacaaccctaattttcatcagtaagggagtggttaattaaattatggtacataatgcagacactgtaagtcattaaaagagtgagttccatacctggttgatcctgaaataaaaaagaaataaagaaaaaaaaagagtgagttccatttacatgtactgacatcaaaagtcaagatgggttgttaaagtgaaaaggacaagtctattgtaaatggggtagttttcttgatttctttcttagatattagtgtatagaaatgtcactgattttgtatgtaaattttatatcctgcaacttggttgaatttgtatattagttttaactcatttttttagtggaatctttggagctttctatatataagaccatgttatctgcaaacaaggataatttatgtaactaaaactctatcactggtatctgtctgtcttctgtctggttggttatctctatttctacttcaaaatgaataaaaagagggcaggagaatttattggactgactaacagaaaagcttaaatgcacataaaatgaatttagcacataaatagacatatttagcatccaattttttagaaatgtaaaaataaatttggaagcaaaacatgaatggaatgtaaaacacttttggatggggggagcaggcagcctgccaatgcaataccagtgtaaagcaagccagctgagttaggaggggcctccaacagagtgaggcaaactgcctggcccattagaaggtgactcttcccaacagtgatgacatgctcagcgttctccaccttgacaatagcagaaggtttgtcatcttttgctgacagtcagttcattactgagtcatattctattaaatccagtggtgctctcatacctttttttcccttccttttattaagagacagtgagagttctttcatctccggctgaggagaaatcagaagcaggcaagcgtgatcactgtccattagcagcagcatttgctggcagcaagagggggaaggggtcctctgttctcctgagctgctgcagccgtgggcttaaaggacgtgcccacataacttgattgatcatctcagtcacaattttaagattttagcctggaagttcaatgtaggtgccatcatatgaaagatttaacagatgttaatatccataacgttcatgttcattatatgtatttgactcttaactaggttttctaattttcctttttaacgtattctagatattaatctcttggttttttttaacttttaagtttaggggtagaagtgcaagtttgttacataggtaaacttgtgtcatggaggtttgttgtacagattattttatcacccaggtaattttcttaataactgccaagagctcattattctttttttctgataatctccctctctctctctctctctctctctctcccctcttttcctcacccccaacccttactattttaatatatacccaacctttactctgtattccagatgtttattctgtaaataatggttctatgtacaacaaagataagttttgcaactttactctgtaaataatggttctatgtacaacaaagataagttttgcaactttactcttagtatattcttacttcctaaaaatgaagacagaaaaagttttaaatgctattattatcacatgatgtgactgtaatacctggaaatcccaagagaagtaactcaaaagcattataaacaagaaaaaaaaatcagtaaactggctaggtaaaaagttagtgtaaaataaagtagtagctttccaatatacaaacaacaatcaaatgataaatataatttaacaaaagatgtacataacagtgattaaaatattcttaggaatatatttaacaataaacatgcaagatctgtattaaataattttaatcctgtataaaattttaaaatcttcataattttgtttttttaatttaaaaaggtaaagtgagagtctgggtacggtggctcatgcctataatcccagcactttgggaggctgagtcaaggggatcacctgaggtcaggtgttcaagaccagcctggtcgacatggtgaaaccccatctctactaaaaatacaaaaattagcccggcatggtggcacaggactgtagtcccagctactcagaggctaaggcaagagaatcacttgaacccgggaggcagaggttacagtgagctgagatcgtgtcactgcacttcagacatcagagcaagactccgtctcgaaataaaataaaaatgtaaacagagataaacaagacttaaaaagaacttaattgggttttgatgcaggagtcttagtattattatataatgacaaacatcctccctaaactaatatatacattttaagtgatcactaaaaataagaacaaaccttttaatgtaagctgttttaaagttcataggagaataataataatatttatgattttcagaaaaaaatattctaaaaaagggggtactagtcctctcgaaagttaaacatattataaagcaatagtagccaaaatgtctagtgtatcaatagatataaagaccaatcaacaggctggacacagtggctcacacctgtaatcccagcactttgggaggcctatgcaggcagatcacctgaggccaggagttcaagaccagcctggccaactaaaaatacaaaaaaaattagctgggcgtggtgttgcgtgtctgtaatcccagctattgggaagtgctgaggcaggaggatcacttgagccccgcaggctgaggctgcaatgggccaagatcgtgcaactgcactccagcctgggcaacagagtgagactccatcgccaaaaaaaaaaacaaccaattaacaaaagagtctagacagacgtacatgcatataggaaggcagattatcagaaatggccccttcaaatcaatgggaaagaagaactgtcaagacctaaattggatattattgaggaaccatctggagaaggaaaataattctagatatcaacctcatacatatcaagaaattcatcatttcttacatcaaaatgaattttagctgcatcaaagatttaaaagtaaaataaaaattggctacttaaaatgtttaaattcctgctaataaactcaggaaaataatttttataccacataaaacagacaatgggctaatttctatgttacataaggatctacaaatactttttgtaagttttacaatcaaaataggtaaacaggaaaatgggcaaaagcacgataatccattcacagaaaatacaaatagttttaaaacagaaagatgtcaaacttttacccacaataggagaaatgcaaattaaaaccacaagattctttttttttctcctatcagattggaaaagaacaaaatatttgattaaaagcaatcttggggagaatgtggtgggaaaggcattccccttgggaatacagactggtactatcccagggaagggccattttggcagtatctatacacattaaaatgctcataccaggccaggcgtggtggctcatgcctgtaatcccagcactttgggaggccgaggcgggcagattacctgaggtcaggagtttgagaccagcctggccaagatggtgaaaccccgtctctactgaaaatacaaaaattagctgggcatagttgtgggcgcctgtaatcccagctactcaggaggctgaggcaggagaatcggttggaggcagaggttgcagtgagccgagatcatgtcattgcactccagcctgggcaacaagagcaaaactccatcacacacacacacacccctctctttcccatcttacaagacagcagatgaaacaattgagaagccagacacacacacacacacacacacacacacacacacacaaactctctttcccatcttacaagacagcaggtgaaacaattgagaagccagataccaaagagaagaaacccaaagccaagaaggctgatgctggtggtgaaaaagggtcacctcaagactaaaaagcccaagaaggggaagccccattgcagtgcaatcctgtccttgtcagaggaattggcaggtattcctgacctgccgtgtattccagaaaggccacgtataagaggaagtactcagccgctaaatccaaggttgaaaagaaaaagaaggagaaggtttttgcaactgttacaaaaccagttggtggtgacaagaacggtggtacccgggtggttaaacttcgcaaaatgcctagatattatcctactgaagatgtgcctggaaagctgctgagccatggcaacaaacccttcagtcagcacgtgagaaaactgcgagccagcattaccccggggaccattctgatcctcctcactggaggccacaggggcaagagggtggttttcctgaagcagctggctagtggcttattacttgtgactggacctctggccctcaatcgagttcctctatgaagaaaataccagaaatttgtcattgcgacttcaaccaaaattgatatcagcaatgtaaaaatcccagaacatcttagtgatgcttacttcaagaagaagctgtggaagttcagaccaggaaggtgagatcttcaacacagaaaaagagaaatacaagattacagagcagtgcaagattgatcagaaagctgtggactcacacattttacgaaaaaccaaagctattcctcagcatcaggtctacctgccatctgtgtttgcccggacaaatggaatttatcctcacaaattggcattctaaatgccttaagaacctaattaaatagctgactacaaaaaaacaaacaaaaacaggcaaacaaacaaaaaaacactcatacctttgacccatcaatttctcttctaggtttccattcctaaatcatatttccacaaagaaaatagaagtacacagaaaat

SEQ ID NO: 2685 - DNA, 6000 bp, Homo sapiens
tattataattcaagactctaatagtaacacttattatttagatagataggtactgtcgatgctaatatatcaatcacctccaagaaagctttgccaaagacctatgccagtttccctaaaatgtatattttggagccagagataatattttttagaagtgtcattctgcaaaaatgcatttcatagttttttttttttttggtgaaggacaaaaacagaggctatttaaaatcgttttccctctgcagtagggaatgaggacagcatttactctttctgcattctctgtcctagattattcaaataatactcatcctgataactttggagttgtttaatttcactgtaaaacagctttgaaaacagctatattgcccaaacatctaagttctaaaaacatcagtgtctcttttagatccaggctgttagctaatttcaatattcatttgtctattcaaccagaagtttactggagtttactatgtgccagacaatgttataggagataggtaaaaatccctgctcttatagagctttcattatagtgaggtgagagatgctcaattaacaaatagataactagaatatgtaatttgtccaattgtatgtatcatggagaaaaataaatcagggaaaggaaaattaggtatcccaaagtagggctaggaattgcaattttaaatagcataattggagaatatctcactgagaagaaacctatgtgtattactgagcgaagtaaaggaccaagctacggggctatctgttggaagagcattctgggaagaaggaacagcgtatgcaaagccctagaggtgggagtgtacctggcatattcaaagaatggcacggaggctagatggctaaagtagagtgggcaagagcaagaagagtgggagttgaagtcacatgcacatgaagttacaagaatgttcacagaagcagtagtaatagaatcttgaaaccactcagatatctatcaatagtggaatgaataaattataatgtacttacataatggaattctacattgaaatacaaacaaaaaacaaactataggtgctctcgataatacagatgaatctcacaaacatgatgttgagtaaaagaggccaaatgctaaaggataaaaactgcatcatttcttttatatacatttcacaaacgaggcaacacttgcagtaaaaaggcagattagtagttaggacagagatatctgattggaaacgagctacgaagtgtcttctgggagggaccaagtagaagcaatatatgttcattttgtgataatttgcttaggatttatgctttctgtatgtatgttttacatatataatataatgtaatagtaatacaatattactatttataatagtaaatggaggaatttgagacaggaagtacaggattttttttttcaaaaagttttacgataacaggagcagagaaatgaggggaatactgaagggttattttaaagatggaagaaatgactgttacggaaagctcacttactcatatttaccattgctgcaaaacacctgttctattgtttacttaatcgattttcaacttaaatttacttaaaaagcaagtttcatgttaacactgtgtcacttgccataatagaaataaccgtaaaaatacaatggacacaaagtcattcgattaaaataatttaaaaatgtaaaaataattgaatgcaatcaaaatcaatcaaattgagctgcaaaaatgagcgcctaaaaataagttacttaaacagaaaaccagagccgttgatgatcagtcagaagaaaaaggatattctgttccatatatatgtaatagtcaccagcactgtgcacaattccttcatcttcacctttacactgcatacatactgttttgaacacctatccacattcattttaacagaggagcaaaataaaaacctagtcccatatgaggtgacaagacgatgctgacttgcccaacacttgaggttgtcccttgttcccatgtctctgatttggagggaagttgagctttagaaaaagcttcctaatgctgctgactaaaaagaacccccactcctatgtctcttcttagaaattactggtgtatgcatcagtgtgtgtgtgtgtgtgtgtgtgtgtgtgtgtgtgcatgtgtgtgtgtggtggggaaggtgctgctcagctgtggttctagcaaccctgcctgaaaccaggcaaaggcaggaggccatctagagggcacccacaactctcactaggccccaagtcattggctaagttccacactgtagaaaacactgccctataacaatggagacagtatcttccaaattaaaaatcaggcaacctgatatttcaacaagatacagtatttaaagataagagctggccgggcacggtggctcacgcctgtaatcccagcactctgggaggctgaggcgggcggatcacctgaggttgggagttcgagaccagcctgaccaacatggagaaaccccgtctctacttaaaatacaaaattagccaggcgtggtggcgcatgcctgtaatcccagctacttgggaggctgaggcaggagaatcgcttgaacccaggaggcagaggttgcagtgagccgagatcgcaccattgcactccagcctgggcaacaggagcgaaactctgtcttaaaaaaaaataaaaataaaaataaaaaataaaaaaataaagataagagcagcccagaaaacccataataatagtgccatacctaggacattcatgtattagtccacacatttgaaatgtttaaaatcaacactagtgctactgggatgtgaaaattcatagacataatccctgccctcaaagtaaggttgccagataaaattacagaatgccaagataaatttaaatttcagataaacagggatttcttttagtatatgtctcaaatattgcattagatatattaaaaatttatctgttgttcatctgaaattcaaatttctgggtgtcctacgttattatttgctaaatctggcaaccctacctcaaaaggttttcagtctattgaagggcaaagacaattcaaacacaatgagaatatgagaagtgtcaggaccaaagagccatcacagaatgcttgtgcatatcaaacaaatatctaacttagggaagacatttggaaactggtaacattggaactgagtcttaagctggaaacatatgggatataccatttatttcagcatttaataacatgccatcatgatttgtgacttaactgtctcataaacatgtgttttgtctacagaactagatcttaagttccttgaagacacaggacatctctttatgcctccatgccacctggaactgacaggcacacttaaggcagtagtaaattactgcacacattgatgcaaatggttttgtcctcccaaagagtaaaaatattctgttagtgaaatgtattgtaactagtgttttcttttccaattttagtctttgaacactgcagccaagaatacagtttgaaaccttgggagtcaaattcacagtaaatacatgagccgttcacagtgcagcaaactctcatgttagttttatgacagatccagtgacactggaatggacacctttttgattttggggttccttcctaagacccccatgtgtgatatattcatggttggattctaggtactgaagcagttactacagctggatagtccaatgagtgtaagaaggcttctctacaaacacatgctgcccacatcgaagttcctctttaatctactgcagtttgaaattgtcccccactttctccaagagtccactccaagctagtttagggttaggtctaccatagcctttggaagagggagggaagataacttttctcatctctcctagtcccagctctaaagaccagaaccagggagaaagcaacacagcttttccaaacacattccccaaatgtggcaccttttcaacaattttagtaacaaatttaaggcatcatagatgcctttaaaattggcatgatagatgttagagtgatcataaaaagactttaaaagaggaaaagatgtaaagaacgtaatcaaatggggagcatgtttaacaatgtgctcacttcttccccttcaattccttgaattgagtctgcattatcattcctattgatctttgagcccagaacattactttgtggtctggcctaaggtttcttccaattttttaaattacaatatccctaagaggacagcgacgaggtctggggtgttatgaggattggaaacctagccacaagtgaccatgaaagtccaaaatgcctctaaagtctttgtctctaaggcccattttcaaggtcttgttatatagctaatttttccccgacttatgtcaaaaataaacgaagctgggttctaggtaaaatggtaggggcagattttaatcactactactactgcaatggggaaaagaacccagcgtgaactgaattcaatttcgatttgtagaggcaaccgggcgttttaaagagaatgaaggaattaggatgggactgatgacgccgagggggactgagcaactttttcaggtttgaaaagcctcaacatcaacgcgcgacggcgctctttcaacatcagcctccagaactggggctgcagccaggagggaactacaacgcccagcagccccggcgggtgtaaacactcccaacttccgaggcggtgctcaccatcggccatcagcgccagtgccactcgcgccctcaagaagccgcacggagttcgggccggcagcagcggctgcagtcgtatggcagtgagccgctgtctacccagcgagacggagagctcaggacgcaaccctatgagttggaagccgcaggaggcggaaccgggttgcgggatacgcgttgacgtcacatcctctgggcggggccgcaaggaacccgcgcaaattgaaaggtcagcctttcgcgcgctgtgtaggcaagttacccgtgttctgcgttgccggccgtgggtgctctggccacagtgagttaggggcgtcggagcgggtttctccaaccgcaatcggctccgctcaaggggaggaggagagtcccttctcggaaggtgagaggagcgggctgtgcggaggctaatgggtgggttcccttgggggtcgacctgcgcgtcacctccgaccctcctctcgggattcgggtcttccaggaagggaaggagagggtctggcgtgatcttcccaacccaacagcggagcccttagcctgagtggagtatgtgttttgttccgaggggacgtctggcaaccagaggtctgcagttcagtgaacggagggagataagagagcagacgattccgggctggagcaggcgccagggttgccagacttacctcatttttccgcagaagctggcagtccaggttttacatgcaatctctccacctttaaatgttgacaagtacattttcccataatattttgcaggcctaaggaaacgtgtcgtctggaatgggcttgggggccacgcctgcacatctccgcgagacagagggataaagtgaagatggtgctgttattgttacctcgagtgccacatgcgacctctgagatatgtacacagtcattcttactatcgcactcagccattcttactacgctaaagaagaaataattattcgaggatatttgcctggcccagaagaaacttatgtaaatttcatgaactattatatccgttttcctcggagtgagagaaaactctttttagatatcatctgagaggtaagagactgtttttctgaaactgtggcttgaggaccacctgcatccagattaactgctttgtttaaaattcattcacagcagaactagtgaatcccagtcactgagtggagttgagagtctaagaacctctgaaatttgagaactgctggaccagagcctttagagctctgataaggtgtcaacagggtaaagctgcctcctgatcctgtact

SEQ ID NO: 2686 - DNA, 6000 bp, Homo sapiens
gaaaacataactataaggaaaataccactaaatgctgtagacccgaaatggaaaaacttcaaaatattgtgtccccattagctctaaaagaaacgaatgcagaaagcaagcaaaatagagctccagctcctttcccaggtattcactgacgcagagccaggctaccacagcctgcttctccagaaatccaaaagttcccaggcagtaagctcaatctccccgggatcctctcacatctgagacacctgtgactcccttggagacagcactcgtgtatgacagccaacaaggatgggctgggctttccgttctatgtttttcctaaagaaagaaaggaatgtttgaaaaacaagagaaagatcactacttatggtctagaatataattttatatatttgaaaggctttttctacagtcaattcattccacaactacttttacgtatctgctatgtcccagattcattttaaactccatgagagctttgtcttatggtatccttggtgttaaatgctattttagacattagtgatacaaaagtgaataagcctacccataaggcagctaccaaaacaaacacaagttactaaagataaagtaatataacaactacataaatgcatgcatgaagtgttatgatagtaaagaaacataaatagagttaggcaagttgaaaaaggcttcacgaagagttgagtcttgaaagaatcatgggattcagtaaggcggaaggaaacaatgtgtgcaaaaatacagaggcattaacaatgcactagagtggcaggaaagctgggcttcatcaaaacaagaggttccctgatgaggaatgacaggagataaggctggaaaaggaatttggagccacagactacaaaggtccttacacataatgataaagaaattgggcttcaaaaaaagaaattggactttatcaggtaggggcttcaaggtatcatccaattttgtttgtttgtttgttttttgttttcagacagagtctcactctgtctgtggtccaggctggggtacaatggcacagtctcggctcattgcaacctccgcctcccaggttcaagtgattctcctgcctcagtcttccgagtagctgggactacaggtgcacaccgccacagccagctaattttttgtattttagtagagataggatttcaccgtgttgcccaggctggtctagaactcctgagctcaggcaatacacctgcctcggcctcccaaagtggtaggattacaggcgtcagccaccgcgcccggcctcatccaatttttaaagcagggtcattacacaatcaaatttacactttaggacagtgactcgggagagaggatagaaggtggagagacatggagattgtcaggaaaacaactcagaaagccaccatatcaacctatgtgagaattggcaaaggcctgagagtagcagaccctgcaggtgcataagaacatggctttgtttgacaagacagaaagataaaagataaagagcaacaaggataactggcatttctagtagaacattcaaagagatgttaatgtcattaaccatgttaaggaataaaagagaaacagtgtttgtgttttaatcactttttcccccggagtgagagggaggctgaaagtcctagttttaaaaataatttctggctttaagttatctgtggaataccatgtttatgctccaggaggtcctctgaaatctgagactggtcttcaaaaggcatgtgaatgacagttacagatataagatttgagatgctttctaaaagtaggtaatttcacagccagaaaggcaaagatggaatccaaattcagtttccaaataaaatcagcctaggagggatagaggaatgagataagcagcaaaaagatgatgtcaacaaacccaaaattagaattctaaatctaataccaatagtggtgtctacacacactcacaaatcacgaaacctgtcaaatgatcagtgtaccaatgggcatgctcaacagcatacccatgaaaaacaggaggaaaaggaagggcagccaaggagcaagtcggtgccaatgacgactacatgtgacgtgactgtaaaggccagaccacaacctccaaaagtctgcacgaaagaaatgagcagcccaaccggaaaacagcaagacccaggaaacagctccatccattagcttactgttcagatcccgcccctctagaccaagcttttgcccagaaaatcacaggagctgcgggacagattcacatacattatcatttagttatccaaagggggatacagagcaaagaaggttcatagagaagacacaagaggcagaatcgaatgtgcaacaccaatgaagtaaccaattatcctgggttcaaatattccaacctggctaggcacggtggctcacgcctgtaatcccagcatttgggaggccgagctgggtgaattacttgaggccaggagtttaaagaccagcctggccaacatggtgaaaccccgtctctactaaaaatacaaaaaaattagccgagcatggtggcacacgcctgtaatcccagctactcgggaggctgaggcaggagaattgcttgaacccgggagggggaggttgcagtgagccgagatcgtgccactgcactccacccggagcaacagagcgagactctgtctcaaaatatatatatatattccaacctactgtgaacccgtgtgtcccaattatgtttaaaaaacagggaaactagagacataatgcaagagaagatagtcatctgaaactgggagaggggcaggggtaaaagcaaaaagcatgaagctaccagatgcctcaacttccaatttgcactaacttcaacggcagcagaacactgcttggcacgccctacacttttgtgcatttcaaacaacttttatgccttcctttttttcttttgctggagtgacaaggcacgacagaacaataacctgagcaaagctggtacttggactagttctgtctccagaggctatccacatcactgttaccttaaccaaactcaatctgctcatgagtaaaacggacttatcttcatgggcccattccagaagtcttttcatttatctccgctcattttaccacagcggcagacgctggcggacactcaacacatgctaccatcctgccttccagaagactttattacctgtaattctgtaagaaagtcactgacttggttaggcctccacttccccacctgtaaaaccctactgatgcctcatagggttgtcttcggaccacagactgcaataaaaaatgtaaacggcactcgtttttaggcctggcaaataggagctactcccattctactccctaaaggaatcgaaaacatggagaggttaagtgactggcacctaatcagatcgggtaaggaacccaacacctactgatctcttccatcacccacagcctgcccagctctcgccgtgccctccaccagcgccaggcctcccacatcgccttaggcttcccatgctcagaggaggggcagagaagctaccgatgacacaggggcagagggcagcgaaaaatgacttgcccaaggtcaaaacgtcagagtagacgggaaagcctggcctcctagcagccgaggccacgtccccgcgcttgccccttcagccccgaggacccacacgctgcgccttcctggcctcggggggcagcgcgggggccgctcccgaccgagttcagtgagcgccctggcctcccccgcgcacccccgccgcgccctccacctgcccacggcccggacggccgagcccccacgcccgcgcttgcccgagcccagcctcgcgcccccggggcccccgctgccccaccccgggcccggaccccccgcgcaggaccccggaggttaagttttccacacggcggagcccctcccacactccctgccacgtctgcggcctcacgcactgtggcgctccggacccggaccccgctgccgccgccgccgggcccgcgccgccggccgctcagcccagcgtcccccggcagcgagctcctcctctggccgggacctggagcccgagacgcccgccgacttcctccgcgagctccgccccgccgcagccccgggaagcgcccgccgccggagccggactgacggcccccgcgaccaatcgggacgcgagaccggagggggcgtgctgacggacggccactaacgccaatcgaaatgcgcaatcggtgggggcgcggccacagctaccgggccacgccccatccgcgcttccgctcgggccggggcggagcgggaaactttcccagagttccttcgagctccccgagtccccgcggagcagcggcggtcgaggggcggggacgggggcggagcccaggaacgccggcccccaggggctggaggctggggcggccctgaggacgcgtgcggggcaggtcacgcttgggcctggctgcctcaggagccaccctgcacggcgccgggcgaggctgtgcgcgccctcccggaccctccactttggggctttgcggtgtagcggcgcgccccactcccttacgtgttcagtcccgaatcacgtacgggccgctgcagctccaggacggcggacgccagcgctctcggatccccaggcccctccgtgctcatcccggaccgctccgtccctgaggaaaaaccgccccgtgcccggaaccgcggcttctcccacgcggggcaggccggggctgtgagggggcagcccgcctgcggactaggccgggggtttgaggaggcggctctgccggggacaaagccgggggcgtgaggggcggttctgccgggttcggggcgcgcggggcaggttgcgtgaagaggcggaaagtcccactcgccctcggcttctccctgcccggccgccggtgtcccgcccgccgcctccccgcgcagcccggcccgacccgcggcgatggcccagcccggggacccgcggcgcctctgcaggctggtgcaggagggccggctgcgcgccctgaaggaggagctgcaggcggccgggggctgcccggggccggccggggataccctcctgcactgcgccgcgcgccacgggcatcgggacgtgctggcctatctggccgaggcctggggcatggacatcgaggccaccaaccgagactacaagcggcctctgcacgaggcggcctccatgggccaccgagactgcgtgcgctacctgctgggccggggggcagcggtcgactgcctgaagaaggccgactggtaggtgtggagcggaaagacaccccgcctcccctctactcgcagagtcgtagcgagttccctgtgcttctccgtccccttggacaccgtagctgttctcagctcctagttctcaccccaggcctgctcagcggcagggacctcctgcccaactttcccttataacgcagatgacctgcagagtccctcgttcctgcccttgtgggttaactggtcggggcagtcacctccctttctagagcacggaatagtgtagaatataaccaaagagaatgttaccaaacaatgaagtgtgtgcactatacagatagcctccggatgcgatgttctggggacatttagctaagttacttctgcaccaatgcattgtttcaagtggcattgctccaatcaatatccagaattcctgagttatacacgcgctcgtgtgtgtagagcacagtgcagttgtatcacatacgtgcagccttgcataaccaccacagtcagagatactctgctccaccatcacacaagccaattgcatttcgtttgttagattgacactgattttagtactcactaggtcaggttcgttagagggcgtgaacatctttaggaacatagggaagtacatcttccccactggggcaggggaatagacttcgttatgtgttgagggttgtctgtgggttttcttagctctgctccaattcactgctatcctgtgaactagcttataagctgctttgtctcccaggcac

SEQ ID NO: 2687 - DNA, 6000 bp, Homo sapiens
aatataaaaaattagccaggtatggtggcatgcacctgcaatcccagctacttaggaggttgaggcaggagaatcgcttgaacctgggaggtggaggttgcagtgagctgagattgcaccattgcagtccagcctgggtgacaaaagcaaaactccatctcaaaaactaaaaaaaaaaaaaaaaaaaggaaaatcctcaatgtggctgatagcattcattctcccaccccttcactgttcaggctcagcatattctaggcgtcttttgttttcttaaatgtaccacagttgttcctggtttggagcatccgtgggtgctgttattgctgtctggaatggtcccttgcctcccgctttcagctaatttctttttctccttcaggtcacagcttaaacactggcgctgagattctttactcttaagccaaattgggtcttcccattatttgttctgtagggatcctgcaagtccttgtaatgcacaacagactttcgggactccttcatggtctgtctttcctgccagtctgttgagttccaggagggtagaaactacatgtgtcttctttctgttgtggcccttgcacctggtacagggctttatttattttttatttatttttttttgagacagagtcttgctctgttgccaaggctggactgcagtggcgcgatctcggctcactgcaagctccgcctcttgggttcacgccattctcctgcctcagcttcctgagtagctgggactacaggcgcccgccaccacgcccggctaattttttttgaatttttagtagagacagggtttcgctgtgttagccaggatggtctcgatcttctgaccttgtgatccgcccgcctcggcctcgcaaagtgctgggattacaggcgtgagccaccgagcactaaatgaatgtataaatgctcgttgaaaaaaatagagaaatggatgattttgccgctgaaaacattttccccagatatttgttatttttgtttcatattctttatctgctatgtcttttgttcatttttcttttgaaagcctaatttttttcttaaaaatgtgtctgagctctttatgtagcactgatatcaactctttgtcatagttagcaaatattttccctgacttgctgtattgttcttacctcttaagaagcaccttgactgcctccaaatggccatgcattgctgggaggagaaagaaagctgagaattagagctttttagtgcacacacaaaatgcttcctgcctcctggctttgctctctgccccgttctattagtgatagcttacaagaaggagtcattaaattgggtacactgttaccgccctacacgaataaatatttaactggataaagcggtaaacaataatgttttcactttatatgtacacagccaacacttgattatcttatcttcacgtgcactttcatgggaaactttcaatcctaaagttacacttctgtgctgtggatccccaagactagtccatttttgcccaggaaatgcaaaatattgtaacagtaatccatggcaaaatagcctggatttaattcccctactaaaagtaactatactcaaaggttatgactatttgtcttccactattttgggtgaatgatggagtgctgattgtttctccaggggagaaactggtcaaataattcatgagctaaaaaaaagttttctacttacttaagaagttttagaaatgattccttggtccctaattgccaactgtggctcatgcctgtaatcccagcactttgggaggccaaggtgggtggatcacttcaggtcaggagttcaagaccagcctggccaacaaggggaaaccccatctctactaaaaatatgaaaattagctgggcatggtggcatgcgccagtaatcccagcttctcgggagactgaggcacgtgaattgcttgaacctgcgaggcagaggttgcagtgagccgagatcgtgccactgtattccagcctgggtgacagagcaagactctgtctcaaaaaaaaacaaaagacaaaaagcaacactataaaacatcacaagtgatgatttttagagaaactaaaagccctctatcctaatcaatgtactacctagaaagctacaagttatattctgaatttcttaatctagactcttgagctccttaatatctaacttctgaaattacagtaattttactttttactaattgttttctttttactttcttcaaacaaatgagcaaattgaaactttttactaaaataatctacaaatagataattcagagttaagagtcactactccaaataataaaaactgtaacccaaatttacattagatgttattgggccaaggtatttaattatgagtatctatatttatttaaaagtatagcactatggtaggtgttactaaggctatgaggatatatatttccctcctgcctttaagagtaagaatgtaaacatgataaagaaaatagcactaaccagttattttgtgctatgtgccaagcattgtctaaaggatttacatacatcatgctctttaaactctacaacaaccctgagacataccatcactgacattattatttggttgatgaggaaacttgctcaagagagagactaatttccttacccaaggtcaaagactatgtgctacagaaccagctcatgggcaaataatctagggaggataacacagatacacacgaaaaataaattaataccacagcatgctagccaagttatgttaactttagaaattgattatatgccaaaaggcccctagatgctttttttttttttttgagatggagttttgctcttgttgcccaggctgtagtgtaatgtagtgcaatcttggcttagtacaacctctgcctcctgggttcaagccattctcctgcctcagactctggagctccccagtagctgggattacaagcagccgccaccacgcccggctaattttttgtatttttagtagagacggcgtttcaccatgttggccaggctggtcttgaacgcctgacctcaggtgatccacccgcctccggcctcccaaagtgctgggattacaggcgtgagccactgcacccgcgcccccgcccccaccccctcccccccagatgttcttattctctgccttctgttttccaaaatcctcctttcccctgaaggtgacctgaacaagatgcggttgggcagtgctgggtgaagcagccacatgtgtgtactgctcacctgcagagctgtaggctgtacctgcagtatgcagaggagtccttctaattttgctctctgtcttccaggcacctgggcaaacagtgagcaggtactggaggatcagagggtcgccttctcgactggcaatgtggaaactgttccagccatctttgttcttcaggagtggattggcgccatgttccaccagctcctggatcacccccaggttcttccttgtgcaggccatcatcagaggagtcctaaggccaaccaggagaagctgtcagatggaggcagctgagacattagaagccaggggccaggtcttcaaaacacacacatccttggcacagatggaaaacctagaggattcaggggtctggcaggcaggaaaacagctttgaccggcaacctctgtgccttctgtgaggaccctgggagaaataataaggggaaaatgattgtaacgaacgtgtacctagaggagagggtgcctgggagacaaagcagcttataagctagttcacaggatagcagtgaattggagcagagctaagaaaacccacagacaaccctcaacacataacgaagtctattcccctgccccagtggggaagatgtacttccctatgttcctaaagatgttcacgccctctaacgaacctgacctagtgagtactaaaatcagtgtcaatctaacaaacgaaatgcaattggcttgtgtgatggtggagcagagtatctctgactgtggtggttatgcaaggctgcacgtatgtgatacaactgcactgtgctctacacacacgagcgcgtgtataactcaggaattctggatattgattggagcaatgccacttgaaacaatgcattggtgcagaagtaacttagctaaatgtccccagaacatcgcatccggaggctatctgtatagtgcacacacttcattgtttggtaacattctctttggttatattctacactattccgtgctctagaaagggaggtgactgccccgaccagttaacccacaagggcaggaacgagggactctgcaggtcatctgcgttataagggaaagttgggcaggaggtccctgccgctgagcaggcctggggtgagaactaggagctgagaacagctacggtgtccaaggggacggagaagcacagggaactcgctacgactctgcgagtagaggggaggcggggtgtctttccgctccacacctaccagtcggccttcttcaggcagtcgaccgctgccccccggcccagcaggtagcgcacgcagtctcggtggcccatggaggccgcctcgtgcagaggccgcttgtagtctcggttggtggcctcgatgtccatgccccaggcctcggccagataggccagcacgtcccgatgcccgtggcgcgcggcgcagtgcaggagggtatccccggccggccccgggcagcccccggccgcctgcagctcctccttcagggcgcgcagccggccctcctgcaccagcctgcagaggcgccgcgggtccccgggctgggccatcgccgcgggtcgggccgggctgcgcggggaggcggcgggcgggacaccggcggccgggcagggagaagccgagggcgagtgggactttccgcctcttcacgcaacctgccccgcgcgccccgaacccggcagaaccgcccctcacgcccccggctttgtccccggcagagccgcctcctcaaacccccggcctagtccgcaggcgggctgccccctcacagccccggcctgccccgcgtgggagaagccgcggttccgggcacggggcggtttttcctcagggacggagcggtccgggatgagcacggaggggcctggggatccgagagcgctggcgtccgccgtcctggagctgcagcggcccgtacgtgattcgggactgaacacgtaagggagtggggcgcgccgctacaccgcaaagccccaaagtggagggtccgggagggcgcgcacagcctcgcccggcgccgtgcagggtggctcctgaggcagccaggcccaagcgtgacctgccccgcacgcgtcctcagggccgccccagcctccagcccctgggggccggcgttcctgggctccgcccccgtccccgcccctcgaccgccgctgctccgcggggactcggggagctcgaaggaactctgggaaagtttcccgctccgccccggcccgagcggaagcgcggatggggcgtggcccggtagctgtggccgcgcccccaccgattgcgcatttcgattggcgttagtggccgtccgtcagcacgccccctccggtctcgcgtcccgattggtcgcgggggccgtcagtccggctccggcggcgggcgcttcccggggctgcggcggggcggagctcgcggaggaagtcggcgggcgtctcgggctccaggtcccggccagaggaggagctcgctgccgggggacgctgggctgagcggccggcggcgcgggcccggcggcggcggcagcggggtccgggtccggagcgccacagtgcgtgaggccgcagacgtggcagggagtgtgggaggggctccgccgtgtggaaaacttaacctccggggtcctgcgcggggggtccgggcccggggtggggcagcgggggccccgggggcgcgaggctgggctcgggcaagcgcgggcgtgggggctcggccgtccgggccgtgggcaggtggagggcgcggcgggggtgcgcgggggaggccagggcgctca

SEQ ID NO: 2688 - DNA, 6000 bp, Homo sapiens
tctgtatttaatacgtcttccatcccagactaaaagctctctgctctagtgggaaggagtagagaggtactcacacccagcatgtaacacacattgcttcataaacaattcctgattaaacgaacaaatgtgcagctgcagcacttcttctgaagtgtgggctgtcttccttggctttgaagctctcaactctcccagagctcctaagtgctttacagcttttgcagttctttcctatattctcgtctgaccctcaaagcaatcctacaattgtgccatgattaagctggggctcagagaggacttgcctgaagtcacctcgtagctcatgagtgatggtgccaacacaagaacccgggtctcctgactcccctagtccagtgcacttcctactgtgacattcttcactctgtatctagacaccttgaaagcagcttctgaaaacctcaagtttaatttccatattacatttttttaaaatcattgtgaaatgtcagaaccaaagaaattgagaagtatttggaaaacataactataaggaaaataccactaaatgctgtagacccgaaatggaaaaacttcaaaatattgtgtccccattagctctaaaagaaacgaatgcagaaagcaagcaaaatagagctccagctcctttcccaggtattcactgacgcagagccaggctaccacagcctgcttctccagaaatccaaaagttcccaggcagtaagctcaatctccccgggatcctctcacatctgagacacctgtgactcccttggagacagcactcgtgtatgacagccaacaaggatgggctgggctttccgttctatgtttttcctaaagaaagaaaggaatgtttgaaaaacaagagaaagatcactacttatggtctagaatataattttatatatttgaaaggctttttctacagtcaattcattccacaactacttttacgtatctgctatgtcccagattcattttaaactccatgagagctttgtcttatggtatccttggtgttaaatgctattttagacattagtgatacaaaagtgaataagcctacccataaggcagctaccaaaacaaacacaagttactaaagataaagtaatataacaactacataaatgcatgcatgaagtgttatgatagtaaagaaacataaatagagttaggcaagttgaaaaaggcttcacgaagagttgagtcttgaaagaatcatgggattcagtaaggcggaaggaaacaatgtgtgcaaaaatacagaggcattaacaatgcactagagtggcaggaaagctgggcttcatcaaaacaagaggttccctgatgaggaatgacaggagataaggctggaaaaggaatttggagccacagactacaaaggtccttacacataatgataaagaaattgggcttcaaaaaaagaaattggactttatcaggtaggggcttcaaggtatcatccaattttgtttgtttgtttgttttttgttttcagacagagtctcactctgtctgtggtccaggctggggtacaatggcacagtctcggctcattgcaacctccgcctcccaggttcaagtgattctcctgcctcagtcttccgagtagctgggactacaggtgcacaccgccacagccagctaattttttgtattttagtagagataggatttcaccgtgttgcccaggctggtctagaactcctgagctcaggcaatacacctgcctcggcctcccaaagtggtaggattacaggcgtcagccaccgcgcccggcctcatccaatttttaaagcagggtcattacacaatcaaatttacactttaggacagtgactcgggagagaggatagaaggtggagagacatggagattgtcaggaaaacaactcagaaagccaccatatcaacctatgtgagaattggcaaaggcctgagagtagcagaccctgcaggtgcataagaacatggctttgtttgacaagacagaaagataaaagataaagagcaacaaggataactggcatttctagtagaacattcaaagagatgttaatgtcattaaccatgttaaggaataaaagagaaacagtgtttgtgttttaatcactttttcccccggagtgagagggaggctgaaagtcctagttttaaaaataatttctggctttaagttatctgtggaataccatgtttatgctccaggaggtcctctgaaatctgagactggtcttcaaaaggcatgtgaatgacagttacagatataagatttgagatgctttctaaaagtaggtaatttcacagccagaaaggcaaagatggaatccaaattcagtttccaaataaaatcagcctaggagggatagaggaatgagataagcagcaaaaagatgatgtcaacaaacccaaaattagaattctaaatctaataccaatagtggtgtctacacacactcacaaatcacgaaacctgtcaaatgatcagtgtaccaatgggcatgctcaacagcatacccatgaaaaacaggaggaaaaggaagggcagccaaggagcaagtcggtgccaatgacgactacatgtgacgtgactgtaaaggccagaccacaacctccaaaagtctgcacgaaagaaatgagcagcccaaccggaaaacagcaagacccaggaaacagctccatccattagcttactgttcagatcccgcccctctagaccaagcttttgcccagaaaatcacaggagctgcgggacagattcacatacattatcatttagttatccaaagggggatacagagcaaagaaggttcatagagaagacacaagaggcagaatcgaatgtgcaacaccaatgaagtaaccaattatcctgggttcaaatattccaacctggctaggcacggtggctcacgcctgtaatcccagcatttgggaggccgagctgggtgaattacttgaggccaggagtttaaagaccagcctggccaacatggtgaaaccccgtctctactaaaaatacaaaaaaattagccgagcatggtggcacacgcctgtaatcccagctactcgggaggctgaggcaggagaattgcttgaacccgggagggggaggttgcagtgagccgagatcgtgccactgcactccacccggagcaacagagcgagactctgtctcaaaatatatatatatattccaacctactgtgaacccgtgtgtcccaattatgtttaaaaaacagggaaactagagacataatgcaagagaagatagtcatctgaaactgggagaggggcaggggtaaaagcaaaaagcatgaagctaccagatgcctcaacttccaatttgcactaacttcaacggcagcagaacactgcttggcacgccctacacttttgtgcatttcaaacaacttttatgccttcctttttttcttttgctggagtgacaaggcacgacagaacaataacctgagcaaagctggtacttggactagttctgtctccagaggctatccacatcactgttaccttaaccaaactcaatctgctcatgagtaaaacggacttatcttcatgggcccattccagaagtcttttcatttatctccgctcattttaccacagcggcagacgctggcggacactcaacacatgctaccatcctgccttccagaagactttattacctgtaattctgtaagaaagtcactgacttggttaggcctccacttccccacctgtaaaaccctactgatgcctcatagggttgtcttcggaccacagactgcaataaaaaatgtaaacggcactcgtttttaggcctggcaaataggagctactcccattctactccctaaaggaatcgaaaacatggagaggttaagtgactggcacctaatcagatcgggtaaggaacccaacacctactgatctcttccatcacccacagcctgcccagctctcgccgtgccctccaccagcgccaggcctcccacatcgccttaggcttcccatgctcagaggaggggcagagaagctaccgatgacacaggggcagagggcagcgaaaaatgacttgcccaaggtcaaaacgtcagagtagacgggaaagcctggcctcctagcagccgaggccacgtccccgcgcttgccccttcagccccgaggacccacacgctgcgccttcctggcctcggggggcagcgcgggggccgctcccgaccgagttcagtgagcgccctggcctcccccgcgcacccccgccgcgccctccacctgcccacggcccggacggccgagcccccacgcccgcgcttgcccgagcccagcctcgcgcccccggggcccccgctgccccaccccgggcccggaccccccgcgcaggaccccggaggttaagttttccacacggcggagcccctcccacactccctgccacgtctgcggcctcacgcactgtggcgctccggacccggaccccgctgccgccgccgccgggcccgcgccgccggccgctcagcccagcgtcccccggcagcgagctcctcctctggccgggacctggagcccgagacgcccgccgacttcctccgcgagctccgccccgccgcagccccgggaagcgcccgccgccggagccggactgacggcccccgcgaccaatcgggacgcgagaccggagggggcgtgctgacggacggccactaacgccaatcgaaatgcgcaatcggtgggggcgcggccacagctaccgggccacgccccatccgcgcttccgctcgggccggggcggagcgggaaactttcccagagttccttcgagctccccgagtccccgcggagcagcggcggtcgaggggcggggacgggggcggagcccaggaacgccggcccccaggggctggaggctggggcggccctgaggacgcgtgcggggcaggtcacgcttgggcctggctgcctcaggagccaccctgcacggcgccgggcgaggctgtgcgcgccctcccggaccctccactttggggctttgcggtgtagcggcgcgccccactcccttacgtgttcagtcccgaatcacgtacgggccgctgcagctccaggacggcggacgccagcgctctcggatccccaggcccctccgtgctcatcccggaccgctccgtccctgaggaaaaaccgccccgtgcccggaaccgcggcttctcccacgcggggcaggccggggctgtgagggggcagcccgcctgcggactaggccgggggtttgaggaggcggctctgccggggacaaagccgggggcgtgaggggcggttctgccgggttcggggcgcgcggggcaggttgcgtgaagaggcggaaagtcccactcgccctcggcttctccctgcccggccgccggtgtcccgcccgccgcctccccgcgcagcccggcccgacccgcggcgatggcccagcccggggacccgcggcgcctctgcaggctggtgcaggagggccggctgcgcgccctgaaggaggagctgcaggcggccgggggctgcccggggccggccggggataccctcctgcactgcgccgcgcgccacgggcatcgggacgtgctggcctatctggccgaggcctggggcatggacatcgaggccaccaaccgagactacaagcggcctctgcacgaggcggcctccatgggccaccgagactgcgtgcgctacctgctgggccggggggcagcggtcgactgcctgaagaaggccgactggtaggtgtggagcggaaagacaccccgcctcccctctactcgcagagtcgtagcgagttccctgtgcttctccgtccccttggacaccgtagctgttctcagctcctagttctcaccccaggcctgctcagcggcagggacctcctgcccaactttcccttataacgcagatgacctgcagagtccctcgttcctgcccttgtgggttaactggtcggggc

SEQ ID NO: 2689 - DNA, 6000 bp, Homo sapiens
attctcctgcctcagcttcctgagtagctgggactacaggcgcccgccaccacgcccggctaattttttttgaatttttagtagagacagggtttcgctgtgttagccaggatggtctcgatcttctgaccttgtgatccgcccgcctcggcctcgcaaagtgctgggattacaggcgtgagccaccgagcactaaatgaatgtataaatgctcgttgaaaaaaatagagaaatggatgattttgccgctgaaaacattttccccagatatttgttatttttgtttcatattctttatctgctatgtcttttgttcatttttcttttgaaagcctaatttttttcttaaaaatgtgtctgagctctttatgtagcactgatatcaactctttgtcatagttagcaaatattttccctgacttgctgtattgttcttacctcttaagaagcaccttgactgcctccaaatggccatgcattgctgggaggagaaagaaagctgagaattagagctttttagtgcacacacaaaatgcttcctgcctcctggctttgctctctgccccgttctattagtgatagcttacaagaaggagtcattaaattgggtacactgttaccgccctacacgaataaatatttaactggataaagcggtaaacaataatgttttcactttatatgtacacagccaacacttgattatcttatcttcacgtgcactttcatgggaaactttcaatcctaaagttacacttctgtgctgtggatccccaagactagtccatttttgcccaggaaatgcaaaatattgtaacagtaatccatggcaaaatagcctggatttaattcccctactaaaagtaactatactcaaaggttatgactatttgtcttccactattttgggtgaatgatggagtgctgattgtttctccaggggagaaactggtcaaataattcatgagctaaaaaaaagttttctacttacttaagaagttttagaaatgattccttggtccctaattgccaactgtggctcatgcctgtaatcccagcactttgggaggccaaggtgggtggatcacttcaggtcaggagttcaagaccagcctggccaacaaggggaaaccccatctctactaaaaatatgaaaattagctgggcatggtggcatgcgccagtaatcccagcttctcgggagactgaggcacgtgaattgcttgaacctgcgaggcagaggttgcagtgagccgagatcgtgccactgtattccagcctgggtgacagagcaagactctgtctcaaaaaaaaacaaaagacaaaaagcaacactataaaacatcacaagtgatgatttttagagaaactaaaagccctctatcctaatcaatgtactacctagaaagctacaagttatattctgaatttcttaatctagactcttgagctccttaatatctaacttctgaaattacagtaattttactttttactaattgttttctttttactttcttcaaacaaatgagcaaattgaaactttttactaaaataatctacaaatagataattcagagttaagagtcactactccaaataataaaaactgtaacccaaatttacattagatgttattgggccaaggtatttaattatgagtatctatatttatttaaaagtatagcactatggtaggtgttactaaggctatgaggatatatatttccctcctgcctttaagagtaagaatgtaaacatgataaagaaaatagcactaaccagttattttgtgctatgtgccaagcattgtctaaaggatttacatacatcatgctctttaaactctacaacaaccctgagacataccatcactgacattattatttggttgatgaggaaacttgctcaagagagagactaatttccttacccaaggtcaaagactatgtgctacagaaccagctcatgggcaaataatctagggaggataacacagatacacacgaaaaataaattaataccacagcatgctagccaagttatgttaactttagaaattgattatatgccaaaaggcccctagatgctttttttttttttttgagatggagttttgctcttgttgcccaggctgtagtgtaatgtagtgcaatcttggcttagtacaacctctgcctcctgggttcaagccattctcctgcctcagactctggagctccccagtagctgggattacaagcagccgccaccacgcccggctaattttttgtatttttagtagagacggcgtttcaccatgttggccaggctggtcttgaacgcctgacctcaggtgatccacccgcctccggcctcccaaagtgctgggattacaggcgtgagccactgcacccgcgcccccgcccccaccccctcccccccagatgttcttattctctgccttctgttttccaaaatcctcctttcccctgaaggtgacctgaacaagatgcggttgggcagtgctgggtgaagcagccacatgtgtgtactgctcacctgcagagctgtaggctgtacctgcagtatgcagaggagtccttctaattttgctctctgtcttccaggcacctgggcaaacagtgagcaggtactggaggatcagagggtcgccttctcgactggcaatgtggaaactgttccagccatctttgttcttcaggagtggattggcgccatgttccaccagctcctggatcacccccaggttcttccttgtgcaggccatcatcagaggagtcctaaggccaaccaggagaagctgtcagatggaggcagctgagacattagaagccaggggccaggtcttcaaaacacacacatccttggcacagatggaaaacctagaggattcaggggtctggcaggcaggaaaacagctttgaccggcaacctctgtgccttctgtgaggaccctgggagaaataataaggggaaaatgattgtaacgaacgtgtacctagaggagagggtgcctgggagacaaagcagcttataagctagttcacaggatagcagtgaattggagcagagctaagaaaacccacagacaaccctcaacacataacgaagtctattcccctgccccagtggggaagatgtacttccctatgttcctaaagatgttcacgccctctaacgaacctgacctagtgagtactaaaatcagtgtcaatctaacaaacgaaatgcaattggcttgtgtgatggtggagcagagtatctctgactgtggtggttatgcaaggctgcacgtatgtgatacaactgcactgtgctctacacacacgagcgcgtgtataactcaggaattctggatattgattggagcaatgccacttgaaacaatgcattggtgcagaagtaacttagctaaatgtccccagaacatcgcatccggaggctatctgtatagtgcacacacttcattgtttggtaacattctctttggttatattctacactattccgtgctctagaaagggaggtgactgccccgaccagttaacccacaagggcaggaacgagggactctgcaggtcatctgcgttataagggaaagttgggcaggaggtccctgccgctgagcaggcctggggtgagaactaggagctgagaacagctacggtgtccaaggggacggagaagcacagggaactcgctacgactctgcgagtagaggggaggcggggtgtctttccgctccacacctaccagtcggccttcttcaggcagtcgaccgctgccccccggcccagcaggtagcgcacgcagtctcggtggcccatggaggccgcctcgtgcagaggccgcttgtagtctcggttggtggcctcgatgtccatgccccaggcctcggccagataggccagcacgtcccgatgcccgtggcgcgcggcgcagtgcaggagggtatccccggccggccccgggcagcccccggccgcctgcagctcctccttcagggcgcgcagccggccctcctgcaccagcctgcagaggcgccgcgggtccccgggctgggccatcgccgcgggtcgggccgggctgcgcggggaggcggcgggcgggacaccggcggccgggcagggagaagccgagggcgagtgggactttccgcctcttcacgcaacctgccccgcgcgccccgaacccggcagaaccgcccctcacgcccccggctttgtccccggcagagccgcctcctcaaacccccggcctagtccgcaggcgggctgccccctcacagccccggcctgccccgcgtgggagaagccgcggttccgggcacggggcggtttttcctcagggacggagcggtccgggatgagcacggaggggcctggggatccgagagcgctggcgtccgccgtcctggagctgcagcggcccgtacgtgattcgggactgaacacgtaagggagtggggcgcgccgctacaccgcaaagccccaaagtggagggtccgggagggcgcgcacagcctcgcccggcgccgtgcagggtggctcctgaggcagccaggcccaagcgtgacctgccccgcacgcgtcctcagggccgccccagcctccagcccctgggggccggcgttcctgggctccgcccccgtccccgcccctcgaccgccgctgctccgcggggactcggggagctcgaaggaactctgggaaagtttcccgctccgccccggcccgagcggaagcgcggatggggcgtggcccggtagctgtggccgcgcccccaccgattgcgcatttcgattggcgttagtggccgtccgtcagcacgccccctccggtctcgcgtcccgattggtcgcgggggccgtcagtccggctccggcggcgggcgcttcccggggctgcggcggggcggagctcgcggaggaagtcggcgggcgtctcgggctccaggtcccggccagaggaggagctcgctgccgggggacgctgggctgagcggccggcggcgcgggcccggcggcggcggcagcggggtccgggtccggagcgccacagtgcgtgaggccgcagacgtggcagggagtgtgggaggggctccgccgtgtggaaaacttaacctccggggtcctgcgcggggggtccgggcccggggtggggcagcgggggccccgggggcgcgaggctgggctcgggcaagcgcgggcgtgggggctcggccgtccgggccgtgggcaggtggagggcgcggcgggggtgcgcgggggaggccagggcgctcactgaactcggtcgggagcggcccccgcgctgccccccgaggccaggaaggcgcagcgtgtgggtcctcggggctgaaggggcaagcgcggggacgtggcctcggctgctaggaggccaggctttcccgtctactctgacgttttgaccttgggcaagtcatttttcgctgccctctgcccctgtgtcatcggtagcttctctgcccctcctctgagcatgggaagcctaaggcgatgtgggaggcctggcgctggtggagggcacggcgagagctgggcaggctgtgggtgatggaagagatcagtaggtgttgggttccttacccgatctgattaggtgccagtcacttaacctctccatgttttcgattcctttagggagtagaatgggagtagctcctatttgccaggcctaaaaacgagtgccgtttacattttttattgcagtctgtggtccgaagacaaccctatgaggcatcagtagggttttacaggtggggaagtggaggcctaaccaagtcagtgactttcttacagaattacaggtaataaagtcttctggaaggcaggatggtagcatgtgttgagtgtccgccagcgtctgccgctgtggtaaaatgagcggagataaatgaaaagacttctggaatgggcccatgaagataagtccgttttactcatgagcagattgagtttggttaaggtaacagtga

SEQ ID NO: 2690 - DNA, 6000 bp, Homo sapiens
gcggcgggcgggacaccggcggccgggcagggagaagccgagggcgagtgggactttccgcctcttcacgcaacctgccccgcgcgccccgaacccggcagaaccgcccctcacgcccccggctttgtccccggcagagccgcctcctcaaacccccggcctagtccgcaggcgggctgccccctcacagccccggcctgccccgcgtgggagaagccgcggttccgggcacggggcggtttttcctcagggacggagcggtccgggatgagcacggaggggcctggggatccgagagcgctggcgtccgccgtcctggagctgcagcggcccgtacgtgattcgggactgaacacgtaagggagtggggcgcgccgctacaccgcaaagccccaaagtggagggtccgggagggcgcgcacagcctcgcccggcgccgtgcagggtggctcctgaggcagccaggcccaagcgtgacctgccccgcacgcgtcctcagggccgccccagcctccagcccctgggggccggcgttcctgggctccgcccccgtccccgcccctcgaccgccgctgctccgcggggactcggggagctcgaaggaactctgggaaagtttcccgctccgccccggcccgagcggaagcgcggatggggcgtggcccggtagctgtggccgcgcccccaccgattgcgcatttcgattggcgttagtggccgtccgtcagcacgccccctccggtctcgcgtcccgattggtcgcgggggccgtcagtccggctccggcggcgggcgcttcccggggctgcggcggggcggagctcgcggaggaagtcggcgggcgtctcgggctccaggtcccggccagaggaggagctcgctgccgggggacgctgggctgagcggccggcggcgcgggcccggcggcggcggcagcggggtccgggtccggagcgccacagtgcgtgaggccgcagacgtggcagggagtgtgggaggggctccgccgtgtggaaaacttaacctccggggtcctgcgcggggggtccgggcccggggtggggcagcgggggccccgggggcgcgaggctgggctcgggcaagcgcgggcgtgggggctcggccgtccgggccgtgggcaggtggagggcgcggcgggggtgcgcgggggaggccagggcgctcactgaactcggtcgggagcggcccccgcgctgccccccgaggccaggaaggcgcagcgtgtgggtcctcggggctgaaggggcaagcgcggggacgtggcctcggctgctaggaggccaggctttcccgtctactctgacgttttgaccttgggcaagtcatttttcgctgccctctgcccctgtgtcatcggtagcttctctgcccctcctctgagcatgggaagcctaaggcgatgtgggaggcctggcgctggtggagggcacggcgagagctgggcaggctgtgggtgatggaagagatcagtaggtgttgggttccttacccgatctgattaggtgccagtcacttaacctctccatgttttcgattcctttagggagtagaatgggagtagctcctatttgccaggcctaaaaacgagtgccgtttacattttttattgcagtctgtggtccgaagacaaccctatgaggcatcagtagggttttacaggtggggaagtggaggcctaaccaagtcagtgactttcttacagaattacaggtaataaagtcttctggaaggcaggatggtagcatgtgttgagtgtccgccagcgtctgccgctgtggtaaaatgagcggagataaatgaaaagacttctggaatgggcccatgaagataagtccgttttactcatgagcagattgagtttggttaaggtaacagtgatgtggatagcctctggagacagaactagtccaagtaccagctttgctcaggttattgttctgtcgtgccttgtcactccagcaaaagaaaaaaaggaaggcataaaagttgtttgaaatgcacaaaagtgtagggcgtgccaagcagtgttctgctgccgttgaagttagtgcaaattggaagttgaggcatctggtagcttcatgctttttgcttttacccctgcccctctcccagtttcagatgactatcttctcttgcattatgtctctagtttccctgttttttaaacataattgggacacacgggttcacagtaggttggaatatatatatatattttgagacagagtctcgctctgttgctccgggtggagtgcagtggcacgatctcggctcactgcaacctccccctcccgggttcaagcaattctcctgcctcagcctcccgagtagctgggattacaggcgtgtgccaccatgctcggctaatttttttgtatttttagtagagacggggtttcaccatgttggccaggctggtctttaaactcctggcctcaagtaattcacccagctcggcctcccaaatgctgggattacaggcgtgagccaccgtgcctagccaggttggaatatttgaacccaggataattggttacttcattggtgttgcacattcgattctgcctcttgtgtcttctctatgaaccttctttgctctgtatccccctttggataactaaatgataatgtatgtgaatctgtcccgcagctcctgtgattttctgggcaaaagcttggtctagaggggcgggatctgaacagtaagctaatggatggagctgtttcctgggtcttgctgttttccggttgggctgctcatttctttcgtgcagacttttggaggttgtggtctggcctttacagtcacgtcacatgtagtcgtcattggcaccgacttgctccttggctgcccttccttttcctcctgtttttcatgggtatgctgttgagcatgcccattggtacactgatcatttgacaggtttcgtgatttgtgagtgtgtgtagacaccactattggtattagatttagaattctaattttgggtttgttgacatcatctttttgctgcttatctcattcctctatccctcctaggctgattttatttggaaactgaatttggattccatctttgcctttctggctgtgaaattacctacttttagaaagcatctcaaatcttatatctgtaactgtcattcacatgccttttgaagaccagtctcagatttcagaggacctcctggagcataaacatggtattccacagataacttaaagccagaaattatttttaaaactaggactttcagcctccctctcactccgggggaaaaagtgattaaaacacaaacactgtttctcttttattccttaacatggttaatgacattaacatctctttgaatgttctactagaaatgccagttatccttgttgctctttatcttttatctttctgtcttgtcaaacaaagccatgttcttatgcacctgcagggtctgctactctcaggcctttgccaattctcacataggttgatatggtggctttctgagttgttttcctgacaatctccatgtctctccaccttctatcctctctcccgagtcactgtcctaaagtgtaaatttgattgtgtaatgaccctgctttaaaaattggatgaggccgggcgcggtggctgacgcctgtaatcctaccactttgggaggccgaggcaggtgtattgcctgagctcaggagttctagaccagcctgggcaacacggtgaaatcctatctctactaaaatacaaaaaattagctggctgtggcggtgtgcacctgtagtcccagctactcggaagactgaggcaggagaatcacttgaacctgggaggcggaggttgcaatgagccgagactgtgccattgtaccccagcctggaccacagacagagtgagactctgtctgaaaacaaaaaacaaacaaacaaacaaaattggatgataccttgaagcccctacctgataaagtccaatttctttttttgaagcccaatttctttatcattatgtgtaaggacctttgtagtctgtggctccaaattccttttccagccttatctcctgtcattcctcatcagggaacctcttgttttgatgaagcccagctttcctgccactctagtgcattgttaatgcctctgtatttttgcacacattgtttccttccgccttactgaatcccatgattctttcaagactcaactcttcgtgaagcctttttcaacttgcctaactctatttatgtttctttactatcataacacttcatgcatgcatttatgtagttgttatattactttatctttagtaacttgtgtttgttttggtagctgccttatgggtaggcttattcacttttgtatcactaatgtctaaaatagcatttaacaccaaggataccataagacaaagctctcatggagtttaaaatgaatctgggacatagcagatacgtaaaagtagttgtggaatgaattgactgtagaaaaagcctttcaaatatataaaattatattctagaccataagtagtgatctttctcttgtttttcaaacattcctttctttctttaggaaaaacatagaacggaaagcccagcccatccttgttggctgtcatacacgagtgctgtctccaagggagtcacaggtgtctcagatgtgagaggatcccggggagattgagcttactgcctgggaacttttggatttctggagaagcaggctgtggtagcctggctctgcgtcagtgaatacctgggaaaggagctggagctctattttgcttgctttctgcattcgtttcttttagagctaatggggacacaatattttgaagtttttccatttcgggtctacagcatttagtggtattttccttatagttatgttttccaaatacttctcaatttctttggttctgacatttcacaatgattttaaaaaaatgtaatatggaaattaaacttgaggttttcagaagctgctttcaaggtgtctagatacagagtgaagaatgtcacagtaggaagtgcactggactaggggagtcaggagacccgggttcttgtgttggcaccatcactcatgagctacgaggtgacttcaggcaagtcctctctgagccccagcttaatcatggcacaattgtaggattgctttgagggtcagacgagaatataggaaagaactgcaaaagctgtaaagcacttaggagctctgggagagttgagagcttcaaagccaaggaagacagcccacacttcagaagaagtgctgcagctgcacatttgttcgtttaatcaggaattgtttatgaagcaatgtgtgttacatgctgggtgtgagtacctctctactccttcccactagagcagagagcttttagtctgggatggaagacgtattaaatacagacttatacaaataattgttattaatataatatgtaatacagtgcaattaaaaacaataattcatataagacacatgttaaatgcacacttacacaaagaattgttacaagtatctcgggtgtacagggcggttttattcctgcgaagtgcttcctggcttgagtgaatacttttatggtgctggagttgagagataacacagttaactgttgaaattgggccattcccgtttcacaggctgccattggacctgtcaagtgcctgagtcatgtgataatgggctacattgcgcagggcccctgggccatctccacaggagatgccagaggacgagtgcccacttgctggtcttcacagagcacgctgaaagtaagaggcatgtgggaaactgaccagggcggttagctgactccaaaattgtccagattagcaaaactgccctctgtggatctttgttaaagttgggtatggtattgtagcagtttctccagtcaggtaccttgtactagcgagtcaacttgatttttttttgaaaaagcaattatttaataataatatttacttcca

SEQ ID NO: 2691 - DNA, 6000 bp, Homo sapiens
ctccggggcatatgccaccatgcccagctaattttttctatttttaatagagacggggtttcactatgttggccaggctggtcttgaactcctgacctcaggtgatccacccgcctcggcctcccaaagtgctgggattacaggtgtgagacactgcgcccgacctactggagtgttttttaggatctgtgaaaatatgatactggtagaacctgattttattctcttttgaccatctcctataaaggctaactttaattcttttttttctttttcttttttttttttttttgagatggagttgtactctcgtccaggctggagtgcaatggcacaatcttgggtcactacaacctccgcctcccgggttcaagtgattcttgggcctcagcctcctgagtagctggggttacaggtgcccaccaccacacctggctgatttttatatttttagtagagatggggtttcaccatgttgccaggctggtcttgagctctagacctcaagtgatccacccatcttggcctctcaaagtgctgggattacaggcgtgagccactgcacctgacctaattcttattttttaagaagtgtatctttacattttagtgtttcatgccataaggaggtagctagatcttacatgcagtaacagatgcagaagcatggagagtcttggttacacatggataagaattacctgaaagaagatgagtaatacaaaaccaagtatttcagtaccgttgaaacaaaattctaggcgcaattgttgctgtagtgttttgctaagggaagatatgaagttttctcctctaaaggtcctgaaaaggaattggcttctcttccatttgggggctgggggagtcgctcctgtcctttcaagtcagttctcaataccaaggggctcggggggctgagacatgtgtgccctttggtccttctttcaaggaaactgcagcctgttttattatcatgatgttttgcttctagttatgtgcttttcatgttatgtgctttttactacaattaaaaaaaatttaaccatttaacaaaaaagaaagttataaaagttttttgttatttaaaaaaatatatagccgattcttaaatacttttgattataatagaaatataaatggcctggagaaagttaaggaacagatgccaaacctcagtatatccactagtgacaacttctttttttgctgtgtcgcccagattggagtgcagtggtgcgatctcagctcactgcaacctccacctcttgggttcaagcgattgtcttgcctcggtctcctaagtagctgggattgcaggtctgcaccaccacgcccagctaatttttgtatttttagtagacttactaaaaatgtcttgccccctcctccacctcccaaagttctgggattacagacgtgagccagcgcgcccagccacaacgttttcttaaatgagcatttcatgaccaagtcttctagaaagtataagtagaaaaaaaaacttaagatcttaaaatgtcacttaggattcttcaattctaaggaagaaaaatgcgaagaaattgaaaggacaaagttggggggcaaggggaggggggaacggttggctggggtgttgacaaaatcgtgtcactatgcagaaacttgagtataatgtgctggctagcttgtagaatcggtgataactaatgaatatcccctttcttctacctgctggtatgaaacagtgagacggtttaagcggaagcatcttactgccattgactgccagcatttggctcggagtcacttggctgtgacccagcccttcggtcaaagatggacaaacagagatccgaaccatggtctctatcctaaaccgagaacaaaaagagggagtaggggtatgtctcctctaaaactcttgcatttcaaaacctgtagtgtgtgggtcctttgactatctcctagtttaaaagtatttgtaaatgttgctgctgtgagtttgtagtcttcatgcaatagcttgacactttttttattgtgagttttccatgaagttttttttttttttttgagacggagtttcaatcttgttgccctggctggagtgcaatggcgcaatctcggctcactgcaacctctgccttttgggttcaagtgattctcctgcctccgcctcctgagtagctgggattgcaggtgcgtgccaccacccccagctaattttgttttttagtagagacggggtttctccatgttggtcaggctggtctcgaactcctgacgtcaggtgatccacccgcctcggcctcccaaactgctgggattacaggtgtgagccaccgcgccccgccgagttttccatgaaaattctatcctattatcatagtttgtaaaagctgtggacaagtgtgatggaatgaatcctattagcttgtgtaattataaagtgatagaagacatgagccagtgtcactcttattccaatccagaaacactgagattagttgactcttcattcatcttctctgtccaatctgtcactaggtccatgtgtcattgtttttcctccaaaatattccttcatcctgagctctttgtcacctaggacctggactactacagtaaccttgctccttgacttcagattttatctctgctaaatcaactggaatgtccccactatgtaccaaatgaattcccactttagttaataaatctagattgccttatttccctttgatacaactaatttcagaattcaactcaaatattatctggttgtcttttttttttttgaggcagggtcttgctctgtcatccaggagtgcagtggcaccatttcagctcactgcagctctgcctcccagctcagcctcccaagtagctgggacttacaggcgcgcgccaccatgcctagctaatttttgtatttttttgtagagacagggttttgctacgttgcccaggctggtctcaaactcctgggctcaagagacccacctgcttccgcctctcaaactgccaggattacaggtgcgagccacctctcccagcctggttgtctttaactattgtatgtttcctgctgtgggaactactataaccaactgtatgaggcagtttgaaacttacttatatcctgtctgatactgagtttgttccatatatagaagtctgtttcttctctattttgagttttttactgacaaggacttgtgaggtggccctgaccacgtggtgacatctcagtgactgtgggtgtgactggattcaacagttggaagataccaggatttggctgggagcagtagctcatgccttatttgtaatcccagcagtttgggaggttgaagtgggagaattgcttgagcccagaagtgccagcccagcctgggcaacataatgagaccccgtctctattttaaaataataataatattttttaaaaaagaaaatgctaggatttaaccctgatcatatggatttaacctgtagtaatagtgaagtcaaaactctgggtttctatcagattgcccaagaaacagttaaccgttataattttttttttaaattttactaatatagaaaaatatctgtttcagtttcataaattttgttaaaggctaaaccgagtttcagtccattctcttccaaagtgaatattttggatacagccatttagaaaggaactatgtattattgataaagtgtttacttctttggcatttaaaaataatttttaggagtttgaaaatgttccctatgttcctgaaaagtctgtgaggtttttcactttacatttgtctcagaatcattggtgcttagtaaatgttcactgaacaaacatgtagaagagattaggtaccactctaacactataaagagaattctgagtcccgactttttattttaaaaataaattaatgtgtcaccttcacaggaagaaatacaaataaaagctgggcgcaggggctcacgcctgtaatgccagcactttgcgggaggccgaggtgagtggattacttgaggtcaggagttctaggccagcctggccaacacggcgaaaccccatctctactaaaatacaaaaatgagctaggcatggtggcatacgcctgtagtcccagctacttgggaggctgaggcaggagaatcacttgaacctgggaggtggtggttgcagtgagccaagatcacaccactgcactccagcctgggcgacagagtgggattccatctaaaaaataaataaatacataaataaaaaagaaataaaaataaaagttttagcactgtcaaatgagaagagtgagattttccgaatcctgatgaccccaagcatgtgaatttctgcttaagcacatgtagacttgctgttgtagagttagtgggagcggggcactttgtgagtggcggtgtggttgtgagcagtcacctcctttttgtctgtccattcagatgttccctgtgcagcgtgtttctctgtacttgtttttactgcagggagtattgctggccatcacatcatgtgaagactggtctctgtctctttgcaaatgtgtgtctggtaatatgatagagccaaatataaatattgtttggattagttatttatataatcagttggcccataaatgtgtttttatctctttccactattaacatagataattgaaaattagtgtgtcttatatggattaacagcaggtcaacagtcatcgttcatttcttgtccatcctgtttgggttctctctacaggtcagggaagtcaaagatgcatccctgagttcttcctagcaggcaagcagccgtgcaccaatgacatggccaaaagcaattctgttggccaggacagctgtcaggactctgagggtgacatgatctttcctgcagagagcagctgtgcactgcctcaggaaggcagtgcagggccgggctcaccagggtctgccccgccctccaggaagcggtcttggtcctctgaggaagagagtaaccaggctaccgggaccagccggtgggatggagtttctaagaaagctccacggcaccatttgtctgtgccatgcacaaggcctagggaggccaggcaagaagcagaggacagtacgtctcggctctctgcggagtctggtgaaaccgaccaagatgctggggacgtgggtcctgatcccattcctgactcatactatgggcttcttgggaccttgccctgccaggaagcactgagccacatttgcagcctgcctagtgaggtcctgaggcacgtgtttgccttcctcccggtggaagacctctattggaacctgagcttggtgtgccacttgtggagggagatcatcagtgacccgctggtgagtgagtgctggagtcgggagatgtttcctctaaaagcacgtaactttgcttaatgcacgcttataatcagaggatcttttcagaaatggtttccatttgccttcagaagacattcagactccttagaggcatttaaggccttccgtgtctgccccaccctatgactctagcctctttgttcacttccactcaacacagcttccctgagttctgtctacagctcatctgctgtgccctgaccacagactgcacattccttcccctccctgggttgctctcatcctcccaccttccccacctggagggttcctcatatctcccttgacttctttttttttttttttgagacagagtttcccactgttgcccaggctggagtgcagtggcacgatcctgactcactgcaacctctgcctcccaggttcaagtgattctcctgcctcagcctccccagtagctgggattacaggcgtgcgccaccacacccggctaatttttgtattttcagtagacatggggttttaccatgttggccaggatggtctctgaaactcctaacttcaagtgatctgcctgccatcagcctcccaagtgctggggttacaggcgtgagccaccatgtctggcccattttttgtttgtttgtttgtttgagt

SEQ ID NO: 2692 - DNA, 6000 bp, Homo sapiens
cagactccatggtacgtcaccccaaatccttcagcctgtggctcttgagaataagaacattttcctatataaccacagtacaatacccttcctcagaacattttgtgttcatatagtactattagctgttacacagtccgtgttcagatgtccccagttcttcccatagtgtcctttatagcttgtagaatagggggacaggggcatccaggatttatttgagggtcgtccattgcgttcagtcaggtctaaagggtctcctttgatatatagatcgtttgtctagccttttgcttgtcttcacattgatggttttgaagagtccagcccagttgttttgcacaatattccccaatttggaattatctgattgtttcttcatgtctacattgttttgctgctttttttttattttttattttttcgtgtctggaaacttttctacttttgtttttgagactctgcctacaacagatttgtagaaaatgtagaactgtttttctatgctttttatcttttttaggcagaggaatattttcagtggagcaaattaccctgtggaattacttccagaaatagaattccactccacataatcagcattaagccatccaccatgtggtttggagaaaggagcagaaaaacaaatgtaattgtgaggtaagagagcaatatcataggtcttctgagagaaactttgagtaaattgtctgatttaatttcatttaagcacagtctagcctaagcccaagaatataattatatattataattaatttcttaaatttaaattttatttaaatggaggggatgctactcccaaaccagttacactcccatcagctggtgtatcctgaggttccctctgggtaggttgatgagatggttggagactgaaggcatctgagtgcttggcttagagtaacaaattgatgtcatacagaacagaacccttggtggagcagaggagtgactatcatgatcacaatattttagcaatatttccttaactttggctgtttaaaatttctgcaacaggtccctccctccctccctccctctcctccatcccttcttccctccctctcctttctccccccccactccctccctcccatctgagtgcttggctaagaggaaaaactgatgtcagagagaacagaacccttggtggaatagaggagtgactataatgatcttaatattttagcaacatttccttaactttggctgttcagaatatctgcaagaggtccctccctccctccctcccttcttttttttttgtgtggagaaagaatctcactctgtcactcaggctggagtgaagtggtgtgatctcagctcactgcagcctctgcctcccggttcaagtgattctcctgcctcagcctcactagtagctgggattacaggcatgtactaccaccatgccgagctaactttttgtgttttcagtagagacagagtttcactatgtttgctaggctggtctcgaactcctgagctcaggcaatccgtacgcgtcggcctcccatagtgctgggattataggcgtgagccaccacacgcggtctacaacaggtttccacttctggaaaaggttccctgctatcccaagaagaaattcctgatttagggtgatttcgacacttgctgctgaagcgagcccattagagtggtttcatgctagaatagcctaaatgagaagggccagctttgcttagttttagttttgctcagtgatctttttattttgtgttttcacttccctttaggactggagagagttcatacagagcttgtttttcttttcactcctcctacagtgaggtaagaggatcccatatactcataacccttatcgctcagtgttctgcagccttggtagttgacaggtagtcccctgactctcagaagcatctctgtttctatgtaagtttcatttccttttagtttttttttcctaaatgcagttcatcctcattattcatggattcctttttttttttttttttggttgagacagtgttttactctgtcgcccaggttggggtacagtggtgtgttctcggctcactgcaacctctgcctcctgggttcaggtgattctcctgcctcagcctcccgaatagctgggactacaggtgcccaccaccatgcccagctaaaatttttgtatttttagcagagacagggttttaccacattggccaggctggttttgaactgacgtcaggtaatccgtctgccttggcctcccaaagtgctgggttacacgtgtaagtcactgcacctggcttcatggattctatttttatgtgttggcctactcactgaaactgacctgtgacctcagtatcaatatttacagtgcttttgtgatcctttgtggacttgtggagagtggtgaaaattttgaatcacctgacgtgcacgttctcggctcaggtagaacaaggcaatgctctgccttctttcagctcttactctgtcaacaagtgtatcagtctgttctcctgctgctctaaggacatgcccgagatgggtatgaggaaggaaagaggtttaattgactcatagttccgcagggctggggaggcctcagggaatttacaatcatagcaaacacatccttcttcacatggcggcagcaagaagtgcagagtgaaagtggggaaaagccccttataaaaccatcagatctcgtgagaactgtcattagaacagtatggaggtagccacccccgtgattaaattgcctcccactggtccctccgacacatggggatgatggaagctacagttcaagatgaaatttgggtagggacgcagccaaaccatatcgaaagtttcctttttgccatctattaagtgccatgtttttcatatttttgtgctttttgttggtgatcttatttaaatggtgaccagtcataatactgaagtcctatcgagtgttcctaagcacgggaggactgtaacgtggcttctagagaaaatatgtatgttagataggcatgggttatagggctattgaccatgagttcaatgttaatggatcaaagtgtctattaaataaggtgtctttcaacagaaacacacataaaacaaggttatgtattaattggctggtgaaaacgatgtcaccaaaggatggcaggaaccctgtattttccctagcagcaatggctcagtatttgctaattcagcatttatggtgactataatttatagagtataactactgtgaataaagagaattggcgctattgatgccttattttaaggcaggcatttgataaaagggagtcaacttatataaatgagagggggtgctcctttattgggtgtctcttatctccttggggccatttcatctctgagaagtagtagtgaaccatttctggtataggcttgactttactttttttttttttttttttttttaaatcctttattcccttcaaaagtctcagatttctaccagcctcagctttgtgcaaatcaaatcggtgttgggcgggcaggtaatgatttctatttgcatgcctcctgtgaaggtacaaaagatactgtttgtgaaaactatttaaagaatagatcttcctgcctttccactgtcttaaagtagcccttttatttttatgtagagttattggcaattcttgggtttctgcctctttcagtttggtgggatactaataattacattgggttctagtctgtccatttgcagaagggcataaaagtctttgtgttctcattatcaacttagtaatggatgattttttttttaattttttaatttttatttatttatttttttgagatggagtctcgctttattgcccaggctggagtgcagtggcgtgatctcggctcactgcaacctccgcctcccgggttcacaccattctcctgcctcaacttcttgagtagctgggactacggcgcccacgaccacacccagctaattttttgtatttttagtagagacggggtttcaccgtgttagccaggttggtctcgaactcctgaccttgtgatccacccggctcggcctcccaaagtgctggaattacaggtgtgagccaccacgcctggcctggatgattttattgactgtttcaccagataccaagctaagcacttcacatgcataatctcatttatacttttaaatgaagaatctaaaattagagacattaggtaacttgactgagatcacaagctcaccaatgtctaataagagacaaagctgaagttcctctaggttgtagagatgttttgaggaatagtgacagagttcctctgtttagcattctgaactttgcaaaaagtcaaggtattcatgaagtttttgcatgtaattgtttgtttagaattaatcattgggagaggcagtctatgtgcacagtctttcaaccctcactggccacataagaatgggacacttccttattgagagagagcgcacgcgagtgagagagagcaagcactcccgttagcgtgagcacacagcctgcggcagctcagtaccttgtgtggaaacatctttctctgcttcgtacttgatgtgtgtccctttgttctacttaagcctgtgtgtcaatggcccttaggcacaccccagctgtccttatttcagacagcatgatgggggttccttcctgtgtggcaggagagggttgcatgtaggcaggttgccctgtgttggctgcagggagagacacactggtcactggagaccagtgcacattgttggatttgatcttgcttggtcttttctcagtaagtgaagcattgctccctccagtgcttgactgcattgtgttttccttggtgactccaacaccaaggtacaatgggcagtgtttggatccttccctggaatcagtgacgaatgcatggtgttctgcccaatgagaatgaaccatttgaacaaatcaagtaacctcaaaggtgtaattctcttggcatcgttaatgattattggtaggagtaaataagtgcaattcttttgttgttcttttttggagatgaggtgtctctgtgttgcccaggctggcctcaaatccctgggcttaagcaatcctcctgcctcagccttgagtagctgggatcacagacatgtaccactgtgcccagctaagaaatgcaattctgagaccttgggtttttgtgtatattatagttaatgcccagctaaattctaacttatttgaaaagggatttgttaaacataagcaactgaccttcttggacaaggaaagcaatatattaaaaaagagaaaaaaaaaagaatctttgagtcccattggtgattctcagctcttactgtggatcagaatcacctggggaatatttaaatgtactgatttctaggcccactagtactcagtgttcaggagatctttgggagtgaggcccaggcattggatatttttttcccaagaggtccctggtgatccccacgtgcagccagcattgagaaccacagccataagagagttctgcttctctttccccagcctccctttatctcccctaacaacctgtttcatcgtagagattgttgatccatgtgattttcctttttctagattaaagatttcttgagctacctctgtcctgtgaacgcatatccaaatgtcattccagttggcacaactatggataaagttgtcgaaatgtgagtagtcactggttgtgggacttggtgtcccccttggtggctcttggctaggacacaaaggagagtttgcctgaatgtttacaagtctagaatctgtttgttttgggacatttctgaactgatactcatttccattttttcctggagtgtttcctttagttccacagtgtggcagaaggtataggtagtgttgtcagcttctcctgggttgcaacccagctccgccacttactaacagtgcagtgtgagcttggccagatcacttctctgagctagtcattctgaatcagcaaaataggaat

SEQ ID NO: 2693 - DNA, 6000 bp, Homo sapiens
tgatatctatagctttaattattttttctagcattatctattactatattacagtactatctaagcgaaaagtgatcagattcaagatatacggttttttgtttttttgtttttgtttttttttagacggagtctcgctccgtcgcccaggctggagtgcagtggtgctatctcggctcactgcaagctccgcctcccgggttcacgccattctcctgcctcagcctcccgagtagctgggactacaggcacccaccaccacgcctggctaattttttgtatttttagtagagacggggtttcaccgtgttagccaggatgatctcgatctcctgacctcgtcatccacccgcctcggcctcccaaagagctgggattacaggcgtgagccaccgcgcccggccaatttacatgttttgaatgtagagccatcaggacttgtcaaattgttgaatgaaagaaaggagcaattgtgtgctggagccagctcattagagctctggagactcagtaattaaatttttaggaatttttctgagctcgttgttaaatacaagccatgagctggagtcaatgaagatgacaagggcctcgggcacctgccccaaacaaaacaaaaacacaagacatatcacaaattaaattatataaacttctaaataaacgagtcatactaaaacaaaggcaatacttagtaaaactaaaaacaaaaaactatttacttacaactcccaaatttctctcttcagcccggtctttctctgaactttagatttgtatatcaatgtatattcaacatccacttgattgtacaaaacaacctccccaaacacctccctgccaaaacaaaaacaaaaaccctgctccttcttcatgtcttttagtagatgtggcctagagccctctctttccatatccatcaatgcaacctgctgactttatagcttctactcaagccatcataatttttcttttttctggtaattacaaccgttcccaacagctctctatgccccctctgtagtctgttgtcaacacaacagtcaatgcaatctgtttaaaacctaagtcaaggccgggcgcggtggctcacacctgtaatcccagcactttgggaggctgaggtgggcagatcacgaggtcaggagttcgagaccagcctggccaatatggtgaaaccctttctctactaaaaatacaaaagaactagctgggagtggtggcgtgcacctgtagtcccagctactcgggaggctgaggcaggagaatcgcttgaacccaggaggtggaggtggaggtggaggtggcagtgagccgagattgcgtcactgcactccagcctgggcatagagggagactccgtctcaaagaaaacaaaacaaaaaaacctaagtcaaattatgtcagtcctctgctcacaaccctgcaatggcttcccatcttatggagagtgaaaaccagaggctatacatggtgagcaaagccctgtaagatttgctcacaacaccctccctccttcctctgtagccccggatcattctgctgcagccacactggcctaacactgcctagcacacagtaggtgctaaagggatatattttgaatcagtatatttcatcactgcccttccgatgctgtggaggcagcatggcacggtggctagcagtgtgttgtcagagagcacagtgtctaaaagtgtggtggccttcttggatttaaatctgagctctacttactatcaacatgaccctggacaagctacttaacctccgtatcctcaactggcaaatgaggacagaaagtgtacctatctgatgggcaggtaggatgtgaggatgaaataatgagtataaaacactgataacatctggaactacataaatggtagacagtaattacttgcattagaaggtacactcccacgtccacagggatttttgtctgcttttttagttttatttttttgagacagggtctcttttgtcgtctagactggagtgcagtggtgccatcttggctcactgcaatctctgcctccaggttcaagtgattcttgtgcctcagctcccaagtagttgttattgtaggtgtaccaccacacccggctaattctttttgcatctttagtagagctggggttttgtcatgttggtctttaactcctggcctcaagtgatccacctgccttggcctcccaaagtgctgagattacaggcaggagccaccaggatgggccacattttttgtctactttgctcactactgtatctttagtgtctaaaatagtgtctgatacacagtagatggtcagtgaatgatttgctgaatgaattaagcttcaccatcacatttcctgcagtattgcagcagcttcctacctgaattcctgccccagacttcttgagtgttgtgtttttttgttttgttttgctttcgagatggagtttcgctcttgttgcccaggctggagtgccatggtccaatctcggctcagtgcaatttccgcatcctgggtacaagcaattctcctgcctcagcctcctgagtagctgggattacaggcccctgactccatgcctggctatttttttttttatttttagtagagacggggtttccccatgttggtcaggctggtctcgaactcctgacctcgggtgatccacctgcgtcggcctcccaaagtgttgggattataggcatgagccaccacactggccctgaatgttctttagactcgaatccagtggttctcaaactttagggtccatcagaatcacctagaaggtgtgttaagctgcaaactgccaggccccactctcccagagtttctgattcactaggtttggtctgggctatgcttacctatcttgcctattttctatcctgtctttctctttgtcctgactctatttccctttgtttgtactgtatccattgtggaaagaggaggagataaataagtgagcaaatacataagatcacgagcattaacttgacctgcctttcctggagctctaccgtgagattcttcggacactagactcacagcagaatttgttgttaggtctccataaccctgccagggcagttgttcccatgtgttctaagacaaaccatcaaaggtgttgccagtagtatactagcaggatattttacctcaattagtgattatgttgtgtatacctttccatgtcacccctcctccccctcctcaagatttcatggaaatctgtatttgaatagaactctgagtatcatggctacaggcacaagctgacattcactagggatgtcattctgttttgttttgtttttttgagacagagtctctctctgttgcccaggctggagtgaactggcatgatctaggctcactgcaacctccgcctcccaggttcaagtgattctcctgcctcggcctcccgagtagctggagatgtgtgccaccatgcccggccgatttttgtatttttagtagagatggggtttcaccatgttgtccaggctggtcctgaactcctgacctcaggtgatcacctgcctcagccctccaaagtgctgggattacaggcatgagccactgaggtgggctgggatggcattctgattcctgatttccctggtcagaaatctttgttcctggatttgttctcacgttaccttgcgtctctgtggaagcatttatttgccatattctgcaaacatgttgtcgccagatagattgaatgctacccgaaggtttgtcacagtgctgtgcacaaagtgggacttcaagtgttatggaggcctggaaagccaggtacaatggctcacccagcactttgggaggccgaggcgagcggatcgcatgaggccaggagctcgagaccagcctggtcaacgtggtgaaaccccgtctctgctaaaaatataaaaatgagccaggcgtggcggcgcgtgcctgtagtcccagctactctggaggctgaggcaggagaatcgcctgaacccgggaggcggaggttgcagagagccgaaatcacgccactgcactccagcctgggcgatagaactagaccccaactgaataaataaataaaataaagcgaaagtgttctgggttgtttgtgtttaattatactaaggagatttgataggaaggagcacaataaatgtcatggtgattatttggtttattgtaatacaataaaggaaatacaataaaaggtttaacaaaccttttcataaagttgctttggttgttaaaaaattttagacctttcctgccatttttctttttttaagtacatcattctaacttcctaaaagtatagctcaaaaaggtgggggcccaggggagaggccagcagcgaaggcattattgggatcttatttgccccaagatcacgcagagatgatttattcagtttgtagattatataaacggaagagggaattaatagttcctgaatctaccatgagtcagatacaaactttctcatacaaccctcacggtaatcccacaaggttagaaattgggaacagaagagagagggcggggaactgagctcgggtttcaggctagcagcagacaagcaggaagcggaacgaagaatgatttctaagcgcagttccgcagcccactcacctcgtcggctggggccacctgctctgggagtttcgatttcccttcccgcgactgcacctccacagacatgggcaacgccttaccagagcaacacctgtgtttgttgggcgggaatgagccttgcactgggcagggctcagggcccatcgcgtgcagcgaagcgcgggtgatttaaacccaagcagcgggcgcctagaacccgaccggatgctccttgactttgcccccggtctccggactcctctgattggacgtggctgcgttcggccgcccaatggcgaggcagcgcgcggcttcccggaagtggcggcgcggtcagggctggccttggcttcagctgcggttttggggtcccggactctgggatcggcggcgctatgagttctttcgaggggcagatggccgagtatccaactatctccatagaccgcttcgatagggagaacctgagggcccgcgcctacttcctgtcccactgccacaaaggtgagtgagggctgcgcgtcgcccgctcccggggcgctgggggctggagagaggacaggagggggccggccctggagcaaggagctgcagcctgtgggaagccagcgagggggcggccagcacacgccttgtcccagtcgggctcttcagcctctcaaaggcttcatctattttcggatgtggtcaacgcggcgtaacggcgcctgccagttgcgccccgggccggcttggtcaagcactgctagtagtttctcttggtagctttgctggtggccgatgatcagagattggcgagggttagtacttccctcagagcctcgctaccatgtatgaagaaaacaagtttcagatccatttgaccacaccctcaaacattggtcagcaagcaggagactcagacacacacacaactgtggaacagcccgcctaagagctccacgaagtgcaagctccttggcctttgggtgttctgtccgtatccaatatgaaagtttcgttctagtttaggttggagggatgtttcccttctagatggtatcaggcaacctgaaaagctactatgatttcacagctggatcctttcacagctgggccgatttagggattaaggttagagtgtcgctgatgctccaagcagagattggagctaagttccagagtttaaataccgctaacttgacaaccattgttcattttcacttctattgtgctaacaagtcactaacttttaccagggaaaacagttttaatgctcattgtgctaattcgcccagccattagtgttaattggagaaaatgataaacggaatcactggagttgctgcctcctgctgtgtggccttgcagcgtgctggagcaggaagctcccactaccctgtggagt

SEQ ID NO: 2694 - DNA, 6000 bp, Homo sapiens
tgtactccagctgacgtgacagagtgagactttgtctcaaaaaaaaaaaaaaagtaaaaaagaagatgaacaacacacttactttatttgggtgcagctgtgacttttacatgtatagattaaagaaaaaaatgaaagtgggaacatcaaaaacactatttccttcctagtaatgtaaatatagtttaagtctagacttttttcccatcataagaattctttcataagaaggtgcttcttttgtccagcctttcccacctggtcctggggaagcttgggagcaaactcagggctcctggttctttccatcagctggcgtgcagaaaccaggctccttacagaggagacctactggtgatgaacccaaaaaatggagctcagacttaaatcactcacacaatttttatttatttacctttttattgttcaaaatgatgagctttccttctccttatctttttttttttttgttataagattctaaattaagaacttctctgatgttgcagccaccctcattatgggtcatttttttgtagcgaaccttaaccatttttatccagtggacagagctaggagcagtgctttaaagtcatatgggtagaaggagtaggaaatgcagcaagaggtaggctctaaatgagacagaacagaaagtttccagaacccatttctggatgaccccatttgaccattttcaagtcacgcttctctgtctgtgtcttccttttccctaaccgaattatgaacttcattcattcattcagcacttaacggtctgccatgaggaggcattataccagtctctagtgctataaaaatggctaagacagtgtttgtccccaggtggcttccagtccagtggaggacactggtatggatttcacaatatgctacacttgatgggcactgtagtagagatcccaggtgtgtccaagatgtcacgggattgggagggcccttggaagacaggacacctaagtctggctggtcatgggaggtttctgtgcatggtggtgctgcatgagtgagggtttgaaaggtctgctgaatgtgtggatatgtaaggggaaggatttggggacagtacaggaatgcaggtgcacagagatgaggaggctgcatacatggtatggcacggtggtagctagctgtgtctttccacttatttattttgaacatccttggaatgctgaaaattcttctaaaataaattaactttaaatggcagcaactagctttcagggttccattgatgcggcaccctaataggttacaactgggggaagcattgttcctggtgtcgttcaactggttgtgctgggtctgagttgcttctgacagatgattattgcagtctcagccccaggccccacagcctgggccagattctcattcctacctgaatgtagggaaaccagggagtgttttctctgtctgcatctgactggaattgtaggtttatgtttgttcccagcttctcttgtaattggctgccagtggagttgacagcaggctgaatctggcagttgtgtgaggagctagaaacacagccagtgaacaccatgcccaccacttcgttttatgtggctgcagctgtgactattacgtgtgtggattttttaaaatgagagaatagagaacatgaaaaagttatttgttttctaaaagggtaaatattggactatttactgcccccttctgctttttctcagttaactggtctactttttgaaataacagaatttagacattttgaggtcatttctaatttttaagatttcagctcacttggcccagattttaattcttacccactccctaccaattttaagtcaatctgtatctatttttgttactatcatgtaaaagactgccatacttaatgacagtttactatttacaaatttgtgacagaatttttaaattgagatattccagcaggtaccatctgaagactaggtatctttactcctatggtgagcacattattcataataattaactgagcatccatttgatgagctatcatagtttctgtttaagtatacatgttcaggtagttctgttaaacagagtacgttgcaatatgcacattgcattgggccacatacgtaacttgctttctcttctttcagtgaacatagtaatagtatctgctgcagggttgtcgtgaggatttcagaaaatgtatgtggttttatataatactatagtagtttattaagcacttcctaatctaggttctgtgctaaggtgctttatatgtgacaccttatttaatccttcccagaacccagtgaagtaggtgctgctgttctccccatctcagtggaggaaacttagatgctgatgaagttaagttacttgctgagggttcatgagctagtaaatggcaccaggatttgactatagctagtctgagctcagacttttgtgcctgggcctgcacttctgcatatgtcaaacccaggatgtttatatacagaatcctttatatctgctggccagacagactactcagcctgccagactacagtacaggctggttagacatgttaaagagagcccttaaagtctcttggcagcgtctgggatgaggaaggcacgtttctgtgtatgtgcagatgaacctggttctccccctttccctagtgtgttgtggtgtacttgtcggccccatctttagctgtgctgcttcagtggaccctcatcagatggtcaggtctattttggctacaagtcacatgaggaagtattgcttatgtaacagaagaatctcttcgcctgagctctgtatgcatgtggttttataaccatgatattttctgtctttaatatgtgtataattctactggggcaatttgtcttcacaatgatacaaatacttgcaggcaataatgattttccccaccacttttagtcatcctttagccaaactgaataaatgtttggcccttttcatctttctttatgaagcggaaggcactagaatgcaatcgtttctgtagtggcttatgtggtttcctaggtgctgagttctgtggcgacaagatgcctgtatattttaggagggagggaggaggaggaaactgaatcttgtcgatgcagagtgatgtggtgggaaatttagcagccacaaagattgactggctaagtctaaggaaatggtcatcatatatcaataaagtttaaaaagtgataccctgtatataaaatatttaatggccttgtgccaaacttcaaaaggcaatatattctggtgtttttatttctccttctgtaaaattatcttggagaaattgcaaagtgaagtatgtttaagtggctgtgattcttccaaggtttatgttatccacaagtttgctaaatacaagtatcctttgttatgcagaagtttggctctgcgttcatagttttgataccgaggactctctcattatgtaaactcctcgactgctgaatttcagagtgagtagcaagaattcagatatgtgtatcaggaaagtgtatatatatcaagaattcagatatgtgtatcaggaaagtgtatatatatctgttcagtttctaagttttgatagtaagggatacctatatgccagggcttcttggctttgacattattgacatttgagacttgataactttttaccgaggggtttgggggctgtcctgtgtggtgtaggatgtttagcagcatacctggactcacctgcaagatgccagtagtagtatatcctcccgactccttccacagttctaacaaccaagaatatctctgggcattgtcagattaccccagggtggggttgaagggacagaattgccccctgtcaagaacgattgttgtacaccattgcatttaactaaatttgtaaataacatgaaacccagaagacttttatagccacctagagataattcattttgtccattgcatggagataatttttaaggaaaaaaaataccagtggagaagaagagattgcctttagaagttaagcacaaaaaggacattaaatttttttataaaaagtatcacttattaaactgttgttagatgatagctatttccttagacttggccatatactgcctcttccatttgctgttcttctctggaaatgaccaacagtgcttcattgatcttatttataggtcctttactaccgtgtagtgcaatttcagataaccagttcttgttgatcacaagtaaatttcagctagcccttccttttgttaccttgaagagttgaaattttcaacaaggcaagagtttatcagaggatgtgctttaaggtccaccagtagctacctacatactagcattgggctctgtgtggttttgtaatggatactggacaacacaccatacctttggccaggcagcatgtgtagtattaccctttcattttctcttgccttccctcggacattctctcttactcttgcatagtcagtggcagataaatgccttatatgtgttgctgctcttactcgcttcctatgagttttttttttattgtagtttgaaagcatttctctgtattattgttttattccatttccaccattttgtgaaattcagagcatcagttgcaccatgctgaatgaaaacatcatctttttattttgaaagtgaatagaatttgaggctttttttttttccccactcacgacaactagagtccattatagttatgtaaatgcaaaattagtctggttaaatgggtgcaccttctccacaaccttggtgtattgctaagactttcagatatttagatgaaatatatttccttctgaaatataagtgttcaccttattttatatctgaaagtatcatattactaaatttgtaacttagattttattcagtgaacacatttttttgagtggtagcactatcagtgcttgtatattgctgatgcctcttcccccagttaagtaatcagtaatgtgaacctgattcagtgattttgaccccaaatttgctttatgtttaaggggctttgttgttttatgctgtgactatcatatctttagaacagaaatagtaattataaatctattttttgttacatagtattgcggttgtgaagacactcaattatattgaaatttttactgaatcttttctaggactaatttcatgtcttacgaaccagcagagaaattttcccttagggtatgccagaagaggagcaagtagttttgataatgaaatgagaccttaaagaaatatttctagagcagctataataatttacataagaaatgaattgagatggctggagaagagaattgtttttcctctttgaatatcagtgttttgggtaataatggcagcattaacctaagagaccgttctaatttgcctgttttttcttgtacattatcaggagctatctttttaaatctgtcttgtgatcaaaataatggaaatgtgatttttattttcatggtaggagatggaataaactgagactgcaggacaaagagaaacgtctgaagctggaggacgattctgaggaaagtgatgctgaatttgacgaaggttttaaagtgccaggttttctgttcaaaaagctttttaagtatgtaccatatgttctttcctttctatttgctatcaagccattatgtacaaattaacattttaggaattacatagtagttacctgtgggccctgaaggtacttgcagcaatttgttgcaaaaacagatactgtcaaatgaaattatagccacgtgctgttcattaaaattggatgataataagttgactaaaatgtgcattgggtatgtttgtaaactgatgaatctatatggacctgcctcagcagactaaaagcaacacatttaaaagccatttatgttgaataatttttttgttcttagtaattttaaggtgccaaactcctaatttcttaaataagattaataggaagagttgcatattaaaatcaatattgggaaggattttttttcttctatgtg

SEQ ID NO: 2695 - DNA, 6000 bp, Homo sapiens
agaggagtctggcgtggccagggtggagaggcatggcaagatatatttttttcttaaagctttttgattaggtagaatactaaaaggacagtcataaatatagtaggttatcaaaggagactaactttttcaattgaacatttgtgtttttatttcttatcttatggcctgttgacttccatagcccattggttctgaatcagaaatacagagtagtttagggatttgcccagtgtgtaagggggaaaccaagtagaacaagtccacctttcaggtcagtgcccatgtatttaagggctcgggcacatagaaggcagtctgccgtcctcaggagagcatgggggtgcaggcatgcctgtctgctgggaatattcacggcccctttactcctagaaaagtggtagttgctcacatagggctctctagtaatagtaatgtatggaatttttatgtaatgtatattatttttattttactttggatttaagtttaaaatttcataatgctatcttttgtatttaacaataaatcacttcattgctgttttctgtcttctatatttaccattcaaggaacaacagctaaaaaagatcactgcaaaacaaaagcatctccaggccatccttggaggagcagaggtgaaaattgaactagatcacgccagtctggaggaggatgcaggtgaggatgctaggagcagtttctctgtgttcttgaattgatgcctgatgcctgtagtcagtggagggtgtctctttagtctttgcctgggttttgagaaaaatacgtttctttgccttagtgtcaaaacagatttaggaaaattttattctctacacctgcagaaccaaatccctctcaaagagaattaaagtaaacttttaactcagttcataggaggctgctggtacacatttattattacatttaatacactggaaatcttaaacattcttattttgttaatttgataaagacaactagcatcatgattaaattacatgttggaagcccaacatcattaatcgcatttgtagaatggctctcacgtgtctttaaagagcgtatttggcaggctttccaagcatcagtttaagaaaagacatcttcattcaggtactctgggcagtatttcatttacattactgtcttggatggttgtcttttggaaaactttttgggaaaattcgtaagctctggaactaaattatctttgcagtcattgtgtgtgtgtatgtgtgtgtgtgtgtacaaattgttggtggctgcataggcattgactatttgaaatacagattaaagctgcttagcattaaattctctaagcaactattttctactagctttagaagtttattcagtaagatgagaattgttatgaagaattaattgaagcaatagaaaaaaatatgtatatttttgaaacagagtttcgttcttgttgcccaagtttggagtgcaatggcaccatctcagctcactgcaacctctgcctcccgggttcaagcgattctcctgcctcagcctcccaagtagctggattacaggcgcataccaccatgcccagctaattttttgtatttttagtagaaacagggtttcaccatgttagccaagctggtctcgaactcctgacgtcaggtgatctgctcaccttggcctcccaaagtactgggattacaggtgtgagccactgcacccagcccaaaagtacgtggttttaaagttcagcctctcagaattcattaggcctatgaccagtgcttttaactgctgtgtactatgtttctcattgataacagatgtttgttcctgtctggccgtctcagatctgctgttgtctttcacctcctactgtgactttggtagtagggttaatagctacctcttagggttaatagctaaaactttggtagtagggttaatagctacattgtctagggttaatagctacctcctcaaatccaagagcccctttttatccttgttccactctgcctgtccacagcagctgacacttctgttccttgtgggatccctgcttctctactggttttctttttagccctctgactacttctgcatagttatttctggccatatcttaaatattgatgtttctcaggatttctttgagccctcttcttgttctactgcctctccctggttatctattccccatggcttttgcagccacctaggttctactagtaccttatacagatctgtagacatctggctttgctctttttttgagttcctggttcctattatatctctccgtctggacaccagccaacacttgaagacatgaactgaaattggaagttacaccataactgtaaagtcacccagaaagtatccctctttcattagttgaaattcatctccggcaaaattaccacataaccaaaataccaaaagacctaaggcttaataggaagcaaaatactcagtgtaaagacctaaggcttaattgaggcaaaatactcagtgtaaaggaaaagatttgttaaatggactatatataaaaccaagaacttctgttcatcagaagatagcatttagggcaagatactgagctggggaagatatttgcaatacatgtgtgaatcaaaggactcaaatctaggatgtataaagaactagaaatcatttaaagaaacagacaaacaaaaatgggcgaaagactggaacacttcctacacaaaaaaggctatccaaaagataaattcatgaaaggcacctattttgttagtcatcagggaaatgtaaattatagccataatgtggtaccactacacatctaccaaaatagctaacatggaatggcaagaatatacaccagttggaactttctgacacagttgatggggactttggaacgtaacactttggaaaactgacagtgtctactaaagcttagcatacccagatatatatatatatatatatatatatatatatatatatatatataaaaatatataaatatataaatatataaatataaataaaaccaaaagatgtgcatcagaatattcatagcaacattattcctagtagccaaaacctggaagccactcaaatgtgcattaacagtgagagttaacaaactacagctacattcaacagtaaggatgcagctcaaaagcataatgttgggtgaaggaaggtggacacagggcacaaacatttccacttacgtagcgttcagagacaggcacaacttgtctgtacgttaggagtccaggtccatcattatcttggggggcgtagaggctgggaggtagcctgaagggctcatctggtggtgctagtaattctgttagttgatatggctgctagtttatgagtacattttttctgaatattcactgagttctacacttaatgatttgtgcactttcagatgtatgttttatttcagtgcaagtttaatgaaaaactgggtatcattggcctgcaagaattgtagattttagaatatggattccttcctattaagccttaggtcttttggtattttggttatgtggtaattttgccagagatgaatttcaactaatgaaagagggatactttctggtgactttacacttatggtgtaatgtcttcaagtcagttaacttcacatatctaacacagtgctgctgtccaatagacctttttgcagtgatgaaaatgttctctgtgttgcccattatagtagccattagtcacgtgtagctcttgagcacttgaaaaagggcaaatgcaactgtggaactgagtttttaacttaatgtaatttaaatttaaatagctgcaggtgactggtaactgccatgctgggcagcatagagctgacatttatgtttttcctttttaggtacatggtgatccctgtttttggttttactgtctcttgaatttaagtccatctgaatgttggttttagcaatgacgtgagaacttcggagcttgcttcctcatggacgactactcagctgataaggaaacacagctaaacttgactatttataactgtatttatacagtaataagcctatctttggatggcagagagtatatttatagtgaaatattttggggaaaagttactgagaagttgtctttttgaacaggaatatattaaatatagcatgatgctataattttattctgtccttcatatgtaacatgctttagtacatggatgattctttttttatatgagttatttgtagctgcctaatatttcttgaaagagtgagcatttcttttgtaccctcggaaagtttcatgctagtgcgaaacgcattgctattgttctttcagagccggggccatccagtcttggcagcatgctcatgcctgtccaggagactgcctgggaagagctcatccgcactggccagatgacaccttttggtacccagatccctcagaaacaggagaaaaagcccagaaaaatcatgcttaatgaagcatcaggcttcgaaaagtatttggcagatcaagcaaaactgtcttttgaaaggaagaagcaaggttgtaataaaagagcagctagaaaagctccagccccagtcacgcctccagccccagtgcaaaataaaaacaaaccaaacaagaaagccagagttctgtccaaaaaagaggagcgtttgaaaaagcacatcaagaaactccagaagagggctttgcagttccaggggaaagtgggattgccaaaggcaaggagaccttgggagtcagacatgaggccagaggcagagggagactctgagggtgaagagtctgagtatttccccacagaggaggaggaagaggaggaagatgacgaggtggagggggcagaggcggacctgtctggagatggtactgactatgagctgaagcctctgcccaagggcgggaaacggcagaagaaagtgccagtgcaggagattgatgatgactttttcccaagttctggggaagaagctgaagctgcttctgtaggagaaggaggaggaggaggtcggaaagtgggaagataccgagatgatggagatgaagattattataagcagcggttaaggtcggtctgtggggattataaatacattgtactgtttgctttatcttaggtgacaggtttattaatatgtaagcattctagatccagcttaatatattagacccccccgattatacagaggttggatttctgcagccttaacctgctagaagcagtggggcccctgagtccttaatgatgctggccccaaatgcatgtacttctaggtctttagttggatttggaggcaagtctaagatgaaaaacttaagggaaggctggggcaagaggcatacagagggctgagtgtgagctgtgtcgcctttataccgacagtcaccctagaatgagtatcaggaaaaagaaaagggtgaattaatgcatactggataggggtttctgttttcccttttgaagcaggaaagtaattttagagaacttttcttcaaaaaagagctgaaacttaagctttggcatagaaagaataagcttgcttttgtaaatccttcctttgtcttgagaaaatagtcatctgcataattataagccaccatcatgcaaaaagtgtactttgtatgcacagcatacctttcttttcactgttgttttttatgttagagactgactttggcttttagctccatgacattgtcattgtataaagcaagcaccataaaagggaaggtgaacatgtgaaacatgaagtctgaattgcatattgccacacgttttctgagagccaggaaaaataatctgtattgcaggcctccccatggtggcccactgaacactgtgctactgccgcgcatttcaagtctccttgacttagagctcacttagctctaaggaagtcaaagggaaaaaggaaccttattacttttaaaatacttgatagtgggatggctttttcccaatcctcaacagttttttcttatttctcaaggtgaagagaccta

SEQ ID NO: 2696 - DNA, 6000 bp, Homo sapiens
agtgatgccttctgactgagctcctcactaccctgaatacaagagaccataatagttaggtaggagtagcatagcccttattcagcttgaagaagttacagaagatggatctttgtccctctactaccctttggattaggcgttcccttgtaaaagggaagggagaaatatgtcagaggcatttgaaccagagtgattccatcttgaattggggctgggtgaaataaggctgagacctactgagctgtattcccaagagggcaggcattctaagtcacaggatgaggtaggaggttggcacaagatacaggtgacaaagaccttgctgattaaacagtttgcggtaaagaagctggccaaaacccacgaaaaccaagatggcaatgaaagtgatgtctggtcatcctcactcttccttatatgctaattataatgcattagcatgctaagagacactcctatcagcacatgacagcttacaaatgccatggcaatatcagaaagttaccctatatggtttaaaaatgggaagaaccctcagttctgggaattacccacccctttcctagaaaactcaggaataatctaccccttctttagcatataatcaagaaataactataagtattctcatcaagcagcccaagttgctgttctgcctatggagtagccattctttattcctttactctcctaataaacttgctttcactttactctatggacttgccccgaattctttcttactcaaggtctaagaactctctcggcatctggatcgggaatccttcctggtaacagttcacaatggatggttttatacattcattgcttttaagcttgctgattcatttattcaacatacatttaacatgtttttctagtggttgccaacacagttctaaataatatgcttttgcttcttttttgatttataatttttacaaagtatttattgtgtttccaatacatctaattatttttcatgagttttccccatttataaggatcagagaaccaaaccggttttgttgcactgccgttacccagaagttttgaaaagtgagagtcaactcagacctctgttctgtaggtcattgggagaattccttatattgaacacgaaatgtgaaataaaggcgcaaggatgaatatcgtcatagttaaacaagttaacattagtaaagcactcaagacaatgaaaccacctttgcaaaaattatatcagttagaaaattatgacagtgaaagaggtctgagttaacgcccccattccaacacctatcttgcctttcccttaattatttctaagctactggggccagctaactttgagagacatttaggctatagtttacatgataacagaccttgcctgaaactcaactgtttttgtaaagctaatgggaagctatcaggctgtgggggaggagaggagcctgagtcctgctaaggcgcagatatgaacgattgtcagtcattattctggaggttataagatactcaactttcccaattactcctgcaaataacaccactgatatggtttggctgtgtccccacccaaatctcatcctgaattgtagtttccataatccctacatgttgtgggaggaagccggtgggagataactgaatcgtgagggtggttacctccatgctgttctgatagtgagttctcacgagatctgatggttttataaggggctttccccctccttcactctgcacttctccttgctgccaccatgtgaagtaggacatgtttgctccccctgtcaccatgattgtaagtttccagaggcctccccagccatgcttaactgtgagtcaattaaacctctttcctttataaattacccagtcttgggtatgtctttattagcagcacgagagcagactaatacaaccactatttgtagctttttgagatatctttccaggttttttgcatgtctgacacccatggctccacctggaccgccaaccccactcccacagccccacccagaagtgattcagactgcaggaggacagctttgactccccctatgatttcatctcagcctcaaccaatcagcagcaagcacctgttacctggccactcccaccccttcctccaaactgcgtttgaaaaacccccagcctatgagcttcggactttggatcagatgacctgagcatgcactccatctcccacctggcatggtcggcctcgtgtctattaagctctttttctaccacaatgctatggtctttctttatgcagtgggcaggaagaaccccttgggtggggtgtttaaaataatgcccagcttagagtaagggctaggaaatggtagggaaaatggattaaaatccaaatcaataactactataataatgacattagaaatattggtttgggggtacacaggagatgcaagagcctattgctgtcagagggtaggggaaagcttcagaaaagagaaactttgtctgagtttggaatgggtaagagaattctaagcagagggacctgcttgtaagatcacagaagtgacagaataacaagtaggggtatgtgggaaaagattaataattgcctctcccccaaagttccagtttatagtttgtccatttctgtggtataaatactcctactatggctgatttcaagctattaatgtgaagtcaacaaaggcagagttggtgctatgggctaaactgggtgccccccaaattcatatgctgaatccctaaccctcaatgtgactatttggagacagggtctttaggcagcaaatctggttaaatgagatcataagggtgagtccctaatccaatacggctgatgccttagaagaaagggaagacagagccctctctctaccccatgtaaggacacagtgagaaggtaaccatttgcaagccatgaggagagcttcccctaaatgagctaaatctgcctgcatttgatcttggacttcccagcctccagaactatgagaaacaaatgcctgttgtttaagctgcccagtctatggcatttgttatggcagcctgagctaaggcagctgggaagaggtgaacagtatgcttgctaggccgtagaagccaattgtagcacacccttcctgggagaagagtaagtagttccctaaatcctgagcataggcatccagggagtgaaggacacaagtgatgcagaaaaattagatggggcaggagtataaaagggcttggacgacttgctaaataacttgggacctcatttaactaaattccctcattaaagaccctatcttcaaatacagtcacattctgaggtcccggggtgggggtggggagtggcggttaggactccagcatatgaattttggggaggggacacaattcggcccttaatagctccagttgtgccaccctgagttgttttcctgaaccccgcccacgtctttgtaaataataactctcaacttccccttttgagtggaccattttttcctgtccaaattctgatataggaagggtctccaaaatagctgcaaagggaacctcagtctcaaaagttgggatccactatatatctgcttttactttcaagcattgaaactaatgtcaatcaactgcctttctattcttaatattttatccaagaaatcgctagaattctttctcctttaaaaaaaaaaaaaagcaagttacaagccgggcgtggtggctcacacctgtaatcccagaactctaggaggccgaggcgggtggatcacctgaggtcaggagttcgcggacagcttggctaacatgacgaaaccccgtctctactaaaaacacaaaaattagctgggcatggtggcaggcgcctgtaatcccagctacccggcaggctgaggcaggagaatcgcttgaacctgggaggaggaggttgcagtgagcccacatcgtgccattgtactccatcctgggcgacaagagcaaaactccgtctcaaaaacaaaaacaaaaacaaaacaaacaaaaaaacccactaccaccaacaaaaacaagttacattgtgggttggggccgctgacaggaggaataagatgatgttatggagcatttcctagtcccctttccgaccccatttccctattgtccgacttcaggcttccaagtgaggacagcacttcccaggcagtgacccgcagtcactgccctcccagaggacgtcctgcctcgcggccctggaaagtccaccttctcctagcaccgatcctgagctgagaagctctgtctggtacagccatcctgcatcgtgggctgcttctttccccaggcgaagctcaacttcctcccattgttctgaacctctgtgtggacatcttctttcttcaaacgcaccacggtaaaattctcgcctgcctcgaaaccccgcctacctctgagatctgaggacggatactaaacgctggacttaaggcaatgtacacatgtaagcaggctctgtaggcactcactccgcccaggtgcgcgcgtggcggagggggaacagagaagcaggacagctctccatccttcccgtgttcagtcgtgggagacaacaagagaggtcacagcctggcgaccaaaaagtgcggctaacttccctgcccaagctgactttctctgcagggttcaaggttaattgtgaggatttacattcgcatggcacacccgcatccccctctacgtggaaatatgtcttaactttcataactgccttgccagcagggtatttttcgctaggggcgaagcgtccttcgcaagccacccagctgaccggcagcggagacagctttctcgccctgctcgcacgcaagtagaaaggcgctgctgagcccgtccctccaaaccacgtggtcttgcccgtgcttaaaaacaaacgctgagccaggcgcatgcgccacgggcctccccgcaccagcagaagtcggagtcgctgttgggggcggtgtctatggttgagctgagggcgcaggcgccacggcccgtcgagctgggttccaaggcggctggcggcggtagcgtctctgtttccttgtgggcgctcgcgcggccctgggtgagtgttcgggggtcccggccgaatgtcgggcagggggtgtcggggcccagctcaggcttctcgggcgggccgcggccccgcgccttggcctcgccgtggtgattgagcctgtcagcgaggacgcactgtagcgggtcttagggccaagtgcccgcttccggcggcctcacctgagaccggaagtagcgccaaggagcgctcacctgaggcggcttgagtccctggccggccagcgacccagctacttctccgactttgtataaggccccctgcgcgcagggtcagctgggtcctttttgatctcgattaaaatgctggagctgttattttaaagagagtcgggctagatgtacgtccgacgttttgggcgttgatagagtcaaattgataagagtgtgggcggatgaggcaggccgcctgtaaatgctgctgttacgtgacttccacgcagcgtcttaactgctgtcatcctgtgacaggcagccctcgcttttctcctcaacttttcccatcatcttcttgttgctttgtctcctccaatccattatccgcacagttgtccaggtggtctctggcataaagtaggtcatgccatcatcagcctacttaacagttttcagagtcattccattgcactgggagtggaatccatgctcgtgttttcccaggccttgtgtgatttggcccttgcctgtcccctctcagaactgtgcctgtgtccgaccaaccctccaaatgagacccagcttgcccctggctgcgggagccccagtgatgggggaggacggtgaagatactagtgtcccagatgattaagccttagaagatactctgcaagacttaggccatgaacggagcccttctctgctcttcttaactcaaagttaaaaataaagtcaaaaattcggtgttccagccttcttgcattttca

SEQ ID NO: 2697 - DNA, 6000 bp, Homo sapiens
gaagcaaatcagtcttaccatgatttgtctttaataaaagtgggagcctgaagagagaaaaaagttatgtttcaactatggtacacctgttattagattctagtctcatcagttatttttaagggttttttcttccttgcaatttagactaaccctactttttcctgccaactaaccagtgatctctggctgctgctcagaaaaaaaataacagaaatgggtaatgtaaaaatctggatcaatattctaattctaattggaacatatagcatgtacagcaacttcatatcagcttgcccagttccagctgttgccgagttcatggaaagccttctaatttagtttacttgggatagttttacttattttgctttaccgttgtggaacatattgctgttgtactccgtgtgggagtgcaggataagcttactcaatgtttaattaaattgaatactttttaatcttccagatatcaccttttgccctcaagagttatgaatgtccctcaccatagtgatgccttctgactgagctcctcactaccctgaatacaagagaccataatagttaggtaggagtagcatagcccttattcagcttgaagaagttacagaagatggatctttgtccctctactaccctttggattaggcgttcccttgtaaaagggaagggagaaatatgtcagaggcatttgaaccagagtgattccatcttgaattggggctgggtgaaataaggctgagacctactgagctgtattcccaagagggcaggcattctaagtcacaggatgaggtaggaggttggcacaagatacaggtgacaaagaccttgctgattaaacagtttgcggtaaagaagctggccaaaacccacgaaaaccaagatggcaatgaaagtgatgtctggtcatcctcactcttccttatatgctaattataatgcattagcatgctaagagacactcctatcagcacatgacagcttacaaatgccatggcaatatcagaaagttaccctatatggtttaaaaatgggaagaaccctcagttctgggaattacccacccctttcctagaaaactcaggaataatctaccccttctttagcatataatcaagaaataactataagtattctcatcaagcagcccaagttgctgttctgcctatggagtagccattctttattcctttactctcctaataaacttgctttcactttactctatggacttgccccgaattctttcttactcaaggtctaagaactctctcggcatctggatcgggaatccttcctggtaacagttcacaatggatggttttatacattcattgcttttaagcttgctgattcatttattcaacatacatttaacatgtttttctagtggttgccaacacagttctaaataatatgcttttgcttcttttttgatttataatttttacaaagtatttattgtgtttccaatacatctaattatttttcatgagttttccccatttataaggatcagagaaccaaaccggttttgttgcactgccgttacccagaagttttgaaaagtgagagtcaactcagacctctgttctgtaggtcattgggagaattccttatattgaacacgaaatgtgaaataaaggcgcaaggatgaatatcgtcatagttaaacaagttaacattagtaaagcactcaagacaatgaaaccacctttgcaaaaattatatcagttagaaaattatgacagtgaaagaggtctgagttaacgcccccattccaacacctatcttgcctttcccttaattatttctaagctactggggccagctaactttgagagacatttaggctatagtttacatgataacagaccttgcctgaaactcaactgtttttgtaaagctaatgggaagctatcaggctgtgggggaggagaggagcctgagtcctgctaaggcgcagatatgaacgattgtcagtcattattctggaggttataagatactcaactttcccaattactcctgcaaataacaccactgatatggtttggctgtgtccccacccaaatctcatcctgaattgtagtttccataatccctacatgttgtgggaggaagccggtgggagataactgaatcgtgagggtggttacctccatgctgttctgatagtgagttctcacgagatctgatggttttataaggggctttccccctccttcactctgcacttctccttgctgccaccatgtgaagtaggacatgtttgctccccctgtcaccatgattgtaagtttccagaggcctccccagccatgcttaactgtgagtcaattaaacctctttcctttataaattacccagtcttgggtatgtctttattagcagcacgagagcagactaatacaaccactatttgtagctttttgagatatctttccaggttttttgcatgtctgacacccatggctccacctggaccgccaaccccactcccacagccccacccagaagtgattcagactgcaggaggacagctttgactccccctatgatttcatctcagcctcaaccaatcagcagcaagcacctgttacctggccactcccaccccttcctccaaactgcgtttgaaaaacccccagcctatgagcttcggactttggatcagatgacctgagcatgcactccatctcccacctggcatggtcggcctcgtgtctattaagctctttttctaccacaatgctatggtctttctttatgcagtgggcaggaagaaccccttgggtggggtgtttaaaataatgcccagcttagagtaagggctaggaaatggtagggaaaatggattaaaatccaaatcaataactactataataatgacattagaaatattggtttgggggtacacaggagatgcaagagcctattgctgtcagagggtaggggaaagcttcagaaaagagaaactttgtctgagtttggaatgggtaagagaattctaagcagagggacctgcttgtaagatcacagaagtgacagaataacaagtaggggtatgtgggaaaagattaataattgcctctcccccaaagttccagtttatagtttgtccatttctgtggtataaatactcctactatggctgatttcaagctattaatgtgaagtcaacaaaggcagagttggtgctatgggctaaactgggtgccccccaaattcatatgctgaatccctaaccctcaatgtgactatttggagacagggtctttaggcagcaaatctggttaaatgagatcataagggtgagtccctaatccaatacggctgatgccttagaagaaagggaagacagagccctctctctaccccatgtaaggacacagtgagaaggtaaccatttgcaagccatgaggagagcttcccctaaatgagctaaatctgcctgcatttgatcttggacttcccagcctccagaactatgagaaacaaatgcctgttgtttaagctgcccagtctatggcatttgttatggcagcctgagctaaggcagctgggaagaggtgaacagtatgcttgctaggccgtagaagccaattgtagcacacccttcctgggagaagagtaagtagttccctaaatcctgagcataggcatccagggagtgaaggacacaagtgatgcagaaaaattagatggggcaggagtataaaagggcttggacgacttgctaaataacttgggacctcatttaactaaattccctcattaaagaccctatcttcaaatacagtcacattctgaggtcccggggtgggggtggggagtggcggttaggactccagcatatgaattttggggaggggacacaattcggcccttaatagctccagttgtgccaccctgagttgttttcctgaaccccgcccacgtctttgtaaataataactctcaacttccccttttgagtggaccattttttcctgtccaaattctgatataggaagggtctccaaaatagctgcaaagggaacctcagtctcaaaagttgggatccactatatatctgcttttactttcaagcattgaaactaatgtcaatcaactgcctttctattcttaatattttatccaagaaatcgctagaattctttctcctttaaaaaaaaaaaaaagcaagttacaagccgggcgtggtggctcacacctgtaatcccagaactctaggaggccgaggcgggtggatcacctgaggtcaggagttcgcggacagcttggctaacatgacgaaaccccgtctctactaaaaacacaaaaattagctgggcatggtggcaggcgcctgtaatcccagctacccggcaggctgaggcaggagaatcgcttgaacctgggaggaggaggttgcagtgagcccacatcgtgccattgtactccatcctgggcgacaagagcaaaactccgtctcaaaaacaaaaacaaaaacaaaacaaacaaaaaaacccactaccaccaacaaaaacaagttacattgtgggttggggccgctgacaggaggaataagatgatgttatggagcatttcctagtcccctttccgaccccatttccctattgtccgacttcaggcttccaagtgaggacagcacttcccaggcagtgacccgcagtcactgccctcccagaggacgtcctgcctcgcggccctggaaagtccaccttctcctagcaccgatcctgagctgagaagctctgtctggtacagccatcctgcatcgtgggctgcttctttccccaggcgaagctcaacttcctcccattgttctgaacctctgtgtggacatcttctttcttcaaacgcaccacggtaaaattctcgcctgcctcgaaaccccgcctacctctgagatctgaggacggatactaaacgctggacttaaggcaatgtacacatgtaagcaggctctgtaggcactcactccgcccaggtgcgcgcgtggcggagggggaacagagaagcaggacagctctccatccttcccgtgttcagtcgtgggagacaacaagagaggtcacagcctggcgaccaaaaagtgcggctaacttccctgcccaagctgactttctctgcagggttcaaggttaattgtgaggatttacattcgcatggcacacccgcatccccctctacgtggaaatatgtcttaactttcataactgccttgccagcagggtatttttcgctaggggcgaagcgtccttcgcaagccacccagctgaccggcagcggagacagctttctcgccctgctcgcacgcaagtagaaaggcgctgctgagcccgtccctccaaaccacgtggtcttgcccgtgcttaaaaacaaacgctgagccaggcgcatgcgccacgggcctccccgcaccagcagaagtcggagtcgctgttgggggcggtgtctatggttgagctgagggcgcaggcgccacggcccgtcgagctgggttccaaggcggctggcggcggtagcgtctctgtttccttgtgggcgctcgcgcggccctgggtgagtgttcgggggtcccggccgaatgtcgggcagggggtgtcggggcccagctcaggcttctcgggcgggccgcggccccgcgccttggcctcgccgtggtgattgagcctgtcagcgaggacgcactgtagcgggtcttagggccaagtgcccgcttccggcggcctcacctgagaccggaagtagcgccaaggagcgctcacctgaggcggcttgagtccctggccggccagcgacccagctacttctccgactttgtataaggccccctgcgcgcagggtcagctgggtcctttttgatctcgattaaaatgctggagctgttattttaaagagagtcgggctagatgtacgtccgacgttttgggcgttgatagagtcaaattgataagagtgtgggcggatgaggcaggccgcctg

SEQ ID NO: 2698 - DNA, 6000 bp, Homo sapiens
ccttccttccttccttccttccttccttccctccttccttccttctttccttccttccctccttccttccctccttccttcctgtaatcccagctactcaggaggctgagacctgggcaacaagagtgaaactctgtttccaaaaaaaaaaaaaaaaggccaggtgcggtggctcacgcctataatcccaacactttgggaggcctaggcgggtggatcacctgaggttgggagttcaagaccagcctgaccaacatggagaaaccctgtctctactcaaaatacaaaataagctgggcatggtggcgcatgtctgtaatcccagctactgaggaggctgaggcaggagaatcacttgaacccaggaagcagaggttgcagtgagccgagatcgtgccattgcactccagcctgggcaacaagagcgaaacagcgaaactccgtctcaaaaaaaaaaaaaaaaaaaaattccctacaacagatcagccctctgcaagatttcacgtctctccccagtttcctgggctaggtcgctgactatattccagaggaagaactggattggcttagaagccccattcccagaccccagctgaggaggaagggaaatggtcagatctgtccaaggctcttggcagcacttgccataaagaggatggaaaggtagcatcagggtcctcttgaaggcaccccataggccccactagatcctgggaatctagatgcgggtgtctgcaattctggaaaaagccatgtgctttttgtttttgtctcactatgtcacccaagctgtagtgcagtggtaccatcatagctcactgtaaccctggccaggctccagcgattctcctacctcagcttcctgagtacctgggactaaagatgtgtgctaccatgcccagttaatttttattatttatttatttatttatttatttatttgagacagagtctcgctctgtcacccaggctcgagtgcagtggcaagatcacggctcactgcaacctccgcctcccgggttcaagcaattctcctgcctcagcctcccaactagctgggactacaggcacgcgacaccacgcccagctaatttttgtacttttagtagagatggggtttcaccatgttggccaggatcgtctggatctcttgacctcgtgatccacctgcctcagcctcccaaaacgctggcgtgaaccactgcatctggccaattttctgtattttagtagagacggggtttcaccatgttgcccagggtggtctcaaactcctgagctcaggtgatctgcccacctcagcctcccaaagtgctggggttacaggcatcagccaccatgcctggctaatttttaaattttttgtagacacggggtctcactatgttgcctaggctggtcctaaactcctggcttcaagtaatcctctcacctccaaagtgtgtgggttaaaagtgtgagctgccacagccagagaagccacgttcttgcctcatctagccattcattcatccatccattcattcatgtatttatccaaggaacatttgctgagccttttctatgtactgggcacagtgctggctacttgaagttaggatgtgtagaacgccatcctcaagtagcttactgtctagtgggaagaccaaagtggaaagaattattaacaacaaagatatgcactggctggaaagatgccctgaggaaggcacctaagggatggagtgtcgggatgagggtgctaggggaggcttcctggaggaagggatgccagagttgggtggccaaggctgctggtggaagcatgtctaggcaagcccaccttggcctgaggggaggaggagcgggtgggtggacaccaaatgcagggtttctaggttttgtgagagctccaatgaggtctggttcagaggccaggagatggagcgtcctcctgaccagaagggccccatttgcagagctgtggagtgagggggtgttcggtgtagggagggtggttacaaagtctttccagctccagccagatggaagggaatctaccctccacctcaggacaggatggaccaaggccctgcactctggctcctgggagaggctagcagttaagaacccccactttaccctcctcccgacctttgagattctcctggcatacaggccttttctctatcaggggttttagcagttgtcacaggggaagacactgaccactcccaactcccccaggcctctgccaggcctccttgcaggagactttaccctggaacccactccctcctactttaggaaacacttccaacaataggactgccttcttttttttttttaatcgctttttagaaacacaatgagacaataacactaatagatttcttttgaaaagaaacaaaattactcagtgcgcattaaccagcccttcccatttgagacaagttgttttattaacagaaggagacagtgaatgaaaaaaaggtgcttggaacactgttgggcagtcttgatggtgtttgttgaatgaataaatgattcctaataactgacctttccaaaccggacccggattcttttccttatgaatatctacttaaaaggaaaaaaaaaaaaagcctgtgctttctttaggtcagtgttccacattttcctgaattttttttctgtccaaaaaaaaaaaaaaaaaggccaggcgtggtggctcacgcctgtaatcccagcactttgggaggcccaggctggtggatcacctgagttcaggaatttgagaccagcttggccaacatggtgaaaccgtctctctactaaaaatacaaaaattaggccgggcgcggtggctcacgcctgtaatcctagcactttgggaggccgaggcaggcggatcacgaggtcaggagatcgagaccatcctggctaacacggtgaaaccctctctctattaaaaatacaaaagattagccggacgtggtggtgggcacctgcagttccagcttctcgggaggctgaggtaggagaatggtgtgaacccgggaggcggagcttgcagtgagccaagatcgcaccactgcactccagcctgggtgaaagagtgagaccccatctcaaaaaaaaaaaaaaaaagaagaagaagaagaaaaaacatcgtaactcttgtttccttagggtgtttaggtgtcccgcccaaatcagcctggaggaaatgtgaatgttcctgatggattaattcagatcttctctctggccagcaggaagacacacccatgcaggtcacctctgtaagagtgatttcaagagtatgtcatctactccagccctccaagaacaactagccgccttgatccagtgtcttttattatttttaatttttatatccccattgttaagcaatctggtgtctttaaggctccaacaagcgacagagcttgaagaatgggaagagaaggccttgaaagtcccagtggctcacaaactattccattctgcagctgtctttaagatgtctcctggatcccctgatttctttttttaatccataaatttgtctccataagtgggtctcccacctgtcaaatgagagtagggtgcagagcttggattctggttctttcaggttctaagtcttggcccaagtgtcagctttttcttttttctaagttggggtggggatgggggttgcggagggcagtggcctgacatctcctgcaagtgtcatttgtcacgcgaaagcaagcctgacccgaggcaaggcccgcctatctggttaggttccttgcccgcccccggggccctgggcatctgatgtaagtttggctccctcttccatcagggtcctcctgtcccagactgataaacctttagagcaataaaggtcgagtccgtctcaacctccacccaccctcagcaaccactgttagcctctgagcactgctgccaggccagatttcctgtggccccgcctgaatgatgaaacacgggatggccattgcactccctggcttttccagagatctcggtcctcggtcctgatgcaaccgtctggatcttttacacaaagcgctaggcgagcgctgggtgctaggacccggggggcgcccgggcagggaggtccggctgcgctgcctgcagtccgcggggagggcggatgggtctgtgagtccgactgctgtgaatcctcgcttccatccctgcactgggcgctatgaacccgggcccatccacactcctctaaccactctcctcaagccctctccttgggagcagttggaagtggaagcagatagggtttgggaggaggcagggatccccattaacctatgtcctgggctgtagagtaacagccaggatgggcaggtggggccttggggaaggggcagcatggtgcccggagcttcccagtctgtggaccccacccccatatcccgagcctttgcaaagcagggatagagggggtaagggcgcgagggcaggccgggctaacgtctgctcctgcgccgccgtcccacgggcatcccccccgtgtgtgcccagttgttcccgaagctttaggatccaagacgctgggggcaaccattttccttgcccgccgccccctcacgcttccctgcctctcctcctagcctggtcacgggctgtcccctcctccagcaatgcaaccctataataaacaagtctttccttgatcctcccctgccgcgagcgccctcggggaccttggcagctgcagccgccgcggatcctttccagaaagggggcgtggcggtgggtcggggttcgactgcgagctttctggggctcaatggaggcggggcccggccgctgtcaccgggcaggagagaacgttgcttacgtgcgcccggagtccattggccaaggcgggccacactcccgggtctggattgggtcgtggcgcagagaaggcgtggcctcgccgcgctagtccttataggctgctccgcgctggtgctagggcgcagcaggccaagggggaggtgcgagcgtggacctgggacgggtctgggcggctctcggtggttggcacgggttcgcacacccattcaagcggcaggacgcacttgtcttagcagttctcgctgaccgcgctagctggtgagtgtcccttctgtgtgtgggtcctagagctcgcggtctggtctggtctggtccccagactgacgcctggtcggtccccctcttgtcttacagcggcttctacgctccggcactctgagttcatcagcaaacgccctggcgtctgtcctcaccatgcctagcctttgggaccgcttctcgtcgtcgtccacctcctcttcgccctcgtccttgccccgaactcccaccccagatcggccgccgcgctcagcctgggggtcggcgacccgggaggaggggtttgaccgctccacgagcctggagagctcggactgcgagtccctggacagcagcaacagtggcttcgggccggaggaaggtgagcggtgggcgggtgccgacgcgactcgaggggccgggaaggtggggaagccccggtgctggaaggggtcagagccgccttggcttcctatcccatcgggacccagattgcttgggggcagggggaattggagtataaggtgagtgaggcggaaactgaggcacggagtgggaaggagcgttggtttcttaaggaaacagcacctcccccgcctgtgcgtttcgttttgaagccgctctaataccccttcctgtgtgctctcctttccagacacggcttacctggatggggtgtcgttgcccgacttcgagctgctcagtgaccctgaggatgaacacttgtgtgccaacctgatgcagctgctgcaggagagcctggcccaggcgcggctgggctctcgacgccctgcgcgcctgctgatgcctagccagttggtaagccaggtgggcaaagaactactgcgcctggcctacagcgagccgtgcggcctgcggggggcgctgctggacgtctgcgtggagcagggcaagagctgccac

SEQ ID NO: 2699 - DNA, 6000 bp, Homo sapiens
atgggcagagatatttatctacctagtgtacatgtatggggtggcaagagcccccaccaaaggagtaaatccccaagtattctccgaagcatacaagaaccacccagcatctgaaggagaagaacacagacctactggggatgcattaagagtaacaatccaaaaaaaatttttaaggctgggtgtggcggctcacgccagtaatcccagcactttcggaagccaagataagaagattacttgaggccaggagtttcagaccagcctgggcaacatagcaagaccccatctctacaaaaaataaaaagttagctgggcgtggtggtgcacacctctagccctagctactgggaagactgaggggagaggatcacttgagctcaggagttaaaggctgcagggagctataactgcaccaccatactccagcctgagcgagagaacaagaccctctctctcaaaaaaaaaaaaatatatatatacatatatacacacatatatatacgtatatatatacatatatacgtatatatacgtatatatgtatacacacatacgcacacacacacatatgagtgacaatcacaaaacttgatgagacgagaggacctctcccttctccctaatgcaagaatccctgaccagacagtattgtgtctctgctttgtctaccaagtgactaagaaggcagaactaaggacaaagggtgacattacaagccataaagatttcacctcaataactttctcgctttaaacagctgcctttgtgaagatgataaaacagctctaatgatcttgtataaccctccccctttctgaaatattgaaagtgtgacccagaaaggttagatgacttgcccagggtcactgagttataggcccaggactagaactcaggtcctagctccctgttgaggctttcttcccattacattagtgccaaaggaaggtaagagttacagtggcgctgggggagttttaggcattagtcttacaacgtaaaactatgtccttgtcaaaggaaaagccacagatgttacaggaatgccaggtgcactgtggagttaagaaggattccttcccttgtaccaaatttgtcatcctacagagttcccctcggctttggactttatgaataaagctattcatagtaggacccacagaactaaagcaatgataaactagcaggtaaaaaaaaaaatgcagatatatgaaaaatgcagatggtaggatgaagttgagtttgctttctaaaatcaacaaatactgagtgctacttctgtacaactcattgtgttaagtgctgaatgtgtgtgtgtgcgtgagagagacatatactacaaggataagacagaacccaggtcttcaaggcttgcaatgtagttgctgataaaagactgtaaacatcaaagacatgattaataatacagagtacataattgttaagtaagtggcatagataatgtgtctgcaggagttctcagaaggagcaatcacttccacggggtgtgtgtggtggggtgcggagggagggggaaatggcagacttgtcaggcaaggtgcttcaaacaaggcacggcacttgaaatgaacccaaaggatgaaagactctcgataagaaggaaatggcacgagcaaacactggtggtcttaatgtcagagaagggaaagaaatcaggacttaaaagaaaggactggcccacacttgaacagccttgaaagttaaagtacttgtaggagtgggaaaatgcagaaaggtgttttgttgttgttgttgctgttgttttgtttttttttgagacagagtctcgctctgtcacccaggctggagtgcagtggcgcaatctcagctcactacaacctctgcgaaacttccagttcaagcaatctccctgcctcagcctcctgagtagctgggattacaggcgcctgccaccaccatgcctggctaagttttgtatttttagtagagacagggttttgccatgttggccaggctggtctcgaactcctgatctcaggtgatccacctgccttggcctcccaaagtgctgggattacaggcatgagccaccacgcctggccaagtacagaaacattctgaacacagaactataaaatctggaagaagttaatttaacaaatgtcttctgtggggacaactgtgtgtaggactgaatgatgactgaagatgaagttgcctttggggggtacctcacttcagcctgagacaagggttgacttgaggtgagaagggtacaaagtagggtggcaaggggcaggtttgcaagtcccgcggaaggaagacccagcagaccccaatgactggctgagaggcaggcgacaaggaagcagagaaagtcatgagagaaagagctcttcacagcctaaagttaggcagctggaagaacataagagtaaagaaggaaagctggtggacagggagcgatgcagagcctggttttggaggtgttaaatctgggaatatctatatcacagtgtccagtgggcatctagagatggggttctggggttcaagagagaagagctgaagtttaagcataggggtattcccaatggacaaagagttgtgggactgaacaagatttctctgggagagagtgtaatgagagaaaaaacagaatgtcaaacttaagcaccagcgtgcccccaagctagaaggtgatggtggaaaggggtgttcagaaaggaaaaccaagacagtctgatgccaagaaaggaagggggggaatgtctcgtaggagagagttgtcaacagcaaaaaatgctgcaaaatcaattatggggcctgaacacatatttgttgaacaaatgaatgaatgaaagcaagccagcccttggttttgagagtcatctctcctcagccagaagaatggccagagttaccttcagacaagagaatttcaataagttttactgcatccttcccataaaaacacatttctgcctccacaagtcatcctgtccaccatgcagacatccttccctgcttcccctggttcccccatcttccttcccagtttccgcaacccaagcaacacaccttcggtgtcaagggagacaggaaactccaactagagtttccacttcattaacaactctgcctgtggctcctcttacataaggggatatgtggcaatggggtgggagaggaggctgagttctagccccaggtgagctcctaactagctgtgtgactttggacaaggtgttcaacctctcaggatctgggctttgacacagagtaggagatgggtccatctggaatccagacaagtttgagctctcaagtctacgatattattcccagcgggtccttgcaacaccctcaaagaaggaagtgagtgtaagacccagaaaaatgaccgacagacctcttcccggggcgaaatgccagggcaggcggggtgtaccatgaaagtgagaaagcgttgcgcgggcctggaggatcaccagcgagcgatctcactcccaaagctgggaaggatcccaacaatcccaagggtgactctcaccccgcaccccatcttttatagactcccagacggccgagaggctctaaaaacccctgcgggaaaaataaagatttctttcccagagtcctgcgctgctttgcaagtcggattcccgcagacacgatctgcagctcgataatgacacagtctttggaaggagcgactgttctcgcctcgctcgctccgagttctggggacgcctggctgcccgcgccgtgccccgacgggccggcgtccgaccccggccggagctgccaggccagcggcgccctcgcccccggcctcctcccgatccgtcggccccgctgcggtctgcaaacatttcctgcccccacccccaccaggagctacccagttggagagagttggtcgcgcagccggctcagtgctcgcagttgccccaactcagctcccccggccgcccggcgctggggagcggccccctctggctgcggagcagcccatcggggaaacccaagcgccagcaccagtggggagtccatcggtaagcccaggactcgggcgaggagggggacaactggcgggatgcccgaggccctgctcccttccccatcgttacctgctcgcttgcgggggtgtcccggggctgccggcctctcccggcgctgtctccccacgcagttgcccatgctggctcctcagccagtccccatgcaccggaggcggcggggtggtcggctgctcagcggacggcggcgtcccgggtcaatggctccggccgcccggcatcgggcgctccccgatctccccccgggggcgcgctcagccccagcgatggctccgccaaaactttgcgggccaggggagagagggaagtggcagactccccagcacggtcccaggtggccgggccaggggggcccgcgacggtgcccggccggagaccagctccgctggaggggcggagagagggggcgggcaccgccgcagctactcccggctcgctcggggcaccaggcaggggccggccccctggagcctgtcactcacctgcctaaccccgccccaggccggcccctctcccttccgccggctcgcggtgcccgcgccgccgccaccacccgccccaggtgcgcatgtgaccgacagcaccgccccctagggctgggcctgattttctcattggcttcccccgtggtgcgtaccgcccctctccccacccagccaggtgcccgccccgcagcccgtctcccggggagccgggctgggaattattcgccctcaatcgcctccggctgcgtgcccagcagccgccttccctctcggtgccaccgccccatttcaggccccgcccctccctggaactgcctaggcagaagccggcaggcacgtgaccccggcgccccgcccccttgcgcttccccggagattggctcgggaggcgcatgcgcggagagcccgtctcgagccaccgcccatatcccctcccacggtctctagttcgcgttatggccgctgccgcggctgtggaggcggcggcgcctatgggtgccctatggggcctcgtgcacgacttcgtcgtgggtcagcaagagggccccgctgaccaggtggctgcaggtacggcagacggcgccgcgcgccttccgcatgggggccaacaggagggagcggcctcagtacaggcgccgggcgggaagggaggagcggggtgactttgagagattggtctcaaggctggttagtgagcaccgcgaggttcagagccgtaacaagttagagagttgcctgtgtcttccttaaaaccatttacacttctcatctccctgtagccaattatagggaatcattacattttacagatgaggaaactgaggctcagcgagggcaagaggacttgcgcagggctgcagaccaggcaggagggggaggtgggactcggacccaggcgttcaggtccgaaccgggtgctcacgccacgaagccatgctgtttgtgggaggttgacgtgtggaggtgcatcctcgcagcgtccgctcccgtcgcgtggcatcctgggagtggcagatggccccgcgctctgactggctggaattaagaggagttgaggagacgggccaggaggagctggagatgttctgggtgtcctccttaagactttctctccgtttcttgctaaagttcttgattagtttgctccatgacgttttatgtggcgtttgtttttgtcttcttcccagacccccactttcctgcttttgaccagttcagagatctcttagttcagacagcttatctaaaattagaataaaacgatttccaggcttccgtggagttctgagactttgctcttctaggaaaaaaaaaaaactactaaaaagttattgaatgttaggaggccttcagatcttgggtttaagtaacaatataaaattatctaatgagtagtttttttaaaaaaactttggaaatttcgtatgcttggagagaagtaaggacac

SEQ ID NO: 2700 - DNA, 6000 bp, Homo sapiens
acccacactttccttagcaaggcaccagtttgtgtgggggcactgagaagtcaaaggagtattcatgtgatcattgacacagaatgcacaaacagatctctgtctgatggagttgaagcctcttgagaatctggactagcagccaaagggaagtgaggggaagcgggtagggtgggaggatgagaaggagcaggagagagaaaaatcccaatcaggactaagttccaatcaagctctcaaaatgccctttctgctgataatgcctcagatatttcactaaactgtattttactgttctttaatactttgacttaaggaatagaggtattcttagggaatcacaaacatggaaaaacacaatacaataaagactgaaatgaaggaaaatccaaataactaaaaggaaaaaaattatatccatcacctgcaaattcaacgtgttcaaaaatcacattctctgaaaatcagctctcgtcctaattttggacaaagtatttcttttcctcatcctctggttcaaaaccttggggtcttcttagagtcctctatctccttcaagccctataataactagttagaactcaaattccacagattcttccttcaacatttctcattgcattcactcaagcagtttttattgtgtacctactgatgccaatttcaggagattctggtggtacaactgggagggtaggatgtggagatgtatacagcaacagctactaaactagtccactaaatacatgagtggttgagaaataagtgcgtactacaaagattctgacgtatgagatgctgtctggctgggttaatcaggaaacccttggggaggggtagggaactcaagctgggccttgactctcaggtctaacttcgattacacagagctagtgaagggaattgggaaggaaagcactcagggaactacgaataaaggtggctgcctggaattaaacgtccagggagcagtgagaaaaaaaggctggggccaggtagtggcaggctttgaaggcttgcccaagaggcctttaacccttaggctgccaggttatttccctcccatcgcctgcagcttctttacagctgacactttcaccaggaacccaggtacaaaacaaaggtggcagcagctgcttttgtgatcaaagggtgctccttctgcatttaaatttgcaggctgctactctgagtgactgaacaggaagctagctggtccctttagcgctaacaaagcttgatttaggctgaaagattagaaagcacatcttattctataaacgcttcaacactctgttatccttcaacaaccctaactagggctgtgatctaagattgacaatattaacttaatccttgtcaaatttgttttcattttatggctccctggctcaaggatctacaacaactcttagtacagataacaggtcattcaaatttctctgcctggaatccaaagttatacacaatccaaccctaccaaaccttttcaacttttatctgttactattcctttgtaccaactttcttttctttttgtttttttgagacggagtctcgctctgttgcccaggctggagtgcaggggcgcgatctccgctcacggcagcctctgcctcccaggctcaagcgattctccagcctcagcctcctgagtagctgggattacaggcatgcaccaccatgcctggctaatttttgtattttcagtagagcggggtttcaccatgttggccaggctggtctcaaactcctgggctcaagcaatccgcctaccttgttctctcaaagtgttggcattacaggcgtgagccactgtgcccaccaccaactttcttttcttaggagggctaaattacaacagggctagtgttacagtcttaaatcagttgagttgaattcaaattaagcaacagtttagaccattttttttcagaaagaaacaaaaatataaattttgcaaaaacgtttgtaagaatttagcagtcccagtggctcatgcctgtaatcccagcacttcgggaagctgagatgggaggatggcttcagtcctggagttagagaccaacctaggcaacatggtgaaacctcgtcactacaatacaaaaattagccgagcgcagtggcacactccctgttgtcccagctacttcgggaggcttgaggcaggaggattgcttgagcataggtcgaggctacagtgagccatgatttcaccactgcactccagcctggcagacagagagggaccttgtctcaaaaaaaaaaaaaaaaaaagagaagaatttgcagtccttattcaagataagtccttattcaagataagacattcaagatgtcttttcaaaatatgttctgaatcaaaaaaaaatccaaaattattgttttcgtatcgcataaatgtgaaagactcatcacaaatgacactgatatagtaatgttctatatcttcgtagggggttggattgtataggtgtatgcattagtcaaaatcagtgaacgtacacttaaaggtttatatattccattttacatcaaaataaaccgtcaacaaactctagtcaatgacatgcatgccaaagtatttaaaggaaagtgtacaggtatctgcaatttaaatggatggatagctatatgataaagcaagtaatattaaaatgttaatggtaggatagatcctaagtgatgtgctccttataaaattctttatacttggctggatattcgaaaattttcataataaaatatgagggaaaatgacattggtaagacactgtacttgtaaattgtaaacactgataacacactacatttcataaaattgtaagatgttaagtttggtggcagcaccaggtatttgctccttgatgcttccaaactacgctgcacacacctcttacagaatggttgcctctcccagcatactataagttcctggtgggcacagatctaacctaatttgtatttatattcctattgctttgcatcatgtttggggaataatatgtattcaacaatagtggcatgattgaattaaagtggaatactgctaacgaacaaagtattatatttctagcagattcactattcttttcttacatattctaaaggttaatacgctcaatatccaagagaaatgtgtccttacttctctccaagcatacgaaatttccaaagtttttttaaaaaaactactcattagataattttatattgttacttaaacccaagatctgaaggcctcctaacattcaataactttttagtagttttttttttttcctagaagagcaaagtctcagaactccacggaagcctggaaatcgttttattctaattttagataagctgtctgaactaagagatctctgaactggtcaaaagcaggaaagtgggggtctgggaagaagacaaaaacaaacgccacataaaacgtcatggagcaaactaatcaagaactttagcaagaaacggagagaaagtcttaaggaggacacccagaacatctccagctcctcctggcccgtctcctcaactcctcttaattccagccagtcagagcgcggggccatctgccactcccaggatgccacgcgacgggagcggacgctgcgaggatgcacctccacacgtcaacctcccacaaacagcatggcttcgtggcgtgagcacccggttcggacctgaacgcctgggtccgagtcccacctccccctcctgcctggtctgcagccctgcgcaagtcctcttgccctcgctgagcctcagtttcctcatctgtaaaatgtaatgattccctataattggctacagggagatgagaagtgtaaatggttttaaggaagacacaggcaactctctaacttgttacggctctgaacctcgcggtgctcactaaccagccttgagaccaatctctcaaagtcaccccgctcctcccttcccgcccggcgcctgtactgaggccgctccctcctgttggcccccatgcggaaggcgcgcggcgccgtctgccgtacctgcagccacctggtcagcggggccctcttgctgacccacgacgaagtcgtgcacgaggccccatagggcacccataggcgccgccgcctccacagccgcggcagcggccataacgcgaactagagaccgtgggaggggatatgggcggtggctcgagacgggctctccgcgcatgcgcctcccgagccaatctccggggaagcgcaagggggcggggcgccggggtcacgtgcctgccggcttctgcctaggcagttccagggaggggcggggcctgaaatggggcggtggcaccgagagggaaggcggctgctgggcacgcagccggaggcgattgagggcgaataattcccagcccggctccccgggagacgggctgcggggcgggcacctggctgggtggggagaggggcggtacgcaccacgggggaagccaatgagaaaatcaggcccagccctagggggcggtgctgtcggtcacatgcgcacctggggcgggtggtggcggcggcgcgggcaccgcgagccggcggaagggagaggggccggcctggggcggggttaggcaggtgagtgacaggctccagggggccggcccctgcctggtgccccgagcgagccgggagtagctgcggcggtgcccgccccctctctccgcccctccagcggagctggtctccggccgggcaccgtcgcgggcccccctggcccggccacctgggaccgtgctggggagtctgccacttccctctctcccctggcccgcaaagttttggcggagccatcgctggggctgagcgcgcccccggggggagatcggggagcgcccgatgccgggcggccggagccattgacccgggacgccgccgtccgctgagcagccgaccaccccgccgcctccggtgcatggggactggctgaggagccagcatgggcaactgcgtggggagacagcgccgggagaggccggcagccccgggacacccccgcaagcgagcaggtaacgatggggaagggagcagggcctcgggcatcccgccagttgtccccctcctcgcccgagtcctgggcttaccgatggactccccactggtgctggcgcttgggtttccccgatgggctgctccgcagccagagggggccgctccccagcgccgggcggccgggggagctgagttggggcaactgcgagcactgagccggctgcgcgaccaactctctccaactgggtagctcctggtgggggtgggggcaggaaatgtttgcagaccgcagcggggccgacggatcgggaggaggccgggggcgagggcgccgctggcctggcagctccggccggggtcggacgccggcccgtcggggcacggcgcgggcagccaggcgtccccagaactcggagcgagcgaggcgagaacagtcgctccttccaaagactgtgtcattatcgagctgcagatcgtgtctgcgggaatccgacttgcaaagcagcgcaggactctgggaaagaaatctttatttttcccgcaggggtttttagagcctctcggccgtctgggagtctataaaagatggggtgcggggtgagagtcacccttgggattgttgggatccttcccagctttgggagtgagatcgctcgctggtgatcctccaggcccgcgcaacgctttctcactttcatggtacaccccgcctgccctggcatttcgccccgggaagaggtctgtcggtcatttttctgggtcttacactcacttccttctttgagggtgttgcaaggacccgctgggaataatatcgtagacttgagagctcaaacttgtctggattccagatggacccatctcctactctgtgtcaaagcccagatcctgagaggttgaacaccttgtccaaagtcacacagctagttaggagctcacctggggctagaactcagcctcctctcccaccccattgccacatatccccttatgtaag

SEQ ID NO: 2701 - DNA, 6000 bp, Homo sapiens
tgtgcttttacaccaactctaccccaaatcctgagccagccttgcgtgggctttagaaggtccatacatctggaaaaagacataaacctttgcacatttgtgcattttggggagaaaacagtccacagttttcatcaggttctcaaagaagttggtgaaataaaaaaaaaagataaaataaaatattaaaaccctctgccctgacccaccctaacctcagtacagatataattcacctgtaatctaaccctaacattaacccaatcctaacaccaatcagtctagaattgaatccaatcctaataggcctgactactgagaaccagaatctagagggctggtgttacagctctttcctcccaaagctccccacccccacctctgggcctggagcttcagtcttaacttgctctgtgctcaacctctggtgatccacagtttcctctgcctgctgtcctccccagctgaggagttgggggttcttggctttgacccaagaccttacagcaggacctggctgtcctcactgctctgggacacctgcttactgtctgctcaatctctgtagcctcctccctgggcatacgttccaggaagtcactgtaatgcttcaggccgatggcctgctgggttgtcagggaggcctggctgcggatgtcttccagacttcggaagccctggaaaaaagcagccagatgggaagctgtaaggatccaggaccaatgaagaggcatgagtgagcacacacacaaggcttccatcgccccagactctagggaaggctagaggcaggaccaacctaggggcagttgggtctgtactcagcaggacttgggaaaggcagggagcatgggaaacatgccatcatccagccctgccactatcctaagatgctcgttcatgattccatcagtctgaggatggaccttgtcatcttcatccttaccaagctgccctggtgattgtgggcagagccaggattgggaaccactgctctagacacgcagtgtcaaggcctggcctcctcaggaaggcccttgctggtctggggagactgagaaacatacttcttgtccctgtctactccttcttaaggataccaagcaacaaggctgttctgggagctgaggggtctatatgagtcctggtccgcttgaaaaatggtctccctatactgtgggtgcattcccatcagagcacagcatagggatctggggcagagcacagcacacatctggggcaggaactctgagacacagcaaaactgaagtaggggctgagccagggtgtgacctgttggtaccacatctgggcagtcttggtcccagctccccagatgttggagaagagctccaagacaggcacgctctcactgatatggtccagcttccgcaaatgcccgctctccaggatctctatgattttctcagccatccgcttcccaatcccagggatactgcaggcctcctagaggaggaggaggcagaggcaagaaagaagagtgaggagatggaagaggtagagccagtggaaaggaagctgactcctctagcagatgctgacataaaagccagcctggctgcttggcaactgtgtggctgtgtaaagcttgggtgtagttgaagatgagaattttggatagaatgagggctgggtaatttgtcttttggttcccagaaggatggagaccagcagtaagaagtagaaaataatgatgatattagtcaccaccaccaccaccaccatcatcatcattccaacagcaagagctaacatttactgagggcttactctatgtcaggtcctgtgctacagggaccatttcatttaatagtagcccctttttactaatgagaaaactgatgctttgagagtttaagtaacttgtctggagtcacacagttagtgaatgacaggaaccagagttcaaaccctggtctgttaggcttcagagtccaaacttcttttaaacaactttttaggcgggacacaagggctcatggctgtaatcccagcactttgcagggctgagccgagggtagattgcttgagcccaggagttcaagaccagcctgggtaacacggcaaaacaccatctctgctaaataaatgaataaataaataaataaacaaaattaaaaataaaaaacttttaattatgttaaaaaattcaaaagtagagagatccatataacccccaagtatcgtacatctcccagcttcaacaactatcaagattttgccaatctgctttcatcaattttccttttttttcttttgtgcaagtcctagaccccataaaatcttcaccactgtacctgaaccccactggggttactaaccactggccagtaaagacccctcctcccactctagcccctgggtacctggtacgaggtgacaggcttatggaagctcttgagggcattgatggccttggcatagcccagggccctccacttgtctccctgaacactgtaggctttggccagaacttccagcttctctgtgatatggaggttgtgattggtcgccttctggcttgagggctgtgcacagacccacttatccaggacagcaggggctgggctaggctcacaatctccctcaagggaggtggggtagtggccactgatgagggcttccagatcagctgcactaacctgggtttcttccccatcactggcttcatcatcagagatgggcttgggatagagaagaaaagaaaacaataaattcttgttctccaagagaagggatccttaaaggtgggggtcatcttctttgtgcggggggagggtcttctagtcagacctaagaatgaggcggggccttctgcatcagacttggatctccttgggtgtgaggccacgttccctttggctccacgcagtgcctagccctaggatccccagtggtatgtgttagatatggcctagataaatgcagcagtgatgagtgttgggaagagctaaatggcttcacaatagagccctcctctctcaggggcctgggactttctgaacagccaccaggcccaccccatttctgtgatctgcttcctaggggaagggagttctgagggatgggaggctcctgacctgggcttgggtgtttggtgcctcttttgccttttggggaggagacacaggcctggtgggaggaggaggaggagaaagggctgtctgaagcagggcctcatgggtgccaggaggaatagaagcatcctgctctgccttgctgggctgtggatggtccaagtacctgtggggatggtgatgggaggttaagacaccaaaggtctcaccctgtatctgtccccagtccttctgtactctgaaatacttggtttcccagtgtgtccaattaagaaaacgagttttttgaggtttttggagtttctcttgagacagggtcttgctctgtcacccaggctggagtacagtggtacgatcaaggctcactgcagccttaacctccctggctcaatcaatcctcccacctaaacctcttatagctgggactacaggcacaccccaccatgcctggctaattttttaattaatgatagttatttttaataattcaagaaaagagctcaagatgctactagaaaacatttgaaaaaaagactgggatcagcccacctactggggatgaagatgctgaatccagctacatccaccagcctcctctcctgaaggcacaagctcagccaggctgacttcaccagctgagcacccgggggcagctggggtagtctgagaaggcggagggctcgctcatagtccatgccttcatccaccacaatgtgagtgacacctgggccctgggcagggcatagctggccgccatgctgaacaatctgcttctcaaagagttctgcccgggctcgtccaatgccagtgcgcacaacatgggcccgaagggagctcagccactctgtggaaggaacatccagatgactactgttgtaactttttaatttttatctgccaccccctggccacgacataacttctaacatgatctgaatgacgtgttcacagtcccctaccctgaaaataagcatttcccttccatccagacagctttccttctacatatagcaaattttctcacaggccagcacttgaatgtaagggacaaggattttcatacgtcctgttccttggtgcaatctagaagtgtctggcacattgtaagtaacctgtaaatatttgtttaatgaatgcctcctcccttcttactttgttttttgtttgtttgttttgttttcttttgttttgtttttgtttggagacagtctcactctgtcgcccaggctggagtacagtggcatcgtcttggctcactgcaacctccatctcccgagttcaagcgattctcatgcctcagcctcccgagtagctgggattaccggcgtgtgccaccatgcctggctaattttttgtatttttagtagagacagggtttcgccatgttgcccaagctggtctcgaactcctgagcacaggtgatctgcctgcctcggcctcccaaagtgctgagattacaggcaagagccaccgcgcccagcctctctccatactttgaatcctttatcatttattctttcaacaaagcgcgtttcttgcccttacagtctgacagacccgacaaccctgcctccaaagcctctgccatttatttgccaatttggctgcaaaacaactaacaacaagcctgggtaatggaggggggtttctgtcccagtcctcagggcaaaaattatactggtcattccctgagggcccagggagtcttttctgatggatagaggtcttcgggtagaaaagaaggtaacacagcaaatagcctgtccaagacccaggaccaagcttagcacaaggtagatacaaacagacctgcaggccctggacaggcagagtcagctccaatatctgattctggacataaacaacgtagggctgaagcacatgaaggctgtgggttcaagcacacgagggttctgagactgggtcagctcaccttctgcttcttctccctcttccctcctaggaatctttgcaagtacttttgatgatgcatcagcatgaattttctgccgcttgggaaatgccttcaagatacccctgggatccattgaagtatggctggatcccggcctattggagcgttggtcagggctgctgcacgtggaaatccagaattgaggccctccaacccctttgcctatggaggtagggtctttcctgaccaggctttgggggtagcagcccagtttggggaagcgggtcgggggagggggtctcttcaaacccggttaaacttcagtggtttagcctagcttcacactccccagcctttcgaagttggagtattacgggaaatgaggggaaggctggtgccatcgggggtacttttgaggagtaggaaacgacaccattcctcagaggggttgcgctaaagattcagcacagccctgctgcggcccacttcgaagggctttaccaaatgggatgctgggctaggaaatggagctttaggggatggagcggagcctggggaggacctgcacataaaccccacatactatttctctacctccaacacagactcgcagaggaaggaggaggactttcgggggtgagtgggaacgccctgcacctgtcctggtctcagcctctcgacatgggggtgctcagcgccgcagctgcggggagatggggcacggccgcagcaggtgtggggagccctccgggaatggaggagtctcgcagctgcgggtgaagtcccgggcaggtgcggtgtactcgccgtgtacgcagctggcgcaggccagggaatcccagctcggggctagaagaaagctggagtgcccgaccccggccccaagagtctctccaacccccagagtcggtccccgggtggggtcgactactggccaagctagtcacccgggggtgggcaggaatagaccacttaccagcagagcca

SEQ ID NO: 2702 - DNA, 6000 bp, Homo sapiens
cctgcctcagtttccccagtagctgggattacaggtacccaacacaggtgtttagtttttataaagccaactatatattttctttctttgtggttactgccttagaagttgcactcagagcatcttcccttacccaatgattattcgatacttatctatactttgttttaatagtatatttattctagaaataaatgtatatataaattattaagtatattagtatatttttgtaaaagaaaaataactgtgagtgtatgcatgaaataatatagaagtttatgtataaaaatataaattatgggctgggcgaggcggctcacgcctgtaatctcagccctttgggaagccgatgcaggcggatcacctaaggtctggagtttgagaccagcctggttaacatggtgaaaccctgtctctactaaaaattaaaaaaaaaattagccgggcttggtggcgggcgcctataatcccagctactcaggagactgagataggagaatcgcttgaacccagcaggcaaaggttgcagtgcgccgagattgcgccattgcactccagtttgggcaacaagagtgaaacttgtctcaaaaaaaaaagtaaattatgattatctgggtggtaatattatatttgacttctttatttttcatatttccacaatgaatgtaattatttcttaaaaaaacaaaagtaaaatggagtctcattatccagcccaagatatcaatagccatgattcttggtggaagggagtaacctcccccctactccccacacccctcctacacacccaggggtaaatctgcaggtttgacaaggcttaaccacatatgcaatactgagttgtttttcagtctggggatagggtggaatcttaacaatatcattttgtgatgctactaacaaaagaacttaacaaaatcctggctgataaaatatttgtttaaaaacttctgtgaccaaaaacagtgaaagcagggactcaagtggatatttgtatactcatgttcagagcagcattatccacaatacccaaaaggtggaagcaacccaggtgtccatcaacagatgaataaataaacagaatgcagtgtagacatacaatggatatcactcagccttaaaaaggagcaaaattttgacacatgctacaatatccatacctctgtgcccacctcttccaggcacagcccttggtccttgctctatctcccctaaaaacacagggaacatttagaggtttactttatgaacgatattacagctggaaaggatccaaacaagtaaaggggccaactagagatcctgtggtgaattaatggcacagctggaagtatccaactgtggcaacatggatgaaccttgaagcgttacactaagtgaaatacaccagttacagaaagacaaatattgtatgattccacttagacgaggttcctagagcagtcaaattcatagacagaaagtagaatggtggttgccaggggatgggaggaggagggaatgaggagttggcatttggtgggtacagaatttcacttgagctgagtgtagtggcacatgcctgtagtcccagctattcaagaggctgaggtgggaggactacatgagcctaggagttcaaggctgcagtgagctatgatcgtaccccacagcctgggtgacagagcaagaccctgtctctaaaaaaaaaaaaaaaaaaagaatttccgttgagaaagattaaaaagttctgaagatggtggtgatagttgcacaacaatgtgaatgtacttaatgccacagaactgtacacttaaaaatgattaaaatgctaaattctgttatgtatttattaccacaataaaaacaaaaaccactgtcctatgagaaaatgtcctaaatctttagcaaggcataagagatctatcacaatatgtcccaacttatctgtcatctctcttcattttccacaacttcccctcattgctccttgagaaaagggacctttttattctcgcttccatcctggcacctagaatagtacctgacatagttataggtggtttgttctgactgagtgactgctttaacattactaaacattttgttattcctctagtaatcaggcacgtaccttcacaccttcacatagggtccttatatgtgagttgttctttgaatagctatcccctcttcttcactcagcaaacgcctattaattcttttttttttttttttttccagtttttttgagacagggtctcgctctgtcgcccaagctggagtgcactggcatgatctcggctcactgctgcgtctacctcgctggctcaagcgatcctctggcctcagccaccacaagtagctgggactacaggcatgtgccatgatgcacggcttatttatttttttgtctgagacacagtctcactcactctgtcacccaggctggaatgcagtggtgtgatctcagttcactgcaacctccatctcccgggttcaagcgattctcctgcctcagcctccagagtagctggaattacgggtgcgcaccaccacacctggctaatttttttgtatttttagtagcgatggggtggtttcatcatgttggctaggctggtctcgaactcctggcctcaagggatccgcccactcggcctcccaacatgctgggattacaggcgtgaaccaccacatccggccataatttccgtattttttgtagagatgaggtttggccatgttgcccaagctggtctcgaactcctgagctcaaatgatccgcccactttggcctcccagagtgctggaattacgggcgtgagccactgtgcctgaccttattaattctttaggacccagaaacatcatcacttctgttgggtcttcctccaaagagatgtcacttacaccttcactctttcctaccattttatacaagactacaacctctatttaacgcttcttattatttaagtacatgtttttcccaaccactctgagtcctgggacaacatatctttttctttctgttctagtttagagcttggcacatagtaaaagtcttcctaaatgttgcacgaacgagtaaatgattttaatttccacaaactccaggcttccctgattggcccctgcctgtgaacatgagtcaccagttgttatcttgaaagcctcaggaacttcagacgcaattcatcctggctacccagtgggtccagaaaggacccaagtgcacaaaggggccggcatcggccaatcctagggtggggaaaagttaggtatccatgcccctgtgcccacttcttccaggcacagcccttggttcttgctctagctcccctaaagacacagaaaatatttagaagttcacttaacaaaaatattacagctggaaaggacctcagagataacaatggtagtccatccacttcattttatagatgaggaaagtgaggcccaaacaagtaaaggagccgactgaagcgcccgtggtgaattaatggcacagtcggaactagagcccaggcctctctcctctctaaagtctaaaacattcttggatttcagtttcctcttctgtaaaacggggtgaaaattagcctctcaggacagtggtgaggagcaaatgagataatgaatgtaaaagaaattactatattagcaacagaaatcagagcggagcgagatggtgtagaggaatctaaggggtgtccggagacatgtgttccagtcatgtcatctctgtgaacctcagtctcctcatctgcaaatgcaggacctggcccggctgaccgccgagacccttccagctctgccgacccaggccctgaggcccttcccggagggccggaccctgagggaaaaaaacgaaggagcccgtggggaccctcgagttaccgtcctgcagcagcgcagtcttctgggctgtccgcagactctccaaccagcccgtcaccgccatctttcccctgctaagcagcacgcccagccgctgccatggcaaccgttccagagggtcacttccggctgactcggaagctattctggccatttgccctccttccccccttcgtccgctctcattggctctgctggtaagtggtctattcctgcccacccccgggtgactagcttggccagtagtcgaccccacccggggaccgactctgggggttggagagactcttggggccggggtcgggcactccagctttcttctagccccgagctgggattccctggcctgcgccagctgcgtacacggcgagtacaccgcacctgcccgggacttcacccgcagctgcgagactcctccattcccggagggctccccacacctgctgcggccgtgccccatctccccgcagctgcggcgctgagcacccccatgtcgagaggctgagaccaggacaggtgcagggcgttcccactcacccccgaaagtcctcctccttcctctgcgagtctgtgttggaggtagagaaatagtatgtggggtttatgtgcaggtcctccccaggctccgctccatcccctaaagctccatttcctagcccagcatcccatttggtaaagcccttcgaagtgggccgcagcagggctgtgctgaatctttagcgcaacccctctgaggaatggtgtcgtttcctactcctcaaaagtacccccgatggcaccagccttcccctcatttcccgtaatactccaacttcgaaaggctggggagtgtgaagctaggctaaaccactgaagtttaaccgggtttgaagagaccccctcccccgacccgcttccccaaactgggctgctacccccaaagcctggtcaggaaagaccctacctccataggcaaaggggttggagggcctcaattctggatttccacgtgcagcagccctgaccaacgctccaataggccgggatccagccatacttcaatggatcccaggggtatcttgaaggcatttcccaagcggcagaaaattcatgctgatgcatcatcaaaagtacttgcaaagattcctaggagggaagagggagaagaagcagaaggtgagctgacccagtctcagaaccctcgtgtgcttgaacccacagccttcatgtgcttcagccctacgttgtttatgtccagaatcagatattggagctgactctgcctgtccagggcctgcaggtctgtttgtatctaccttgtgctaagcttggtcctgggtcttggacaggctatttgctgtgttaccttcttttctacccgaagacctctatccatcagaaaagactccctgggccctcagggaatgaccagtataatttttgccctgaggactgggacagaaacccccctccattacccaggcttgttgttagttgttttgcagccaaattggcaaataaatggcagaggctttggaggcagggttgtcgggtctgtcagactgtaagggcaagaaacgcgctttgttgaaagaataaatgataaaggattcaaagtatggagagaggctgggcgcggtggctcttgcctgtaatctcagcactttgggaggccgaggcaggcagatcacctgtgctcaggagttcgagaccagcttgggcaacatggcgaaaccctgtctctactaaaaatacaaaaaattagccaggcatggtggcacacgccggtaatcccagctactcgggaggctgaggcatgagaatcgcttgaactcgggagatggaggttgcagtgagccaagacgatgccactgtactccagcctgggcgacagagtgagactgtctccaaacaaaaacaaaacaaaagaaaacaaaacaaacaaacaaaaaacaaagtaagaagggaggaggcattcattaaacaaatatttacaggttacttacaatgtgccagacacttctagattgcaccaaggaacaggacgtatgaaaatccttgtcccttacattcaagtgctggcctgtgagaaaatttgctatatgtagaaggaaagctgtctggatggaaggg

SEQ ID NO: 2703 - DNA, 6000 bp, Homo sapiens
ggatgcagcgcttactaaatccaggcatttcacatgtcttatcaaatttaattctcacaataatcctatgtgttttcattacctgtatttcatagatgaggaaaagtgagggtttttttttttgacagagtctcgctctgtcgccaggctggagtgcagtggtgtgatctcggctcactgcaacctctgcctcccgggtttaagcaattctcctgcctcagcctcctgagtagctgggactacaggtgaatgctaccacacccagctaatttttgtatttttagtagacacagggcttcaccattttggctaggatggtttcaatctcctgagctcgtgatctgcccatctcagcctcccaaagggctgggattacaggcatgagccaccacgcccggccaactgaggcttttttttagagtgtcttgctctgttgccaaggctggagtgcagtggtgtgatctcggctcactgcaacctctgcctcctgggctcaagtgatcctccacctcagactcccgagtagctgggaccatggttgcacaccaccatgcccagctaatttttaaatttctttgtagagatggggtcttactatgttacccagactgatctcaaactcctgagctcaagtgatcctcctgccttggcctctcaaagtgttgagaatacaggtgtgagccaccacgcctggcccttaactttgtttaaagtgggttttcccaaacaagtgtttttgttttttaagagtgtctggctatgttccctaggctggagtgcagtggctattcacaggcatgattatagcacactacagcctcaaacttctggcctcaagtgagcttcctgcctcagtttccccagtagctgggattacaggtacccaacacaggtgtttagtttttataaagccaactatatattttctttctttgtggttactgccttagaagttgcactcagagcatcttcccttacccaatgattattcgatacttatctatactttgttttaatagtatatttattctagaaataaatgtatatataaattattaagtatattagtatatttttgtaaaagaaaaataactgtgagtgtatgcatgaaataatatagaagtttatgtataaaaatataaattatgggctgggcgaggcggctcacgcctgtaatctcagccctttgggaagccgatgcaggcggatcacctaaggtctggagtttgagaccagcctggttaacatggtgaaaccctgtctctactaaaaattaaaaaaaaaattagccgggcttggtggcgggcgcctataatcccagctactcaggagactgagataggagaatcgcttgaacccagcaggcaaaggttgcagtgcgccgagattgcgccattgcactccagtttgggcaacaagagtgaaacttgtctcaaaaaaaaaagtaaattatgattatctgggtggtaatattatatttgacttctttatttttcatatttccacaatgaatgtaattatttcttaaaaaaacaaaagtaaaatggagtctcattatccagcccaagatatcaatagccatgattcttggtggaagggagtaacctcccccctactccccacacccctcctacacacccaggggtaaatctgcaggtttgacaaggcttaaccacatatgcaatactgagttgtttttcagtctggggatagggtggaatcttaacaatatcattttgtgatgctactaacaaaagaacttaacaaaatcctggctgataaaatatttgtttaaaaacttctgtgaccaaaaacagtgaaagcagggactcaagtggatatttgtatactcatgttcagagcagcattatccacaatacccaaaaggtggaagcaacccaggtgtccatcaacagatgaataaataaacagaatgcagtgtagacatacaatggatatcactcagccttaaaaaggagcaaaattttgacacatgctacaatatccatacctctgtgcccacctcttccaggcacagcccttggtccttgctctatctcccctaaaaacacagggaacatttagaggtttactttatgaacgatattacagctggaaaggatccaaacaagtaaaggggccaactagagatcctgtggtgaattaatggcacagctggaagtatccaactgtggcaacatggatgaaccttgaagcgttacactaagtgaaatacaccagttacagaaagacaaatattgtatgattccacttagacgaggttcctagagcagtcaaattcatagacagaaagtagaatggtggttgccaggggatgggaggaggagggaatgaggagttggcatttggtgggtacagaatttcacttgagctgagtgtagtggcacatgcctgtagtcccagctattcaagaggctgaggtgggaggactacatgagcctaggagttcaaggctgcagtgagctatgatcgtaccccacagcctgggtgacagagcaagaccctgtctctaaaaaaaaaaaaaaaaaaagaatttccgttgagaaagattaaaaagttctgaagatggtggtgatagttgcacaacaatgtgaatgtacttaatgccacagaactgtacacttaaaaatgattaaaatgctaaattctgttatgtatttattaccacaataaaaacaaaaaccactgtcctatgagaaaatgtcctaaatctttagcaaggcataagagatctatcacaatatgtcccaacttatctgtcatctctcttcattttccacaacttcccctcattgctccttgagaaaagggacctttttattctcgcttccatcctggcacctagaatagtacctgacatagttataggtggtttgttctgactgagtgactgctttaacattactaaacattttgttattcctctagtaatcaggcacgtaccttcacaccttcacatagggtccttatatgtgagttgttctttgaatagctatcccctcttcttcactcagcaaacgcctattaattcttttttttttttttttttccagtttttttgagacagggtctcgctctgtcgcccaagctggagtgcactggcatgatctcggctcactgctgcgtctacctcgctggctcaagcgatcctctggcctcagccaccacaagtagctgggactacaggcatgtgccatgatgcacggcttatttatttttttgtctgagacacagtctcactcactctgtcacccaggctggaatgcagtggtgtgatctcagttcactgcaacctccatctcccgggttcaagcgattctcctgcctcagcctccagagtagctggaattacgggtgcgcaccaccacacctggctaatttttttgtatttttagtagcgatggggtggtttcatcatgttggctaggctggtctcgaactcctggcctcaagggatccgcccactcggcctcccaacatgctgggattacaggcgtgaaccaccacatccggccataatttccgtattttttgtagagatgaggtttggccatgttgcccaagctggtctcgaactcctgagctcaaatgatccgcccactttggcctcccagagtgctggaattacgggcgtgagccactgtgcctgaccttattaattctttaggacccagaaacatcatcacttctgttgggtcttcctccaaagagatgtcacttacaccttcactctttcctaccattttatacaagactacaacctctatttaacgcttcttattatttaagtacatgtttttcccaaccactctgagtcctgggacaacatatctttttctttctgttctagtttagagcttggcacatagtaaaagtcttcctaaatgttgcacgaacgagtaaatgattttaatttccacaaactccaggcttccctgattggcccctgcctgtgaacatgagtcaccagttgttatcttgaaagcctcaggaacttcagacgcaattcatcctggctacccagtgggtccagaaaggacccaagtgcacaaaggggccggcatcggccaatcctagggtggggaaaagttaggtatccatgcccctgtgcccacttcttccaggcacagcccttggttcttgctctagctcccctaaagacacagaaaatatttagaagttcacttaacaaaaatattacagctggaaaggacctcagagataacaatggtagtccatccacttcattttatagatgaggaaagtgaggcccaaacaagtaaaggagccgactgaagcgcccgtggtgaattaatggcacagtcggaactagagcccaggcctctctcctctctaaagtctaaaacattcttggatttcagtttcctcttctgtaaaacggggtgaaaattagcctctcaggacagtggtgaggagcaaatgagataatgaatgtaaaagaaattactatattagcaacagaaatcagagcggagcgagatggtgtagaggaatctaaggggtgtccggagacatgtgttccagtcatgtcatctctgtgaacctcagtctcctcatctgcaaatgcaggacctggcccggctgaccgccgagacccttccagctctgccgacccaggccctgaggcccttcccggagggccggaccctgagggaaaaaaacgaaggagcccgtggggaccctcgagttaccgtcctgcagcagcgcagtcttctgggctgtccgcagactctccaaccagcccgtcaccgccatctttcccctgctaagcagcacgcccagccgctgccatggcaaccgttccagagggtcacttccggctgactcggaagctattctggccatttgccctccttccccccttcgtccgctctcattggctctgctggtaagtggtctattcctgcccacccccgggtgactagcttggccagtagtcgaccccacccggggaccgactctgggggttggagagactcttggggccggggtcgggcactccagctttcttctagccccgagctgggattccctggcctgcgccagctgcgtacacggcgagtacaccgcacctgcccgggacttcacccgcagctgcgagactcctccattcccggagggctccccacacctgctgcggccgtgccccatctccccgcagctgcggcgctgagcacccccatgtcgagaggctgagaccaggacaggtgcagggcgttcccactcacccccgaaagtcctcctccttcctctgcgagtctgtgttggaggtagagaaatagtatgtggggtttatgtgcaggtcctccccaggctccgctccatcccctaaagctccatttcctagcccagcatcccatttggtaaagcccttcgaagtgggccgcagcagggctgtgctgaatctttagcgcaacccctctgaggaatggtgtcgtttcctactcctcaaaagtacccccgatggcaccagccttcccctcatttcccgtaatactccaacttcgaaaggctggggagtgtgaagctaggctaaaccactgaagtttaaccgggtttgaagagaccccctcccccgacccgcttccccaaactgggctgctacccccaaagcctggtcaggaaagaccctacctccataggcaaaggggttggagggcctcaattctggatttccacgtgcagcagccctgaccaacgctccaataggccgggatccagccatacttcaatggatcccaggggtatcttgaaggcatttcccaagcggcagaaaattcatgctgatgcatcatcaaaagtacttgcaaagattcctaggagggaagagggagaagaagcagaaggtgagctgacccagtctcagaaccctcgtgtgcttgaacccacagccttcatgtgcttcagccctacgttgtttatgtccagaatcagatattggagctgactctgcctgtc

SEQ ID NO: 2704 - DNA, 6000 bp, Homo sapiens
ggtctatatgagtcctggtccgcttgaaaaatggtctccctatactgtgggtgcattcccatcagagcacagcatagggatctggggcagagcacagcacacatctggggcaggaactctgagacacagcaaaactgaagtaggggctgagccagggtgtgacctgttggtaccacatctgggcagtcttggtcccagctccccagatgttggagaagagctccaagacaggcacgctctcactgatatggtccagcttccgcaaatgcccgctctccaggatctctatgattttctcagccatccgcttcccaatcccagggatactgcaggcctcctagaggaggaggaggcagaggcaagaaagaagagtgaggagatggaagaggtagagccagtggaaaggaagctgactcctctagcagatgctgacataaaagccagcctggctgcttggcaactgtgtggctgtgtaaagcttgggtgtagttgaagatgagaattttggatagaatgagggctgggtaatttgtcttttggttcccagaaggatggagaccagcagtaagaagtagaaaataatgatgatattagtcaccaccaccaccaccaccatcatcatcattccaacagcaagagctaacatttactgagggcttactctatgtcaggtcctgtgctacagggaccatttcatttaatagtagcccctttttactaatgagaaaactgatgctttgagagtttaagtaacttgtctggagtcacacagttagtgaatgacaggaaccagagttcaaaccctggtctgttaggcttcagagtccaaacttcttttaaacaactttttaggcgggacacaagggctcatggctgtaatcccagcactttgcagggctgagccgagggtagattgcttgagcccaggagttcaagaccagcctgggtaacacggcaaaacaccatctctgctaaataaatgaataaataaataaataaacaaaattaaaaataaaaaacttttaattatgttaaaaaattcaaaagtagagagatccatataacccccaagtatcgtacatctcccagcttcaacaactatcaagattttgccaatctgctttcatcaattttccttttttttcttttgtgcaagtcctagaccccataaaatcttcaccactgtacctgaaccccactggggttactaaccactggccagtaaagacccctcctcccactctagcccctgggtacctggtacgaggtgacaggcttatggaagctcttgagggcattgatggccttggcatagcccagggccctccacttgtctccctgaacactgtaggctttggccagaacttccagcttctctgtgatatggaggttgtgattggtcgccttctggcttgagggctgtgcacagacccacttatccaggacagcaggggctgggctaggctcacaatctccctcaagggaggtggggtagtggccactgatgagggcttccagatcagctgcactaacctgggtttcttccccatcactggcttcatcatcagagatgggcttgggatagagaagaaaagaaaacaataaattcttgttctccaagagaagggatccttaaaggtgggggtcatcttctttgtgcggggggagggtcttctagtcagacctaagaatgaggcggggccttctgcatcagacttggatctccttgggtgtgaggccacgttccctttggctccacgcagtgcctagccctaggatccccagtggtatgtgttagatatggcctagataaatgcagcagtgatgagtgttgggaagagctaaatggcttcacaatagagccctcctctctcaggggcctgggactttctgaacagccaccaggcccaccccatttctgtgatctgcttcctaggggaagggagttctgagggatgggaggctcctgacctgggcttgggtgtttggtgcctcttttgccttttggggaggagacacaggcctggtgggaggaggaggaggagaaagggctgtctgaagcagggcctcatgggtgccaggaggaatagaagcatcctgctctgccttgctgggctgtggatggtccaagtacctgtggggatggtgatgggaggttaagacaccaaaggtctcaccctgtatctgtccccagtccttctgtactctgaaatacttggtttcccagtgtgtccaattaagaaaacgagttttttgaggtttttggagtttctcttgagacagggtcttgctctgtcacccaggctggagtacagtggtacgatcaaggctcactgcagccttaacctccctggctcaatcaatcctcccacctaaacctcttatagctgggactacaggcacaccccaccatgcctggctaattttttaattaatgatagttatttttaataattcaagaaaagagctcaagatgctactagaaaacatttgaaaaaaagactgggatcagcccacctactggggatgaagatgctgaatccagctacatccaccagcctcctctcctgaaggcacaagctcagccaggctgacttcaccagctgagcacccgggggcagctggggtagtctgagaaggcggagggctcgctcatagtccatgccttcatccaccacaatgtgagtgacacctgggccctgggcagggcatagctggccgccatgctgaacaatctgcttctcaaagagttctgcccgggctcgtccaatgccagtgcgcacaacatgggcccgaagggagctcagccactctgtggaaggaacatccagatgactactgttgtaactttttaatttttatctgccaccccctggccacgacataacttctaacatgatctgaatgacgtgttcacagtcccctaccctgaaaataagcatttcccttccatccagacagctttccttctacatatagcaaattttctcacaggccagcacttgaatgtaagggacaaggattttcatacgtcctgttccttggtgcaatctagaagtgtctggcacattgtaagtaacctgtaaatatttgtttaatgaatgcctcctcccttcttactttgttttttgtttgtttgttttgttttcttttgttttgtttttgtttggagacagtctcactctgtcgcccaggctggagtacagtggcatcgtcttggctcactgcaacctccatctcccgagttcaagcgattctcatgcctcagcctcccgagtagctgggattaccggcgtgtgccaccatgcctggctaattttttgtatttttagtagagacagggtttcgccatgttgcccaagctggtctcgaactcctgagcacaggtgatctgcctgcctcggcctcccaaagtgctgagattacaggcaagagccaccgcgcccagcctctctccatactttgaatcctttatcatttattctttcaacaaagcgcgtttcttgcccttacagtctgacagacccgacaaccctgcctccaaagcctctgccatttatttgccaatttggctgcaaaacaactaacaacaagcctgggtaatggaggggggtttctgtcccagtcctcagggcaaaaattatactggtcattccctgagggcccagggagtcttttctgatggatagaggtcttcgggtagaaaagaaggtaacacagcaaatagcctgtccaagacccaggaccaagcttagcacaaggtagatacaaacagacctgcaggccctggacaggcagagtcagctccaatatctgattctggacataaacaacgtagggctgaagcacatgaaggctgtgggttcaagcacacgagggttctgagactgggtcagctcaccttctgcttcttctccctcttccctcctaggaatctttgcaagtacttttgatgatgcatcagcatgaattttctgccgcttgggaaatgccttcaagatacccctgggatccattgaagtatggctggatcccggcctattggagcgttggtcagggctgctgcacgtggaaatccagaattgaggccctccaacccctttgcctatggaggtagggtctttcctgaccaggctttgggggtagcagcccagtttggggaagcgggtcgggggagggggtctcttcaaacccggttaaacttcagtggtttagcctagcttcacactccccagcctttcgaagttggagtattacgggaaatgaggggaaggctggtgccatcgggggtacttttgaggagtaggaaacgacaccattcctcagaggggttgcgctaaagattcagcacagccctgctgcggcccacttcgaagggctttaccaaatgggatgctgggctaggaaatggagctttaggggatggagcggagcctggggaggacctgcacataaaccccacatactatttctctacctccaacacagactcgcagaggaaggaggaggactttcgggggtgagtgggaacgccctgcacctgtcctggtctcagcctctcgacatgggggtgctcagcgccgcagctgcggggagatggggcacggccgcagcaggtgtggggagccctccgggaatggaggagtctcgcagctgcgggtgaagtcccgggcaggtgcggtgtactcgccgtgtacgcagctggcgcaggccagggaatcccagctcggggctagaagaaagctggagtgcccgaccccggccccaagagtctctccaacccccagagtcggtccccgggtggggtcgactactggccaagctagtcacccgggggtgggcaggaatagaccacttaccagcagagccaatgagagcggacgaaggggggaaggagggcaaatggccagaatagcttccgagtcagccggaagtgaccctctggaacggttgccatggcagcggctgggcgtgctgcttagcaggggaaagatggcggtgacgggctggttggagagtctgcggacagcccagaagactgcgctgctgcaggacggtaactcgagggtccccacgggctccttcgtttttttccctcagggtccggccctccgggaagggcctcagggcctgggtcggcagagctggaagggtctcggcggtcagccgggccaggtcctgcatttgcagatgaggagactgaggttcacagagatgacatgactggaacacatgtctccggacaccccttagattcctctacaccatctcgctccgctctgatttctgttgctaatatagtaatttcttttacattcattatctcatttgctcctcaccactgtcctgagaggctaattttcaccccgttttacagaagaggaaactgaaatccaagaatgttttagactttagagaggagagaggcctgggctctagttccgactgtgccattaattcaccacgggcgcttcagtcggctcctttacttgtttgggcctcactttcctcatctataaaatgaagtggatggactaccattgttatctctgaggtcctttccagctgtaatatttttgttaagtgaacttctaaatattttctgtgtctttaggggagctagagcaagaaccaagggctgtgcctggaagaagtgggcacaggggcatggatacctaacttttccccaccctaggattggccgatgccggcccctttgtgcacttgggtcctttctggacccactgggtagccaggatgaattgcgtctgaagttcctgaggctttcaagataacaactggtgactcatgttcacaggcaggggccaatcagggaagcctggagtttgtggaaattaaaatcatttactcgttcgtgcaacatttaggaagacttttactatgtgccaagctctaaactagaacagaaagaaaaagatatgttgtcccaggactcagagtggttgggaaaaacatgtacttaaataataagaagcgtta

SEQ ID NO: 2705 - DNA, 6000 bp, Homo sapiens
ggtgtggtgaaatttgacactctcatatgtcaacatttttctttttctttttttctttttgagacagggccttgctcggtcacccaggctcatgtgcagtggcacgatcgtgtctcactgcagccttgacctcctgggctcaagtgatcctccctcccgtctcagtctctcatgtagctgggactacaggtatgagccaccatgtttggctaatttttttattttttgtagaaatgagggtctcactatattgcccaggctggtctggaactcctgggctcaagcaaacctgctggctcagtctcccaaagcgctgagattagaggcatgagccaccatgtttggccaccaatctttttagaggccagttaggcaatacagagcaaaaacatttttaatatgatctttgactcatcaattccacttcttgaattgtgtcttcagggaatataatcagacaaatacacaaagatgcttgtatatgcacactaactgtggaattgtttatgatgacaaaaaaattggaaactacctagatgcctgtcatgcctgtcaatacagaaatgcttaaataaattatggtatagttagacactagaactctgtgcagctattaaaaaaggattagacagatctatttgggatggcttggaaagatgtcaacgatctgtattggatgatgccagttttatatcttaacagatatacatgcggccaggtgcagtggctaacacctgtaatcccagcacttcgggaggccgaggtgggcagaatacttgaggtcaggagtttagggccagcctggccaacatggcaaaaccctgtctctactaaaaatacaaaaaattagccgggcttggtggtgtgcgcctgtgatcccagctactcaagaggctgaggaggagaattgcttgaacccaggtggtggaggttgcagtgagccgagatcacaccactgcactccagccttggcgacagacggaaacttcatcttaaaaaatatatatatatatatatttatatatatatatatatacacacatacacatacatacacacagaaaaaaacatatataggcctaactttttcaaagtagctttattgaggtataatttacaaagcatataattcacccattctaagtgtaaaatcatcaccataatctagttataaaacccttttttattgtcccccaaaattctctcatgctcatgggcttaactttttttatttggccatgtattatgttattaaaaggaaaagcttttacaagaggctcatttccatttctttttttcataatatatgaaaaaatttatgataatatttctatttctttttttttttttttgagacagggtctagctctgtcgcccaggtgaagtgcagtggcacgatctcaggtcactgcaacctccgcctcccaggttcaagcgattctcctgcctcagcctcccgagtagctgggattacagatgcatgacaccacacccggctaatttttgtatttttgttagagacggggtattgccatgttggccatgctcatctcaaactcctgacctgaggtgatccacccacctcagcctctcaaattgctgggattacaggtgtgagcccccgtgcccagcctatttctatttcttaatggtgtcagaactttatctttgctttgctagtgactttttaaaaaccacttattgaattatgattgacatacaataagctgctcatacttaatgtatataactagatgagctgggtgataactgtacatcaccactgcctattacataaacatatccatcatcacaggcttaacttttaacagtggttaggtcgagggtaactatgagtaggggggaaggaaggaggacagaactatagacagcttcctagtttataatttctgtattatttgaattatttacaacaaaaatatactatctttcatttttattttttcttcgagacaagttctagctctgttgcccaggctgacgtgcagtggcacaaacatggctcactgcagcctcatcctcttgggcccaagtgatcctcctgcctcagcctccccagtagctgagaccacaggtgagtgccaccatgcccagctaatttttctgtttttaatttttggtagatgtgatctcgccatgttgcccagtctggtctcaaattcctgggctcaagaaatcctcccacctcagcctgggattataggtgtgagccaccccacccagccagtaatacactatcttttaattgacaaaatagtaaagtcttttctattttgaaaagaacaaaataaggaaacagacatatacccattgaccgaaatctacttttggcaatttatcctaaggaaataatcaaatatgtggaaaaagatttgtgtacaaagatatttatccgtattttattaaaaacagaggaattataatctaaatatctcataatggaagagaacaattattaattgtattgaaatatgcgaagtgcaggatgcaaacctttttatgtaatacaacctcaaccatgttgaaaaaagttaatgcacaaccaaaaaaatcctgttttgaaatataagttcttatcaatggttgtgtctggatagtagaattatagtacttttaatttaattttattttttaagcatttcattttctccataaatgataataattacaaataattatagtattgttttcacaggtctatacatttgtcaaaacatataaaagtgcacacttgcagcaaaccaccatggcacgtgtatacctatgtaacaaacctgcacgttctgcatgtgtatcccagaacttaaagtataattttaaaaaaaagcaaacaagtactagcaaaaaaaccaaatgcacactttaaatatgtacagtttattgtatatcaatatattgcaataacacttaaaaaaatagaaggatctcaaggaattgaatcatcttaagcgtcttactggaaggggggttttgctatgccattttggggctgaagggcaaaatgactgggggggcagacattatataaatagcaatatatacatacattgtctctgctccagataccgccattcattcattcattcaccagatctgccttcctattatatgccaggaatgttgccgggtacttggatatcttgatgaacaacaaaccactggcctgaaagagctcccgtctggtggaggaggggaaggtaggtcaccacctgacggattccagccaacgtccacactgccccaccagggagtgctgcccaagggggctggaggcagatcaggaagtgggggccttagctgaggtggagtcaccaagagtgacaccaggtttacagttgtggaggtggccagaagttagttttaccctcaagggagtgtcgcagtcatcagttgagaagtgggggcccggcgcggtggctcacgccagtactttgggaggccgaggcgggcggatcacgaggtcaggagatcgagaccatcctggctaacacggtgaaaccccgtctctactaaaaatacaaaaaaattagcggggcgtggtggcgggcgcctgtagtcccagctactcgggaggctgaggcaggagaatagcgtgaagccgggaggcggagcttgcggtgagcctagttcgcgccactgcactccagcctgggcgacagatcgagactccgtctcaaaaaaaaaaaaaaaaaaaaaaaaagaaagaaagaaaaaaaagagaagtggtcttaaacagtttttatgtatctgtgtctatcttgcctgcacacttaaaacaacaagagtaagaactaagattgagcgtttacgggtgcaggggccgcgcaaagggcttccatctattgtctcattcacaaccttctggtagggactattaggatcttcattttacggcgaggaaaccgaggctcggagaggtcacctgcccaaggtcacagatctctctctccaaagctcaagctcacaaccaccacacaaactcccctctcactgtacctggggcccgtctgagagcgaaaaagtccgctttcaggtcccaaccctaacaggtccggctttcactccacagtttttcccagatccagaatggagacaacatccgctagcacaatcaacagggtcgtcccacgggggccgctccatcaaggccgtggactgacaggatttggggcttggagggcaaatgagaaacaatcgtcagggaccgaagaacaaatgcgtccatcacaccagccccccgcaccccgagccccgtgctccgctcacgcgaaccctcgggggcagccagtctgagggacgtagcgcgcgtgcgcggggccagaggggacgcccccacgcgagcgcgcggtgagcagggcgcgtgaccgggcgggcgcgcagccgggaaagcgcgcgggcgcgctacggagtcggcgtcggcgcgcgctccaggccgaggctgtgtgggctggggagggagacaggcggcggcggcggcgccccagacccgaggggacgcgcgggccttgcgccgcgggagcggacggcggcggaggagaccctaggctcgcggcccgaggcgggagggctcggcttctcgactgcccgcctccgaggccgccggccgcttctctctcccagagtggccgccgcccctggagactcgccgtgacacgggcctaagccgccgccgcgggagtcctgaccgctcggacccgtcggatcaggccgggtgggagcgagcttgcgggcaggtgccgctcccggagggtgggccggaggcgaggcgcccaccgcgcggctcgcgggccgggctcggcggaggggccgctcgcgcagcacccccaccgcgggccggagcccgggtcgccgccccgccttctcccgggaccgcccggccggagctgcgggggccgagggacgccgcgcccgccgccgccagccgggctcgcgcgggagagcagggaagagaaactttgccttttattgtttttagtccttaagtgcaaggaactctgtgttgggaggaaaaatgtccttcttcaatttccgtaagatcttcaagttggggagcgagaagaagaagaagcagtacgaacacgtgaagagggacctgaaccccgaagacttttgggagattataggagaactgggcgacggagcctttgggaaagtgtacaaggtaagagggggaaaacgggaagttgtactgcgaaggtaaaacagccactggcctggagtggcgggaggacttctgctcccctggtccttatcctgtccttcttttgactgttacggttcgatgcaactttacttggctgatcatccaaggagtagctaagaagtcgggtttacggtggaacaaaatggggcctggatggagtttaaagagcgattggaaaaggagacagggttataaagtctactctttcaaacttcaaaggaaatgagagtgttctttaatttataggaggggtctggttgtgcccttcaagtattttagaatgagaaactcattgcactttgcagtggatttgtctactgactgcattcgcgtgcatgcttgtactccaacagttctgtttttagggtccagtatatatatttggttgtatctagagctaatacagaactagttgggatcaaagtgattgctacttgcagtctcttcttgagttagttgcttgacagcatactataaaatagaatggaatttctgacaaaatttccaaaaaaccttcatgtggtactagttttaaatatatttatggtaagcattgactagaagtcagtatcagcgcttaagcagttaaaaacacacacgcatgtatttatttcaatagaaagaggcttggcgtttcaacctgaaggcattaatgttaactatttaatatctcctaaggaacatatgaatgatgtcattggagtattttcatcctgaagggcgaattttttatgagacagcgtttaggggaaggacccacagggttgcctagaagt

SEQ ID NO: 2706 - DNA, 6000 bp, Homo sapiens
gtacaaaggccaggtgatacatgaagtcctggctcaagtctgtttcacattcgttgcactaggtccataaacccatcctgcggcaatttccctgaccaatgagcacacagtcaaaatggatttttttctcttttttgagatggagtctcactctgtcacccaggctgaagtgcagtggtgtgatcttaactcactgcaacctccgcctcctagattcaagcaattctcctgcctcagtctccctagtagctgggattacagttgcaggccaccatgcctgggtaatttttgtatttttagcagagatggggttttgccatgttggctaggctggtctcaaactccatttgggttatataagccccaaattgtaactgcccttttgagtcacatttctttgtgaactcccacatgtacgtatgtgattaaaatctgctttttcttttgctagtgtgtcatccaggctggagtgcagtggcacagtcatgattcactgcagccttgaacgcctaggttcaagccgtcctcccacctcagcctccggagtagctgggactacaggcgatcgccgccaagccttaagctcctgtcctcttatgttcatggattccccccactccacacctcacccataaacataaaagggcagaggaaaagtttctttctcctcaacgctattaggacacattcatgctagaggtaatcagtaaatatctgttcaatgaatgaatgaataatggggggtgaggtggtcccagagtgtttggtcagttttctcctggcattttgatctttcagtttagctctttgctgtcttttcccagggatttgctgactacaagtttggctatgaactaataacaaaaatagctaacactatgtcttgtgccagttattttaaataaatcatcctaatttacctgcaaggaaatttccatagatatcattaaaatctttacttatagatgaggaaacaggcttcaggaggttaatcttccccaggtcatacatcagcaagtgatagagccaggatgtgacccggctctcccaaagtctgaccactgactgttggggcaaatgtctatctgcatctttgctgcctggaaaggcagagaatattcccattttatctacagaaagtcacatggtaaaatgacatgtcccaactcatggaatttgtcaaatggagtcagcataagacccttgggtttccaacccaatgcaaaataagtacccttgctcctcacagcatcagtgagaaaaatctaagacagaccatacacatgatagcactttgaagctgggtgaggagctacacaaatatacgggattatgattgttgtgtgtctgtgctttgagcattagagactcccttcttaaagagacttatgattagtgtctctttttcccctcctcccactccagtgtgtctaagtgatcatgctgaatcaatctgaggtggggttgggggagagaaataaaaacactgaggaggtgatgccatgtgttgttaatgggatgtttagatgtaaaatgatgttaccaagcaaaaagggctcagtgcttgatgtgctagaagccaatactatgataccgggtttttgagaaaagaaaagctttttattgcaagttgactaaaaagacaggaatccagctcgaatctgtctctctgtgctaggtttaaagcagtaattttattagaaaaaaattcatgggtggattctgggattagtaggtgattggcggaaggaaagcggaggtctagaaagtgctgaggcatgcacagttacctcttcatgccaccacatggatcatatgtcaaactcggggagtttgtatgaaccatgcactggaaattcaggctgtgatgttagcaaaccattctgcacaaactccagttagtcatgttgattgcaagcaatttcagtcagttttttaatattacaagtggagggagtttcagcaagttgtttcttttctcatctgctatcctgcaaactcaagaatttgttagtcacagacttctttaactctttggggcactgtttcaaggctgcagttctccgttgtttagctatgagctagtaggcactgtgcggctggcattctgctttatggtggcaatttctttcaggaatgtccctttgcttccagatagttcataggtttgaataactatttatcctggctaaaggagatcaatatgttcgactcctacgtacttaccagaagagaatgatgctcctaagggggatgaaaggtgggtggaatggggacatagggagcttttaaacaccagtagctggcatatgtaagccctgcacggtggtaagtactttgcttctgtgcatttttcactcataaatatatactgagtactttctgtgaattagttactaagtaacagcaggaacaaaatgaagtcccttctctcttggatttatattcgtgcagagatagacaataaatacataaatataaataaaagcattacattctcaaaatcaccttttgattattttaggtttttcgctgatctttttttctgcctatataaattatataagctaattgtataagcttcatttaatatggaaaagcctaaggaagaaagtaaaactcccatcactgtgaaagccattcaaatgttttagtcaccatcttttcatattttgcctacatatgtataaacaattttaggtagataggattatcttatacatcctgtttgtaattctaaatatgatggagttttatcatcttcattttatagactaggaagtggaggcttagaatttttttttttgagacagagtctcgctccatcacccaggctggagtgcagtgtcagtctcggctcactgcaacctctgcctcctgggttcaagtgattctcctgcctcagcttcctgagtagctgagattacaggcgtctgcaccacgcccagctaatttttgtatttttagtagagacggagttttgccatgctgagcctccacttcctagtctataaaatgaagatgataaaactccatcatatttagaattacaaacaggatgtataagataatcctatctgccacgttggccagactgttctgaaactcctgacctcaagtgatccacccacctgggcctcccaaagtgctgggattacaggcgtgaaccaccatacctgtcctaagctttaaataatacaactaaaatctagaagtaaaatgtttagattgagtgcagtggctcattcctgtaatcccagcatttagggaggcagaggtgggaggatcgcttgaggccagaagttagagaccagcctgggcaacataaggagacctggtctctacaaaaacaaaaaaaagctgggcttggtggccacagcctgtaggctgaggtgggaggatggcttgaacccaggagtttgaggctgcagtgaaccatgaccgagccactatgctccagctccaccctgggtgacagagcaagatcctgtcaaaaaaaaaaaaaaaagttagaaataaagaaaagaaaatgcttacatatttatttaatttattttgagacagtctcgctctgttgcccaggctggagtgcagtggcgcgatcttggctcactgcaacctctgcctcctggattcaagcaattctcctgccccagcctcccgactaactgggattacaggcacccgccacgacgcccagctaatttttgtatttcgagtagagacgggggtttcgccatgctggccaggctggtcttgaactcgtgacctcaggtgatcctcccccctcagcctcccaaagtgctgggattacacgcttgagccactcgaccaggcctatttatttttttaaaccaagggctggataggatttgatccgggctccagataaaggactcctagggagataccctggttagcagaggcagttaggaggctactaaaaatagttcaatctagaaataattagggccagaattgtctccagcagcgggcgggggtggggctggggatgatttgggtagttattttgttctcttcccagcaagtaatttcagagcagcccagagattcattttctaaacaaatgatgtttttctcccaagactgacaaggatcagacagacctagggttgccactagcacctagtatctttcaggctgttttcttttgtttttaaagtggattaaaagctttcagccttacctaaatctttgttgcaattgtacagatctgcctagatttatagcagatggtagaacagaaacagttcccgacggaattaatcatcacattattaaaacaaattttcgagcattgacaaatcccttcggggttgtcctccgagtgggcaattcgtaaccagcttggggcgtgctaagattgtaaacgttcctatggagagcgataacaaaggggcagcagtgactccgcacacagaattccaagaatcaccagcattccatgtgttccaaggctagcacagtgcgcgcgaggtccgcttttttaaacagcgcggaatcacgtggccgacagcccgcggcgctactggccctcggagtctccctcttggctttggcgcggaacctttccccctttgtggacgcgaccattggccccgcgctcggaggtggtacggaccaaccctacggtcatagattttccgagtgaagcttttgactaagtctcaggaaagcgttagctacagaattctagattcaaaagaaatccaccaaaaaacgctgtggaggactggttttgcctaaaagaaagagcagacctgaacttgactcctcctacgccctgtgaaggctgcaaggtggttccgtccgaggcgcggactccgcccccacgagcgccgccattttgtttggctgaggggagcgagcggcgctttgggggaggggtcgcgtaggcgcctcacctgaccctgcggccgtgcggttgctgctccggggcaggtctccttccaggccaggggcccggaatcatgtacataaagcaggtaaggccttcgcgtccctccaccccgtcatgggccggtaagggccgctccttgaggcgggagtgttgcggcgccacccgcagcctctcccctgtctccacaggctggaccagggctgggcggggactgtgggggaggagggagacccgggtcccgctagtgccccggctgcggggtcgcggagaattggggcactcctttgcagccccggcctccctgctggcgcttgtctgggagaggcaggatctccgagaggtgtggaagggccggcgggcgggccgctgggagggactgggccttcctgggtggccccagagctggcggggggcaccccgccggggcggccgcgggcgggaagggctgtgtggtcctgcaggggtggcctcacacggcccatgtgcctgggatgtgtggaaaggtggcttccccggcccgggggcggccctgggggcattggctggggtgtcgtcacctgtcactgcggggagccgttcttctccccagttaacccgcgaagtgagcgggaccctcctgcttgcaggatacggagcgccgcctccctcggttgtttacttctgtcaaaatggtcttcccgcgcgggactccaccacaaagatgagcccaggcacacggccttggagacggttttctgttgggtctgtcgggctctgagcactccttctttggaacgtgggttctttcaggctggccggcgtgagtgactgaaagcagcactcggtggtcttggagtcaggagagctggggcccgtcggcctgcttttatagacttgctattgtactgcagcgtttagggttcagttaagctcacacagtgtttttgattttgaaaggtccttaacaggttgacagcataactcctaaaaaaaaataaaacccagcagcattgccttggcaaagattaccgataaaagtacctttttttttttttagcagatttttaatcaccactttccaaaatgaatttttcttatat

SEQ ID NO: 2707 - DNA, 6000 bp, Homo sapiens
aatcctttatgaaaaggtacatgaagtctttaattcatagataagagattacttttagaatccctgaagccttgccaaatgttcattctcctatgagctaatgagtcagccactcttccagtgactatgccaggacagtctgttagaaactaattaaagagcagatacctttatcagagtatgtgtgttctaatgcatggagatcaggcaataggtgaatacagtttatgcagcagtaggtgaagaaatcaaggacgactatttttccacatagatccttgtagacagaaataggttcttctgtgttcagccattctaatcctgaaatttacataaaataaattacaatgattaaagagaaagataaaatttacctaaaactttccattaaaatgtgacctttttttttaagactaatgcaaataaacactttgagagagtagcaccatataaaggctgtggcagttgcatgtatttatagttgtttactatgaaccatcattttctatcaacaaaagaaataaaagatatatctttatgactgtaactaaacaggtatttgggtttggaagaacataccaaaaaggcaaattagcagagattaaaagcccaaaaagggaagaaagaaaaggaagggatgggggtacgggtgggggagcaggaggagtagaggatgggaaagctgctattatgatgccatctgcaaataaagcaagaaaaagctactaaattctttcagaaatagggtaacagtctgtgaaaaggagtaaaggcaacacacttaggcaaaaaaaaaaaaaaaggaagaaatatcaaatagtaaatgaacctaattacataaacaattagatacaaatgggctactgagaataaaggtcaagcttaagaatagtaagatataactaaacatcaaaaaggagtgaaatgtgtgtaaggataaacatacaaaatgcctaaaacagtttcctaaaggagaagaaactgaaatattctggatttggatgagaccgtaaatacaaaataaaatatgctaaatgtaaagttaagcaaaatacacttattattgtcacagatttcattgaggtaacattaatattaatgaagaacgtgttccctttcctccaaaaaaagaaagctctgtactatgaagaaagattttgttaactaataataaagtacagcatccctatttaaccaatttaagaaaacaaagtttactgcttataaataactcaatgcagctattacaactattaattatgccttgaagcaggtatttagaatagcttttagcaactgaaagccaaacttgggaggaagaagtaaacagtaacagctaatgattaacaacaataactgttgttactcaatcataacaaaattctagaaaaaaaaatctgcagatcaaactagtatttgggccaattagtccaaactaatgaggtttcagggtacagtgacctcttaattatccattttgttaaaatattaattatataccagatcaagtgatcatacaaaacttcagactaattaatgtatatttcatatcctacttgcaaaatatttattaatctgtcttctgtgacttttctgtaaatagtcaagagtggcttagatcagggggtatagaaagaatgactacatcttagtcaccgtgctagatacttaccaggcttaataaaatttattttacaataacaataattacaatgaatacaataaaaagctgctaacatttagtaagcttttctgtgaattaagaattttacatatattactttcaatacaaataataatcctgaaaggtaaataatagttcagttttgcaagtgagaaatataaggctttgaggtcaagtaacttgctcaaaatcacacaaccaacaaaatggaaataacaaggatctaattccaggtctctgtgaatctatccattacactgcactgtctcctataaacatgtaagtcttctaagaaatgaacaaagcatacagtttttcaaataaagttatgtttatgacttcctgattatagtttactgctaaagaaaccaagaaaacagtcatttctagcattctgtcctcaataatcgggtccaggagaaaatcatactgtgttaaacacaaagcctgaatattttattatatgtttttttagttatgagtcacagaggtcaaatctcatgggaataaaatacactccctgtaaatacaaacaagactagaaaataaaaaacattccccaaatcccagttgatggcctgcttgtttataacagtgtacttactatataactaccttctgcaccaaaactttttaaaatcatatatttgtatagatgtaaacaatcttttaaagtttgatgggataagcattcatgtacccaattcttttgtaagaattccacaatatttcaaatccagtataagattaatagcaggaaaaataagcacttctcaaggtgagtagtgcaaaagacttggaaagacaccaatactctgttgtcggaggcaggttccgatatacctcccatgagataactgaattctgccacatccaaccaattaactatacatgtggtttcagtgtcacgccaggacacatgccagcaccatcaggcaaagcaatgctactcccatccaaagaaggtaaaatacgttttcatttatcatggcaagatatgcttcacaaacatccctgccgggaatatctgttccttcatgctccaaaagctcacatggccaggatttaaaccctggaaataggctataattgattccgatttttaaaagtattagtttcacgactttgaacggagaagcacagtacagctaagaaaccagcaaatccagggcctgtataatccaactggggcagttatcagctgtgaggccctgggcatgtgacttaacctctctgtgcttccatttcctcaactgtgaaaggggaatgataggagcacctcactgggatatagaggtaattgaataaggtaatatctcctcaagtgtttaggtatcccctcaagtgtttaggactgtgtgtggcaggccgggcgcggtggctcacgcctgtaatcccagcactttgggaaacggaggcgggaggatcacttgaaatcaggaggtcgagaccagcctggccaacatagtgaaacgccgtctctactaaaaatacaaacaaaacaaaacaaaacaaaacaaaacaaaacaactagccaggcgtggtggcgcgggcctgtagtcccagctactccggaggctgaggcaggtgaatcgcctgaacctgggaggcggaggttgcagtgagccaagatcacgccactgtactccagcctgggagacagagcgagactccgtatcaaaaaaaaacaaaaaaaaaccctgtgtgtgatacatgaaaaagtgatcaataaatgtcaagatgatgcagaaagatgaccagaagacactggggaaccagattgaatggacagaatggtgtggacgttgcaatcattgccaccggggacactaaatattcacggagtgtccacttggctaatatcaggcgcgggcggaactcaggatacacagacgagtatgtggatccccgtgccagggaaacccccgtcggtggccgcttggggacccctgggaattgcagaacacgcgaacagcggcccaagttaggcgaagggccactccccggggcgccagcggcacaaacccgcctagcccaccgcttcgcgggagggcgccgtccccgaggaaggggaggtgccgggaggggcccccaccccgacgccagcccctcaccttccggaaactcgggtactgacaagtcctgctcccagccgtccaccttctgcagatactggtagaccaggctgtccttctcctgctgggtaacggcgtcgagcagggcgtactctagcgaggtctgcgcggggagcaggccggagaggctgcggccccggcctccgggcgccgccatgtttccgccgggctcccgatgcggccgccgggcccgcgggagagtctcgctgggagagacgaaacgttcactgtcctgtggtttccaaacggcgcattcacctcaccctccactagccccactccacgccaatgacacttttttctttttaaagcataggtccaagtgccaaaagtccaaatcggcgcagttcccggggacgtaattaaactgccgtccgacccaccccgccccttttcggtccccacgccgcagccgagcctggacattgagagcgtcagattcaacatggaataaggccttagggacagcgtcccagaggcgctaagggaaacatccccaaccctccacattgggaattagcggactttcgaacacaaataaaatacaataaatccgtaggacttaaaagggcaatgtatttttaaaaattatttttaaagtctctctctttgaacagcatccgccgattcgacacggcactggcagcgggaacttgttcccgccaagaccctaaaggtaaagcgggtagggataacctccagagagaaggctttgtaaactggaagtgactggcgcgagtggctttcacttatacacaaacacagcgttttgtcatctgggagtgctgaaagtgcgggcgcgaacacatttttagatgggggtgccgggaggagcggatgcagctggagcggctcccttggggtgccgagtggcaggtggggggcggtgagggtccttgagggcgggccttagagtcttcagaagggcaggactctgagggctttttggagctcgctatgcttaacctggagatgattaaggccccgcttcctggcctcccagcctctaatgccaaaagataagggagaggctggcgtgtgaccccgttttgagtcaggtggacagagggctggccaccttcggaaccatgggtgcaatacggagtcagacctcaatacaagcccactctttcacatatttgaacttttttcacatatcaactttttttgttcactgtgcagggattgttcattgctgctggaggaagatcatggactgtcgcgggaaactgaagtggttgagtatccactagtcgtggatgagggcagtgacttcgcagttttttgcgaattacacatctctttgattatgttgtgactagttttgttagatagtcatttagtgtttgggatacctgttaagccctttgtccagggactgtggttggatttatgaattatttggacggttgtccacttgaaagaactgacagtagcttcataacaatgttacaaatctcgttctaagattaagctgttgaacctatatttgccattagcgcttaatttttgaagtattatttttatgaatcaagccctggaaaaggacaagatatttgaatgaaatagcacccataatggagaacttcacagttgctactcctgtgataggtttatcttagtttcattgtggtataaatggaatagcaggtgttgtcaggtacaaggtttgtagcttgccaatatgttcattaccaacactgcagattcccattgagttggtgggggttttgttacctttgttttttttctcagcaaaataattctataactttttgtttgtgacaagaaatggactttcagtttacttaagattaatacttcttgaatgataaaatcattttgccatgttagaagacatttccgaagaagacatttgggaatacaaatctaaaagaaaaccaaaacgagttgatccaaataatggctctaaaaatattctaaaatctgttgaaaaagcaacagatggaaaataccagtcaaaacggagtagaaacagaaaaagagccgcagaagctaaagaggtgaaggaccatgaagtgccccttggaaatgcaggttgtcagacttctgttgcttctagtcagaattcaagttgtggagatggtattcagcagacccaagacaaggaaactactccaggaaaactctgtagaactcaaaaaagccaacacgtgtccc

SEQ ID NO: 2708 - DNA, 6000 bp, Homo sapiens
tcaatattaatgaaagcctagtcacatttcctaataagaactttaaacctttgtatcacagtgaaaacagtgtaaaattaaggtcagatattttatttttttaatagaacaaatttaagtcagcctcaacatacaaaaagaccttttaaaatatctgatcatgaaaaatagcaaattatgcccctatccgcagagaaaaaccatatactaaatgctggttctttagataggcaaaccactatcactaagcttaatcctttatgaaaaggtacatgaagtctttaattcatagataagagattacttttagaatccctgaagccttgccaaatgttcattctcctatgagctaatgagtcagccactcttccagtgactatgccaggacagtctgttagaaactaattaaagagcagatacctttatcagagtatgtgtgttctaatgcatggagatcaggcaataggtgaatacagtttatgcagcagtaggtgaagaaatcaaggacgactatttttccacatagatccttgtagacagaaataggttcttctgtgttcagccattctaatcctgaaatttacataaaataaattacaatgattaaagagaaagataaaatttacctaaaactttccattaaaatgtgacctttttttttaagactaatgcaaataaacactttgagagagtagcaccatataaaggctgtggcagttgcatgtatttatagttgtttactatgaaccatcattttctatcaacaaaagaaataaaagatatatctttatgactgtaactaaacaggtatttgggtttggaagaacataccaaaaaggcaaattagcagagattaaaagcccaaaaagggaagaaagaaaaggaagggatgggggtacgggtgggggagcaggaggagtagaggatgggaaagctgctattatgatgccatctgcaaataaagcaagaaaaagctactaaattctttcagaaatagggtaacagtctgtgaaaaggagtaaaggcaacacacttaggcaaaaaaaaaaaaaaaggaagaaatatcaaatagtaaatgaacctaattacataaacaattagatacaaatgggctactgagaataaaggtcaagcttaagaatagtaagatataactaaacatcaaaaaggagtgaaatgtgtgtaaggataaacatacaaaatgcctaaaacagtttcctaaaggagaagaaactgaaatattctggatttggatgagaccgtaaatacaaaataaaatatgctaaatgtaaagttaagcaaaatacacttattattgtcacagatttcattgaggtaacattaatattaatgaagaacgtgttccctttcctccaaaaaaagaaagctctgtactatgaagaaagattttgttaactaataataaagtacagcatccctatttaaccaatttaagaaaacaaagtttactgcttataaataactcaatgcagctattacaactattaattatgccttgaagcaggtatttagaatagcttttagcaactgaaagccaaacttgggaggaagaagtaaacagtaacagctaatgattaacaacaataactgttgttactcaatcataacaaaattctagaaaaaaaaatctgcagatcaaactagtatttgggccaattagtccaaactaatgaggtttcagggtacagtgacctcttaattatccattttgttaaaatattaattatataccagatcaagtgatcatacaaaacttcagactaattaatgtatatttcatatcctacttgcaaaatatttattaatctgtcttctgtgacttttctgtaaatagtcaagagtggcttagatcagggggtatagaaagaatgactacatcttagtcaccgtgctagatacttaccaggcttaataaaatttattttacaataacaataattacaatgaatacaataaaaagctgctaacatttagtaagcttttctgtgaattaagaattttacatatattactttcaatacaaataataatcctgaaaggtaaataatagttcagttttgcaagtgagaaatataaggctttgaggtcaagtaacttgctcaaaatcacacaaccaacaaaatggaaataacaaggatctaattccaggtctctgtgaatctatccattacactgcactgtctcctataaacatgtaagtcttctaagaaatgaacaaagcatacagtttttcaaataaagttatgtttatgacttcctgattatagtttactgctaaagaaaccaagaaaacagtcatttctagcattctgtcctcaataatcgggtccaggagaaaatcatactgtgttaaacacaaagcctgaatattttattatatgtttttttagttatgagtcacagaggtcaaatctcatgggaataaaatacactccctgtaaatacaaacaagactagaaaataaaaaacattccccaaatcccagttgatggcctgcttgtttataacagtgtacttactatataactaccttctgcaccaaaactttttaaaatcatatatttgtatagatgtaaacaatcttttaaagtttgatgggataagcattcatgtacccaattcttttgtaagaattccacaatatttcaaatccagtataagattaatagcaggaaaaataagcacttctcaaggtgagtagtgcaaaagacttggaaagacaccaatactctgttgtcggaggcaggttccgatatacctcccatgagataactgaattctgccacatccaaccaattaactatacatgtggtttcagtgtcacgccaggacacatgccagcaccatcaggcaaagcaatgctactcccatccaaagaaggtaaaatacgttttcatttatcatggcaagatatgcttcacaaacatccctgccgggaatatctgttccttcatgctccaaaagctcacatggccaggatttaaaccctggaaataggctataattgattccgatttttaaaagtattagtttcacgactttgaacggagaagcacagtacagctaagaaaccagcaaatccagggcctgtataatccaactggggcagttatcagctgtgaggccctgggcatgtgacttaacctctctgtgcttccatttcctcaactgtgaaaggggaatgataggagcacctcactgggatatagaggtaattgaataaggtaatatctcctcaagtgtttaggtatcccctcaagtgtttaggactgtgtgtggcaggccgggcgcggtggctcacgcctgtaatcccagcactttgggaaacggaggcgggaggatcacttgaaatcaggaggtcgagaccagcctggccaacatagtgaaacgccgtctctactaaaaatacaaacaaaacaaaacaaaacaaaacaaaacaaaacaactagccaggcgtggtggcgcgggcctgtagtcccagctactccggaggctgaggcaggtgaatcgcctgaacctgggaggcggaggttgcagtgagccaagatcacgccactgtactccagcctgggagacagagcgagactccgtatcaaaaaaaaacaaaaaaaaaccctgtgtgtgatacatgaaaaagtgatcaataaatgtcaagatgatgcagaaagatgaccagaagacactggggaaccagattgaatggacagaatggtgtggacgttgcaatcattgccaccggggacactaaatattcacggagtgtccacttggctaatatcaggcgcgggcggaactcaggatacacagacgagtatgtggatccccgtgccagggaaacccccgtcggtggccgcttggggacccctgggaattgcagaacacgcgaacagcggcccaagttaggcgaagggccactccccggggcgccagcggcacaaacccgcctagcccaccgcttcgcgggagggcgccgtccccgaggaaggggaggtgccgggaggggcccccaccccgacgccagcccctcaccttccggaaactcgggtactgacaagtcctgctcccagccgtccaccttctgcagatactggtagaccaggctgtccttctcctgctgggtaacggcgtcgagcagggcgtactctagcgaggtctgcgcggggagcaggccggagaggctgcggccccggcctccgggcgccgccatgtttccgccgggctcccgatgcggccgccgggcccgcgggagagtctcgctgggagagacgaaacgttcactgtcctgtggtttccaaacggcgcattcacctcaccctccactagccccactccacgccaatgacacttttttctttttaaagcataggtccaagtgccaaaagtccaaatcggcgcagttcccggggacgtaattaaactgccgtccgacccaccccgccccttttcggtccccacgccgcagccgagcctggacattgagagcgtcagattcaacatggaataaggccttagggacagcgtcccagaggcgctaagggaaacatccccaaccctccacattgggaattagcggactttcgaacacaaataaaatacaataaatccgtaggacttaaaagggcaatgtatttttaaaaattatttttaaagtctctctctttgaacagcatccgccgattcgacacggcactggcagcgggaacttgttcccgccaagaccctaaaggtaaagcgggtagggataacctccagagagaaggctttgtaaactggaagtgactggcgcgagtggctttcacttatacacaaacacagcgttttgtcatctgggagtgctgaaagtgcgggcgcgaacacatttttagatgggggtgccgggaggagcggatgcagctggagcggctcccttggggtgccgagtggcaggtggggggcggtgagggtccttgagggcgggccttagagtcttcagaagggcaggactctgagggctttttggagctcgctatgcttaacctggagatgattaaggccccgcttcctggcctcccagcctctaatgccaaaagataagggagaggctggcgtgtgaccccgttttgagtcaggtggacagagggctggccaccttcggaaccatgggtgcaatacggagtcagacctcaatacaagcccactctttcacatatttgaacttttttcacatatcaactttttttgttcactgtgcagggattgttcattgctgctggaggaagatcatggactgtcgcgggaaactgaagtggttgagtatccactagtcgtggatgagggcagtgacttcgcagttttttgcgaattacacatctctttgattatgttgtgactagttttgttagatagtcatttagtgtttgggatacctgttaagccctttgtccagggactgtggttggatttatgaattatttggacggttgtccacttgaaagaactgacagtagcttcataacaatgttacaaatctcgttctaagattaagctgttgaacctatatttgccattagcgcttaatttttgaagtattatttttatgaatcaagccctggaaaaggacaagatatttgaatgaaatagcacccataatggagaacttcacagttgctactcctgtgataggtttatcttagtttcattgtggtataaatggaatagcaggtgttgtcaggtacaaggtttgtagcttgccaatatgttcattaccaacactgcagattcccattgagttggtgggggttttgttacctttgttttttttctcagcaaaataattctataactttttgtttgtgacaagaaatggactttcagtttacttaagattaatacttcttgaatgataaaatcattttgccatgttagaagacatttccgaagaagacatttgggaatacaaatctaaaagaaaaccaaaacgagttgatccaaataatggct

SEQ ID NO: 2709 - DNA, 6000 bp, Homo sapiens
tggttgggaagaaagatacccttctacctgactttcaaaaggtttcaacattaaactcttaactaacggaagagaaacttgattgtaaacagatgattcttcaattacctgtttctgtttatttgattgagctgagtgaaattctggctcatcaggttttgctttagttgcctgatgaacagaagcagcaagcttccctgccaatgcaggtggaaacaacacaaaatcaccaccagtacatgccagatcataaggcaaagtactctcattattttgagaaataggttgagacaaatcatttagactattgaatctatacaatccttcatcatacttatcccgagttaagaagctgttcactttggggcagctctcatcctggtccttcagtaagggaccatgtcgttttttaaaaaaaccacagctgtcatcatcttcttcgaggctgccatcttttgagctttcggtaaaaaacagttgttcttgtgaatcatccggtttttcatcgatatcatgagtgtcttcatcactttgaagtggagaataggagatttcacagtcactgaagtcattttctggcaatggcaaatttatgtgttctgagttgtttgcaagacgcaaagcaactcccactagtttgtcattctcaacaaaatctgtaaattgtagagcttgttgggatgtttggatatgagtagaaatcttttcactggcttcagtcagagacggagactttttaaaatactgtgtcatcaataagggatcatttgaaaccgagttatcagtttggttctgatacgaagaccatctttcctcaaggctacaaaggacgcctgacttagtctcactgaaactgccacctgacgcaggtgatgggctgctaaaaggatgatcaccagccctgctttgagctagcaggaagtgagtgtatctcttgtaatgaaaaggaatggttgaggtacacagaagaccatcaggacactctgaaattttaataaagaaaaaatattacacgatcaaagcatagactaagctttgacaacattagcagtataaattgggttccattatttaatatccacattgcatataataaaaagcaacaattttaataagattagttataattgttgatacactgaacaagttttagattctattctaagaatagaatttgagaaattggttaattataaggctttactaatttggaaactattccctatcatactaccatgattgagaaactttctataagccatcttggtatatccctgtgtatgttaatttccagatttatcaaaaaatgacacctccctcccctcaaaaaagatgttatatttgttatattaaattagaaaacttcatggcttacaacctaacttaaaaatgcctcttaaaagcatttgttatagaatggaatttaattcaagagccatctgagagtctactcaaaggagtttagtgaaaaaccaaaagaaaaattttttgaggtggcttcatctatatgacattttaccctaaggtcttcaaccatggactccaatttccattcttgattttcaagttacatgaaagaaaattactagcaaatttgtgaggttttcacttgctatccttttctgggaaaggctaatgccaaatttaaagaagagttgttttttttctgtatcttcatgcagtactttaaaataactacaggttaataataaaatgtattctgaatcatagctaacatgaaagccatattgagtatttttttattttactgaattttaactttttcagattaaaaaaatccatatatggaatataaatgatttcaaaatatataaatcatcacaacaacctgttctccatatgtattccaagtaggattttctacattaaatacttattacatattttaaaagataaaaaacatagcatacttttattatcatttgacacgttttttgttagaatcttaatcacctaggactccttcacagttcctcttcctgtatacatagcacgatgactaaaacataaccatatttagaaaccacattatatctatacttttttttttttttttcagacaaggtctccctctgtcgccccacccaggctggagtgccctggcatgatcacagggccctacagcctcgacctcttgggctcaggtgatcctcccacctcagccttccaagtagcccaccacacctggctaatttttggtaattttttttgtaaagatggggtttcaccatgttgcacaggctggtcttgaattcctaggctcaagtgatccgcctgcctccacctcccaaagtactgggattactggcatgagccactgtgcccagcctatttataattttctatggagttccataataaccaccaactggggccgggcgcggtggttcatgcctgtaataccagcactttgggaggccgaggcgggcagatcacgaggtcaggagatcgagaccatcctggctaacacggcgaaaccccgtctctactaaaaatacaaaaaattagccgggtgcggtggcgggcgcctgtagtcccggctactcgggaagctgaggcaggagaatggcatgaacctaggaagcggagcttgcagtgagccaagatagcgccactgcactccaatctgggcaacagagagagactccgtctcaaaaaaataaataaccaattggacaagttatctgacttttaagaactttcatctataaaatgtcaatactagctaccttatatggtgattgtgaaagttgggtaagtagacagtgtgaaagtacccagcatagtaaggattcagttaacatttatggaaaataatccagatacttaggaacttttatgaaataacacaatgtatttaaactgttttctagtctgccatttgctttacaattataccgttgactggtatggtgtttcccagtgtctcatctctcttttaggttactgcttgccttccttgtttcactgaattggtatgtctgacctaatgaagactttttagattatttagaaactactacgttttctgcagtcttacctgtttcagagcgtggtggagaatccaaacattcaaaaacatgccatcgaggtgtctgccctatcaatgaggaaaaaggcatctggcaatttggacagtatccatcataaactggacgtatctttggggacacgtgttggcttttttgagttctacagagttttcctggagtagtttccttgtcttgggtctgctgaataccatctccacaacttgaattctgactagaagcaacagaagtctgacaacctgcatttccaaggggcacttcatggtccttcacctctttagcttctgcggctctttttctgtttctactccgttttgactggtattttccatctgttgctttttcaacagattttagaatatttttagagccattatttggatcaactcgttttggttttcttttagatttgtattcccaaatgtcttcttcggaaatgtcttctaacatggcaaaatgattttatcattcaagaagtattaatcttaagtaaactgaaagtccatttcttgtcacaaacaaaaagttatagaattattttgctgagaaaaaaaacaaaggtaacaaaacccccaccaactcaatgggaatctgcagtgttggtaatgaacatattggcaagctacaaaccttgtacctgacaacacctgctattccatttataccacaatgaaactaagataaacctatcacaggagtagcaactgtgaagttctccattatgggtgctatttcattcaaatatcttgtccttttccagggcttgattcataaaaataatacttcaaaaattaagcgctaatggcaaatataggttcaacagcttaatcttagaacgagatttgtaacattgttatgaagctactgtcagttctttcaagtggacaaccgtccaaataattcataaatccaaccacagtccctggacaaagggcttaacaggtatcccaaacactaaatgactatctaacaaaactagtcacaacataatcaaagagatgtgtaattcgcaaaaaactgcgaagtcactgccctcatccacgactagtggatactcaaccacttcagtttcccgcgacagtccatgatcttcctccagcagcaatgaacaatccctgcacagtgaacaaaaaaagttgatatgtgaaaaaagttcaaatatgtgaaagagtgggcttgtattgaggtctgactccgtattgcacccatggttccgaaggtggccagccctctgtccacctgactcaaaacggggtcacacgccagcctctcccttatcttttggcattagaggctgggaggccaggaagcggggccttaatcatctccaggttaagcatagcgagctccaaaaagccctcagagtcctgcccttctgaagactctaaggcccgccctcaaggaccctcaccgccccccacctgccactcggcaccccaagggagccgctccagctgcatccgctcctcccggcacccccatctaaaaatgtgttcgcgcccgcactttcagcactcccagatgacaaaacgctgtgtttgtgtataagtgaaagccactcgcgccagtcacttccagtttacaaagccttctctctggaggttatccctacccgctttacctttagggtcttggcgggaacaagttcccgctgccagtgccgtgtcgaatcggcggatgctgttcaaagagagagactttaaaaataatttttaaaaatacattgcccttttaagtcctacggatttattgtattttatttgtgttcgaaagtccgctaattcccaatgtggagggttggggatgtttcccttagcgcctctgggacgctgtccctaaggccttattccatgttgaatctgacgctctcaatgtccaggctcggctgcggcgtggggaccgaaaaggggcggggtgggtcggacggcagtttaattacgtccccgggaactgcgccgatttggacttttggcacttggacctatgctttaaaaagaaaaaagtgtcattggcgtggagtggggctagtggagggtgaggtgaatgcgccgtttggaaaccacaggacagtgaacgtttcgtctctcccagcgagactctcccgcgggcccggcggccgcatcgggagcccggcggaaacatggcggcgcccggaggccggggccgcagcctctccggcctgctccccgcgcagacctcgctagagtacgccctgctcgacgccgttacccagcaggagaaggacagcctggtctaccagtatctgcagaaggtggacggctgggagcaggacttgtcagtacccgagtttccggaaggtgaggggctggcgtcggggtgggggcccctcccggcacctccccttcctcggggacggcgccctcccgcgaagcggtgggctaggcgggtttgtgccgctggcgccccggggagtggcccttcgcctaacttgggccgctgttcgcgtgttctgcaattcccaggggtccccaagcggccaccgacgggggtttccctggcacggggatccacatactcgtctgtgtatcctgagttccgcccgcgcctgatattagccaagtggacactccgtgaatatttagtgtccccggtggcaatgattgcaacgtccacaccattctgtccattcaatctggttccccagtgtcttctggtcatctttctgcatcatcttgacatttattgatcactttttcatgtatcacacacagggtttttttttgtttttttttgatacggagtctcgctctgtctcccaggctggagtacagtggcgtgatcttggctcactgcaacctccgcctcccaggttcaggcgattcacctgcctcagcctccggagtagctgggactacaggcccgcgccaccacgcctggctagttgttttgttttgttttgttttgtttt

SEQ ID NO: 2710 - DNA, 6000 bp, Homo sapiens
accagtttgatagaacagtatagtggtcttttgaagtcacagttgcaccatcagctaggtgacaataccttgcagtgctggggcaaggttctctgggaggcaaggttctctgtatattttctgaattagtgcccaatatatgaggctgtttctcccattttcaaaactcacaggtggaaatgggagtggcaccattcattattacccctagtaaaccactagcaaaatttttttcttcctgtgctgatggacttgtgttctgaaggcctagaggttttagttctagtggaaggagtggttccaccaggggacataatgattccattgaactggaagttaagactgcaacctggacactttgggctcctcataactctaaatcaacaggcaaagaagggatttactgtgctggctgggtgattgctctggattacaaaggggaagttagactgctattccacaacggagataaggaagagtatgtctggaatactggagatcgtccaaggtgtctcttagtatgatcatgccttatgattaaagtcaatggaaaactacagcaactgaatgcaggcaggactcatagcccagactcttcaggaattaaggtttgggtcaccccaccaggaaaagattcataaccagctgaggtgcttgctgaggacagaggaaattcagaatgggcactggaaaaaggtggttacaaataccagctacaatcacatgaccagttacagaaataaagactgtaattaccatgaatatttcttctttattttcttaagaatatgtgtgtgtgtctttttttctcccctctcttatccctttattgtgtaacataagatgcattggctttatatcataatatttaaatattgttgaaattacctcacaatatttaagttagaagatatcaggagaaaggtaaacatcactcaaggatttcacctcctcttcgggagaagaggttagtgcattttcagctgtacacaggatagttgtatcatgttaggcagaattatgaccttgtcattgactttatttagagattaagtatggtttgaggacatgtgtgtatgtgtcaagttgacaaaggtacacctctgatgattaatgttgtcaacttgattgggctatggggtacccagattcttgatcaaacattattctgggtgtttctgtgagggtgcttttgatcaaattgaagtttaaattggtaaatgggtaaagtagattggtctctctaatgtggtgggcctcgactaatcagttgagggcctgaatagataaaaaaggctgaccctcccccaagtaagagagaattcttcctggctagatggtcttcaaagtggaacaatagttttttcctgcctttgcgctctaactaaaacgtcagggcttccgggtctcaggcccaccagccttcagactagaactacactgttggcgctccaggttctcaggatttcagactcagactggaactaaactgctggctctgctgggtcttcagcttgacagctcactctgcagatcaaaggacttgccagactccatgatggtatgaaccaattccttatgataaacctctttctgtgtgtgtacacacacacacacacacacacacacacatcctattggttctgtctctctggagaacattgactaatgttctaacattgactaatacatttactaaatgtaagaaagtagggtttgtcttttttgcttactactttaccaccagtacctaaagcagtgcttggttggggctgtgctcagatgtttgttaagggagtaaaaaaatcaatgaatttgttttatgaaatggagcatactttcagcagtttcactacacaaaacaaatattaaattaaatgaataaaaactcaaacactaggacctttatcggttctttacacctttgccaggtaacacaattgtagctttttaacacaattgtagctttttaattcctcacccatcacctgggaacctgaattaagttgccactgtttatatccaggtttaaaatggggttaagataaatagcttctatactcactaatgaatcacccttaaaatgacagaatgaaaaacaaaacactacaaacaatttttttttaaaccagaactcctctataaccccacatccccacatctgaaggacttcccagtgcagtgaagagccgagtaaggaatacggaacaatccctggacaaaacactactggctgtggccacagagctcagagaagactttcaagccccagtttttttctgagtaggcaattcaccatgggagacaaaatctgacatccctagtttggaatcaaaagagtcgagcctgccagcttgtaatagaattctccccgtattctgtataataccatggagaaggagaagagaggtggatgaatgaggagacatgtcagtggccatatttgcaggaagctgttggttggagaggcagagtcggggagatcctgttagaagcaggcttgcagttgttgctttctttggttggaaagaggtaattgccaaaaagatttatcatcttaaggaaatctgctgataataaaggagaagtctgtctgccaggatgctgccctggtccttaccaacattaaacttctttaaaaggctggcccatgaatagttcacctccttccaagatgagtaataatttttaaaaatggataagcaaataagcacagaatatatttaaattgctacttgaaaaggaataaaatgaacaggaaaacaaatggtaagtaaagaacactgactagaaagaagtttctgtggagcagatgaaaattggtaccaaatatgccgcactaattttttaaaaatttaatgagataatcacttatttaatgtaaaatctcaaagtggagctacaggagtttaaaaaatacattgactgccaacagtaggagaagaaataagaggaaaactaagagtgggtgaaaaaataaaaccatcacagaaatgaagaccaccttgaccaaaccgcagtcaggaatgtgcatttctggcaacacaggaagagacatggaggacaggactgaggaacggagcaaagaaagtggaaataaggaaacgtgggccaaaaagtagagggaaaaataatgcctagataagacagaaataagataggcaacaaacacataaatggtatccctgaagcagagcactgaaaaactgaaacagaaaaggaaaacaaacctttgagatataatttaagaaaacttttcagaaataaaaggcaacttgaatctatggattgaaagcatatgctatggaccaagaaaaatgatatgagcaatcaatactgagtcacatgctagtgaagctgttgatcctccaaaagaagaaagaatcctttggggacatagaggattaatcagctctaagtgccgggtagtgcaagaacacaatgaacggccacctgaaacccctgggagagagggtagtagcccaagaattttgtacctggccaaacaataatccaactattaaaggaaacaaatgtgccagaactcaataaatataatacctataagcccttcttatagaaacaactagagggcacatctcagcctagcccaaagtaaatggaacaaccatcagccaaggactcttcatgagcatcagacccacttatcaggagcattaaactgtgacaacactgggaattttgataaaagaaaaaaatacaaatatgtataggtatatgtattttctaactgtacatatgtacatgtatgtctaattctacattatataaaaaacagcttcaacagttgggtagtgatgaggaagagtggatttagaaatactgtaagttcccaatttttctcatctttacataaggagaacaaagatgtaaattttaaagatgataaatcaagtaatacatgtaaaagcatatataaatgtacaaatgcaataaacaccaggaaaataatataatttatatttataatctaatataaatacattataataaatgtataatttctattatcatttataatagaaattatgttatatgttatgtatgttacatataatttatattatatatatcatattatataatttattgtatataaattatatataaatgtcatgtatatattatatataaattttatataataaattatataatgtcatttatatattatataaattttataatatattataatacataaattatatataactacatattatatagtattatatgttataacatatatattattgtatattataaattataacaaatttatatagaatataattctattctatatagattatactattaataattatactattaatataataatatttatataaaattataatataatttatatatcatgtaactttggctgggcttagatgtgcccagttgtttctataaggatttatatttatcttattttttgagttcttgcatgtttgtttcctttaatacttgatctattgtttggccaggtacagtaataatgatataaaactgggtggtgagcaggtggcagagtatagatgtatactagtcatgtcattgctttaattatttataaaaaatatttaacatttttacaaaacaatgaaataacccaacttgaaaaatagggagcagagggaatccacttcccagggtttggcaccagcttttcactttattctgtgcctgagccagttttcttgtgctgaggccaccagcagcaacacaggtttctaatggtggatcggtggcggcacactcactaacataggcaacggctttaacatatgacacagttacatgcaaagctaaattgcattaggtcagaccgtaaactacataagccacattatgtcattcagtcctcactataacactgtgaagcagatattgttttatgtcccattgctgagaaaaggaaaactttggaagattactaggcacacacagaaaattgcgaagctgggacttgaacttgagtctcactagctgcaaagtgtgtgctctcaaactgaaggagaccttactttaaacaggaattgagttttttatgatgcccaaagaatatttgcatattactgacatcaaattacaaaaggagatcattattaacctagcttctcagtctggaatgtcccttcccctcaggctttgtcaatttaaatgtttctcattcaaggcatgactcacacatcacatcctccccaccccaggaattgctgaggttggcttcccctgagctgccacagttcagcacccacgtgtaacagggctgtcattcggccatctaatgtcatttaggcaccaggcactgtgccttgtccaaataaatggtaattgacaattcagaaatgatattaaatttcaacattagctttacaaattgacacttttatcgtctttggaccactttatcttaatgtagattttgagtgtttttttgaggcaaaagtcagggcactccacccctcttctactaggtgaagagcaagcacacagctcatattatgggcagttaccaaaactaaaaacacaggctgggcacggtggctcacgcctgtaatcccggcactttgggaggctgaggtgggcggatcacttgaggccagaagttcgagactggcctggccaacatggcgaaactttgtctctaccaaaaaatacaaaaattagcctggcgtggtggtgcatgcctgtaatcccagctactcaggagactgaggcatgagaatcgcttgaacctaggaggcagaggttgcagtgagctgggatcgcaccactgcaatccagcctgggtgacagagtgagattctgtctcaataataaaaaaataaataaataaaaacacaactgtgaccttaaacttatttctgggggtagggggaagggaatgatgaaaaacaaactatagaaaaagacggtgattcagaaagttgcagaaacaaacacaaattctgtgcagtctcc

SEQ ID NO: 2711 - DNA, 6000 bp, Homo sapiens
atcccagtcctgagtcacagacactcaaatagccccttccagggtgggaatgtcctccaaagcacttccatttgtgtgagtagttcttcaagccaacgtatccaaatacatacatctgatgagcggactttgcttgtttacatacattatgtacattcctttgatagtcaattgtctaaagttggaacagttcggagggaagagctatataaggtttgcaatgatctttgtccaccagttactggacaactggatccaaattccacaaatagctgtggttctttacctgcatggttctcctcccctgagacatccagtgccatgcattttctcttgcaggtctttccttgcatcacccctccaaccccagcagatatcctggctgagcctgttttctctgtgaggggctacactgcacactggggctcttgaaaagggcttgctgggctgggcacggtggctcacgcctgtaatcctgacactttggtaggccgaggtgggtggatcacctgaggtcaggtgttcaagatcagcctggccaatatggtgaaaccccgtctctactaaaaatacagaaaaattagctgggcatggtggtgtgcacctgtaatcccagctactcaggaggctgaggcaggagaatcacttgaacccgggaggcagaggttccagtgagccaagatggcaccattgtacttcagcctaggcgacagagagagactccaattcaaaaaaagaaaaagagaaaaaaaaaaaaaagaaaaaaaagaaagggcttcctgcagggacagtcagtgcaggaaagggcctctttcgtactcccactgcccctacgcatctcctgggtagaggtcgctgctccagagagcaaactatttcctcatctgtgtgccattccactacaagccccacaggggcctgcaacgagtcccataaatccatctccaggccctgcacccacaaactggcaaaggaagtttcaggaaaagtctttctaataggagtctgtgggctgcctctggttcgtttctttaggaattctcctccatgcccttcttgacacaaaagggcctgaagggttccagttctcaacaggagctcccaggggctcctggcaggaggatgttctgcctctttggaggaaagcaagagctaaggagcccctcctgttttagttgcacctccatcccctttctccaccctgcaccattcccttaccctctatgtgaggcaaagcctgaagtccctccttcccgccctctctcctgcccactagtagattacactccctgctgcagttacaccatgatgcctctgccatgctgacaactagtgtcacacaggagcgtaatcagaagcacctggcattcaaccccggtaccgatggcccccaccttttcatttcaggcttcttcctccagagtgcttgaggctccctggcctcctggcctctcccaggtccaaggcgctgactccagctcttggctccaacatttacaggaacactgggactaagaaaatcaattgtgttaatcagcaaaaccctccacttgagatgctatcctaaaagcaaactatatgtaaaacacttaacgtggggagctctgtaatatgtttcttttgttacacgaccatcacacatttgtccggagtttggggctttcaaaccacataaggttttatgtgatcgttataaaatcccttcatttcccaaaggtagggtagtaaggattaagtttgactactgaaggcagctttgttgtaagtggtctctaatgtcacaaaagtagcttgggaagacaggcttattaaacaaatttcttgggttgcaaatcattagaagcaatcgcatgtcatgttcatttgcttaacccgaaaggtatccatttggatgtttaaagaaactatgcagattaacattgttcccagtgcccacaagaaagctggctgatcttaaaggaaatccagggagctccttgaggaagtcggactgcagttgagcatacccttttgtggttttcccacctcttttgtaaaaagttcttcataggaatctgtgtctggaggaaaaggggttgtgatttgttaatctgaagatgggagacctcaaaggaatctcacccaaccagtcctgcactgtcatcctatgaacagagaagtcaggtggttgctcagtgaggggcagggctggcaccacatccgagcctccctgtcctgtgttccttactcttcagtggacccggcgacctcccggctttggagccatcctgtgttcctttaacagtaggacgaacacacaggcgatgatgagattgtaatgggacaagggggagaggcgtggggagctcttgatgaaaacttgggtttttgaaattaccatgatgaagggaggagcttgcaccagcaggtgtaaggagtgtgagtttgagttctgctcatcagacagcctaagcagtcacatccttgaatcctggtcttttgcaggccagtccttggtcaggtggtggcctttttcctctttcccctctgcactgagacccttatttggctcctgatcctggagcccctgacacagtccttaccactgaagtagctgtggcccttcacatagttcttcccaccacgccagcaaggggactgagttctttcagtacagccagggccaggtccacacatctccctgggaagccagcactttctctcgtggaccgcctccccattcccacagggccctcctaaagggcctttggatgaccacattggcctttctttcctagggtggggaattagagatgctaagactggccagtctctttttcttaagagtttagggattcgtcttaaaatattattcagataaacgtatgagtcatgtgttaactgcaaaactacttaacagcacacttgttagaatatcagtcggcactctgattccatttcggcattgtttttcctttggttctattaagatcccggttctaactgggtcctggtagtaacaggctgtaagtggccaggtgtatagcattatttcttagtagtgtggtgtggtgctggtggtttattttccctatgcacacatgccctaatatggaaggatagtttgtacacacgtagggtacgttatcatgagactcctttacagagtatgaaactgaggattagagaagtcagacgagtttcccgaagtcttatagaaggctaatggaaaaaaccagagccaagggcaaacatgtttcatctgtccttccacattagtttaaatgtgaatggctgcttggaacacagtgttgagaaggattccgaggctgtgtccaggttcagtggggaaaaagtgccttgatttgaccattatatcgtgtactcagggcctagtttatttcccacaagcagctatttaaaacatgtctcatccaaggcagggtcggggtggggaacctcagaggatcaatgatgcagcctgtattgtcaccagggctcatcccaaagcaaatcctgctgaagttctcctctgaacaacccttatcactcatgctaatatgttggatcctgcaagtcacaaatacgaaggtatgagcattggccgaatcccaacagggaaacttcaccgggaaggtgaagacccctttccattaagataacaaacagaacctagaaggcccgtagcatggtggcttagaacatgtgggccttggatgggatcctgccaaggggtgtgtgacctctccgaagcctccagggatgatactactccctggggtgcttatgccaaccacgttagagacaatggtttctgtacccattgcctggggctgccataataaagtgccacacactgagtggcttaaaacaacagaaacctattgtctcacacttccgggggccagaagtttgaaacccaggtgtgttaggatcctgctccctctgaaggctccagggaagagtgtcctctgctccctccgaaggctccagggaagggtctgtcctcttaggcttctggtggcttgcaggtgcagccctccaatcctcctccccaagcggccttctgcctataaggacacgagtcatactggatgaggggcccactaattgatggcttctgtaaagtccccatctccaaataaggtcacattgtgaggtactgggagttaggactccaacatagcttctctggtggacacaattcaactcctaataacgtccacacaaccccaagcagggcctggcaccctgtgtgctctctggagagcggctgagtcaggctctggcagtgtctaggccatcggtgactgcagcccctggacggcatcgcccaccacaggccctggaggctgcccccacggccccctgacagggtctctgctggtctgggggtccctgactaggggagcggcaccaggaggggagagactcgcgctccgggctcagcgtagccgccccgagcaggaccgggattctcactaagcgggcgccgtcctacgacccccgcgcgctttcaggaccactcgggcacgtggcaggtcgcttgcacgcccgcggactatccctgtgacaggaaaaggtacgggccatttggcaaactaaggcacagagcctcaggcggaagctgggaaggcgccgcccggcttgtaccggccgaagggccatccgggtcaggcgcacagggcagcggcgctgccggaggaccagggccggcgtgccggcgtccagcgaggatgcgcagactgcctcaggcccggcgccgccgcacagggcatgcgccgacccggtcgggcgggaacaccccgcccctcccgggctccgccccagctccgcccccgcgcgccccggccccgcccccgcgcgctctcttgcttttctcaggtcctcggctccgccccgctctagaccccgccccacgccgccatccccgtgcccctcggccccgcccccgcgccccggatatgctgggacagcccgcgcccctagaacgctttgcgtcccgacgcccgcaggtcctcgcggtgcgcaccgtttgcgacttggtgagtgtctgggtcgcctcgctcccggaagagtgcggagctctccctcgggacggtggcagcctcgagtggtcctgcaggcgccctcacttcgccgtcgggtgtggggccgccctgacccccacccatcccgggcgagctccaggtgcgccccaagtgcctcccaggtgttgcccagcctttccccgggcctggggttcctggactaggctgcgctgcagtgactgtggactggcgtgtggcgggggtcgtggcagcccctgccttacctctaggtgccagccccaggcccgggccccgggttcttcctacccttccatgctgccagctttccctccgccagctgctccaggaagcttccagaagcccctgcgcgggccttggcttgcagcaaccctttagcatacttaggcagagtcccatatttccttcctgctggaggccaagttctaggggccttctggttactatggctggtgtttgtgtacatcataccctaactgtattcatcaacacttagagtaagcaaggctcgctggagagccacacacactgggcaccgtaatgtcggttataacaccgcagaggagttctgaactatgtatttcgcactcctgggttcatcatctcctgaaatctcagggtggtgtttgctctcagttgcttcagctgagtagctggctttctgtcctggaaagcagactttgtacatgtgtgtgcaacctatgcctgctgagatcatcatcagacagggaagcggcttggtccagagagctgttctcagtagaatgttaagcacagagagctgagaattagactggttatttacatagacatccaaatagaaacctatagagtatctgttaagtcaggctctcccgtcatctcccccatccctgggcaggtgtctaggagatggttttgttattttcagggccctctcaatggctaaaacactctgggagatgaacaagat

SEQ ID NO: 2712 - DNA, 6000 bp, Homo sapiens
caagccttgtgcaaatgggactcagtatctttgggccactggactcattcattagtaagggacccacaggggtgttactgattgtgatgctgggacaagggactgtcctaggcaggcagggacgcccggccaccagcgggactgggcccctcctcagccaaccctgcccttgatggggagtcagaggggccaggctggggccatccaccccagccccacgacgtgccctcccttccgccatccctgaagccatctcccctcgtcctgcgtcccggacccatctacgctgaggacggagaccgcggcatcaaccagcccatcatctacagcatctttaggggtgagtggggcccagccctcaacaatgccctgtaccccctctgtccctgtctccatccccaccttgggcagagctggctgggtccctgggcctcagggggccggggctgagcacttccatcatcctcccaggaaacgtgaatggtacattcatcatccacccagactcgggcaacctcaccgtggccaggagtgtccccagccccatgaccttccttctgctggtgaaggtgaggtgggcacctgcatggggggcagggcagagggggaagggtggaaggtagggcggggggtcagggctggggggccggggcagggcccccgccaagtctgcacctgcctttcctgagccccagccttcagcgccagctccaccttcaaccccactagtcactgctgcctcccccgcctccagggccaacaggccgaccttgcccgctactcagtgacccaggtcaccgtggaggctgtggctgcggccgggagcccgccccgcttcccccagagactgtatcgtggcaccgtggcgcgtggcgctggagcgggcgttgtggtcaaggatgcagctgccccttctcagcctctgaggatccaggctcaggacccggagttctcggtagagagtgcatccaaggcctcccctctgtgggtgggtcagggctgtacgtgggaggcagcctggccggggactcaatgagaccctgtccaggacctcaactcggccatcacatatcgaattaccaaccactcacacttccggatggagggagaggttgtgctgaccaccaccacactggcacaggcgggagccttctacgcagaggtgcggggcagggcaggcgggcatctccaagggtgtggggcttaaagatgtgtctaggagggacaagccccttcctgccccaggttgaggcccacaacacggtgacctctggcaccgcaaccacagtcattgagatacaagtttccgaacaggagcccccctccacaggtaagcccccctccacaggtgagcccccagggttctccaaataagccccttcggtggctcctttcccgcggtaggtgtgcaaggggcgggcagaggcaagcccaagcactgttcccggcccccagatgtccccccatccccagaggctggaggaacaactgggccctggaccagcaccacttccgaggtccccagaccccctgagccctcccagggaccctccacgaccagctctgggggaggcacaggccctcatccaccctctggcacaactctgaggccaccaacctcgtccacacccggggggcccccgggtgcagaaaacagcacctcccaccaaccagccactcccggtggggacacagcacagaccccaaagccaggaacctctcagccgatgccccccggtgtgggaaccagcacctcccaccaaccagccacacccagtgggggcacagcacagaccccagagccaggaacctctcagccgatgccccccagtatgggaaccagcacctcccaccaaccagccacacccggtgggggcacagcacagaccccagaggcaggaacctctcagccgatgccccccggtatgggaaccagcacctcccaccaaccaaccacacccggtgggggcacagcacagaccccagagccaggaacctctcagccgatgcccctcagcaagagcaccccatcttcaggtagcacccactctgttgccttccctccctgactccggtcattggctggtatgggaaacgctgtaggaagggtccaccccaggctgacctggcctgaccatgaaatcccaaagaggagtctgtttgggactgacagacacagacaggcccaaggcccccagtgaggtaacctgtgatgtgtgtaggacagaggccagatgtggggtccagcgaatcccacgattcccacggctgccgctcaccctgcaagtccctgcacctcttgtgagctcctgtgagcagcttggcctcccgggggggagggggtgggcagggtctcgatgggacacacaggccccttgagccagggtcagcagagcctgagatttgggagacagcccaggcctgggtggaacccaagtgtcccaagcctggcacaggttggcatgggaaatgcctggggcactcaacagtgcggggatgatgacgttttccactgcgatgccaggtggcggcccctcggaggacaagcgcttctcggtggtggatatggcggccctgggcggggtgctgggtgcgctgctgctgctggctctccttggcctcgccgtccttgtccacaagcactatggcccccggctcaagtgctgctgtggcaaagctccggtgaggcccaggatggagaacagggcaggcgaccaggcaggaagtgggggacgggggacaggagaggggagggcagagggacagatgtggagacggaggggtgtccagcgtggaatgagggtgtgcagggccaaggctgcagagacccagggaccccgctgacgcctcgactcccgcctgcaggagccccagccccaaggctttgacaaccaggcgttcctccctgaccacaaggccaactgggcgcccgtccccagccccacgcacgaccccaagcccgcggaggcaccgatgcccgcagagcccgcaccccccggccctgcctccccaggcggtgcccctgagccccccgcagcggcccgagctggcggaagccccacggcggtgaggtccatcctgaccaaggagcggcggccggagggcgggtacaaggctgtctggtttggcgaggacatcgggacggaggcagacgtggtcgttctcaacgcgcccaccctggacgtggatggcgccagtgactccggcagcggcgatgagggcgagggcgcggggaggggtgggggtccctacgatgcgcccggtggtgatgactcctacatctaagtggcccctccaccctctcccccagccgcacgggcactggaggtctcgctcccccagcctccgacccgaggcagaataaagcaaggctcccgaaacccaggccatggcgtggggcaggcgcgcgggtccatgggggtcccattcactcagtcccctgtcgtcattagcgcttgagcccaggtgtgcagatgaggcggtgggtctggccacgctgtccccaccccaaggctgcagcacttcccgtaaaccacctgcagtgcccgccgccttcccgaggctctgtgccagctagtctgggaagttcctctcccgctctaaccacagcccgaggggggctcccctcccccgacctgcaccggagatctcaggcacccggctcatctcagacctcccgctcccgaccctacacagagattgcctggggaggctgaggagccgatgcaaacccccaaggcgacgcacttgggagccggtggtctcaaacacctgccgggggtcctagtccccttctgaaatctacatgcttgggttggagcgcagcagtaaacaccctgcccagtgacctggactgaggcgcgctgggggtgggtgcgccgtgtggcctgagcaggagccagaccaggaggcctaggggtgagagacacattcccctcgctgctcccaaagccagagcccaggctgggcgcccatgcccagaaccatcaagggatcccttgcggcttgtcagcactttccctaatggaaatacaccattaattcctttccaaatgttttaattgtgagagtatctgatattcttgactgaacaatgtaaaaaacccaaagggggctgcgcacggcggctctcgcctaaatcccagcactttgggaggccgaggtgggcagatcacctgaggtcgggagttcgacaccagcctgaccaacatagagaaaccccgtctctactaaaaatacaaaattagccgggcgtggtggttcatgcctgtaatcccagctactcgggaggcttaggtaggagaatcacttgaacccgggaggcggaggttgtggtgggccaagattgtgccaccgcactccagcctgggtaacaaaagcgaaactccatctcaaaaaaagaaacgcaaacggtgcagctgcccctttttcgaggcacgtccacctcccattacccacttccttttttttttgagactgagtcttgctctgtcccctgggctgtagtggagtggctccatctcggctcactgcagccactcccaacgccctccactcctccctactccgcgctggccggggcggggttccgctggtcgcatccaataataagaacaggcggcgcgcgcccttcccggaaactcccgcctggccaccataaaagcgccggccctccgcttccccgcgagacgaaacttcccgtcccggcggctctggcacccaggtactggggaccccagacccacgcggtgcaggccgggagcgagagcctccgtgggggctccgtgaccccggaggggtagagccaagagctgggggagcctgagagatgagggtcgggcggggagggaggcggaggcggaggcggggttccgcggagctgagaaccggacggggtgggatcgaggagggtgcgaagcgccactgtttaggtttcgctttcccgggagcctgacccgcccctgacgtcgcctttcccgtctccgcagggtccggcctgcgccttcccgccaggcctggacactggttcaacacctgtgacttcatgtgtgcgcgccggccacacctgcagtcacacctgtagccccctctgccaagagatccataccgaggcagcgtcggtggctacaagccctcagtccacacctgtggacacctgtgacacctggccacacgacctgtggccgcggcctggcgtctgctgcgacaggagcccttacctcccctgttataacacctgaccgccacctaactgcccctgcagaaggagcaatggccttggctcctgagaggtaagagcccggcccaccctctccagatgccagtccccgagcgccctgcagccggccctgactctccgcggccgggcacccgcagggcagccccacgcgtgctgttcggagagtggctccttggagagatcagcagcggctgctatgaggggctgcagtggctggacgaggcccgcacctgtttccgcgtgccctggaagcacttcgcgcgcaaggacctgagcgaggccgacgcgcgcatcttcaaggtggggaccccagccccgccccgccccgggtgggagagcccgcctaggaccccgcgggcccggcacacgtgttctgtccccctcttcaggcctgggctgtggcccgcggcaggtggccgcctagcagcaggggaggtggcccgccccccgaggctgagactgcggagcgcgccggctggaaaaccaacttccgctgcgcactgcgcagcacgcgtcgcttcgtgatgctgcgggataactcgggggacccggccgacccgcacaaggtgtacgcgctcagccgggagctgtgctggcgaggtgagcgacgccggctgccaagggcgttggcattcgtcctgcttgggcaaaggggaacattctctgggtcagatttgtggttttagaagctgttctgggagaggctgccagcaggcccaggacaggtggagagccacatccccacctcctcaggccacagc

SEQ ID NO: 2713 - DNA, 6000 bp, Homo sapiens
aacccttcccatcttgagcggtgagggagcaaaccctgaacacacagggaggagcgtgggccccagagccaggcggtctcaggggcctggggaggtgggctggggccctggagctcttaagggatgctgacatctctgccctgctcacagtcaccactgggcccacacaggctgtctgcaaaccttcctggcaccaaggcacctggggccaccaaacagtacatgggaggcagaaatgcagaccccgggagcccccacttcctaaatgtttgcttacccgtcaagacaagccttgtgcaaatgggactcagtatctttgggccactggactcattcattagtaagggacccacaggggtgttactgattgtgatgctgggacaagggactgtcctaggcaggcagggacgcccggccaccagcgggactgggcccctcctcagccaaccctgcccttgatggggagtcagaggggccaggctggggccatccaccccagccccacgacgtgccctcccttccgccatccctgaagccatctcccctcgtcctgcgtcccggacccatctacgctgaggacggagaccgcggcatcaaccagcccatcatctacagcatctttaggggtgagtggggcccagccctcaacaatgccctgtaccccctctgtccctgtctccatccccaccttgggcagagctggctgggtccctgggcctcagggggccggggctgagcacttccatcatcctcccaggaaacgtgaatggtacattcatcatccacccagactcgggcaacctcaccgtggccaggagtgtccccagccccatgaccttccttctgctggtgaaggtgaggtgggcacctgcatggggggcagggcagagggggaagggtggaaggtagggcggggggtcagggctggggggccggggcagggcccccgccaagtctgcacctgcctttcctgagccccagccttcagcgccagctccaccttcaaccccactagtcactgctgcctcccccgcctccagggccaacaggccgaccttgcccgctactcagtgacccaggtcaccgtggaggctgtggctgcggccgggagcccgccccgcttcccccagagactgtatcgtggcaccgtggcgcgtggcgctggagcgggcgttgtggtcaaggatgcagctgccccttctcagcctctgaggatccaggctcaggacccggagttctcggtagagagtgcatccaaggcctcccctctgtgggtgggtcagggctgtacgtgggaggcagcctggccggggactcaatgagaccctgtccaggacctcaactcggccatcacatatcgaattaccaaccactcacacttccggatggagggagaggttgtgctgaccaccaccacactggcacaggcgggagccttctacgcagaggtgcggggcagggcaggcgggcatctccaagggtgtggggcttaaagatgtgtctaggagggacaagccccttcctgccccaggttgaggcccacaacacggtgacctctggcaccgcaaccacagtcattgagatacaagtttccgaacaggagcccccctccacaggtaagcccccctccacaggtgagcccccagggttctccaaataagccccttcggtggctcctttcccgcggtaggtgtgcaaggggcgggcagaggcaagcccaagcactgttcccggcccccagatgtccccccatccccagaggctggaggaacaactgggccctggaccagcaccacttccgaggtccccagaccccctgagccctcccagggaccctccacgaccagctctgggggaggcacaggccctcatccaccctctggcacaactctgaggccaccaacctcgtccacacccggggggcccccgggtgcagaaaacagcacctcccaccaaccagccactcccggtggggacacagcacagaccccaaagccaggaacctctcagccgatgccccccggtgtgggaaccagcacctcccaccaaccagccacacccagtgggggcacagcacagaccccagagccaggaacctctcagccgatgccccccagtatgggaaccagcacctcccaccaaccagccacacccggtgggggcacagcacagaccccagaggcaggaacctctcagccgatgccccccggtatgggaaccagcacctcccaccaaccaaccacacccggtgggggcacagcacagaccccagagccaggaacctctcagccgatgcccctcagcaagagcaccccatcttcaggtagcacccactctgttgccttccctccctgactccggtcattggctggtatgggaaacgctgtaggaagggtccaccccaggctgacctggcctgaccatgaaatcccaaagaggagtctgtttgggactgacagacacagacaggcccaaggcccccagtgaggtaacctgtgatgtgtgtaggacagaggccagatgtggggtccagcgaatcccacgattcccacggctgccgctcaccctgcaagtccctgcacctcttgtgagctcctgtgagcagcttggcctcccgggggggagggggtgggcagggtctcgatgggacacacaggccccttgagccagggtcagcagagcctgagatttgggagacagcccaggcctgggtggaacccaagtgtcccaagcctggcacaggttggcatgggaaatgcctggggcactcaacagtgcggggatgatgacgttttccactgcgatgccaggtggcggcccctcggaggacaagcgcttctcggtggtggatatggcggccctgggcggggtgctgggtgcgctgctgctgctggctctccttggcctcgccgtccttgtccacaagcactatggcccccggctcaagtgctgctgtggcaaagctccggtgaggcccaggatggagaacagggcaggcgaccaggcaggaagtgggggacgggggacaggagaggggagggcagagggacagatgtggagacggaggggtgtccagcgtggaatgagggtgtgcagggccaaggctgcagagacccagggaccccgctgacgcctcgactcccgcctgcaggagccccagccccaaggctttgacaaccaggcgttcctccctgaccacaaggccaactgggcgcccgtccccagccccacgcacgaccccaagcccgcggaggcaccgatgcccgcagagcccgcaccccccggccctgcctccccaggcggtgcccctgagccccccgcagcggcccgagctggcggaagccccacggcggtgaggtccatcctgaccaaggagcggcggccggagggcgggtacaaggctgtctggtttggcgaggacatcgggacggaggcagacgtggtcgttctcaacgcgcccaccctggacgtggatggcgccagtgactccggcagcggcgatgagggcgagggcgcggggaggggtgggggtccctacgatgcgcccggtggtgatgactcctacatctaagtggcccctccaccctctcccccagccgcacgggcactggaggtctcgctcccccagcctccgacccgaggcagaataaagcaaggctcccgaaacccaggccatggcgtggggcaggcgcgcgggtccatgggggtcccattcactcagtcccctgtcgtcattagcgcttgagcccaggtgtgcagatgaggcggtgggtctggccacgctgtccccaccccaaggctgcagcacttcccgtaaaccacctgcagtgcccgccgccttcccgaggctctgtgccagctagtctgggaagttcctctcccgctctaaccacagcccgaggggggctcccctcccccgacctgcaccggagatctcaggcacccggctcatctcagacctcccgctcccgaccctacacagagattgcctggggaggctgaggagccgatgcaaacccccaaggcgacgcacttgggagccggtggtctcaaacacctgccgggggtcctagtccccttctgaaatctacatgcttgggttggagcgcagcagtaaacaccctgcccagtgacctggactgaggcgcgctgggggtgggtgcgccgtgtggcctgagcaggagccagaccaggaggcctaggggtgagagacacattcccctcgctgctcccaaagccagagcccaggctgggcgcccatgcccagaaccatcaagggatcccttgcggcttgtcagcactttccctaatggaaatacaccattaattcctttccaaatgttttaattgtgagagtatctgatattcttgactgaacaatgtaaaaaacccaaagggggctgcgcacggcggctctcgcctaaatcccagcactttgggaggccgaggtgggcagatcacctgaggtcgggagttcgacaccagcctgaccaacatagagaaaccccgtctctactaaaaatacaaaattagccgggcgtggtggttcatgcctgtaatcccagctactcgggaggcttaggtaggagaatcacttgaacccgggaggcggaggttgtggtgggccaagattgtgccaccgcactccagcctgggtaacaaaagcgaaactccatctcaaaaaaagaaacgcaaacggtgcagctgcccctttttcgaggcacgtccacctcccattacccacttccttttttttttgagactgagtcttgctctgtcccctgggctgtagtggagtggctccatctcggctcactgcagccactcccaacgccctccactcctccctactccgcgctggccggggcggggttccgctggtcgcatccaataataagaacaggcggcgcgcgcccttcccggaaactcccgcctggccaccataaaagcgccggccctccgcttccccgcgagacgaaacttcccgtcccggcggctctggcacccaggtactggggaccccagacccacgcggtgcaggccgggagcgagagcctccgtgggggctccgtgaccccggaggggtagagccaagagctgggggagcctgagagatgagggtcgggcggggagggaggcggaggcggaggcggggttccgcggagctgagaaccggacggggtgggatcgaggagggtgcgaagcgccactgtttaggtttcgctttcccgggagcctgacccgcccctgacgtcgcctttcccgtctccgcagggtccggcctgcgccttcccgccaggcctggacactggttcaacacctgtgacttcatgtgtgcgcgccggccacacctgcagtcacacctgtagccccctctgccaagagatccataccgaggcagcgtcggtggctacaagccctcagtccacacctgtggacacctgtgacacctggccacacgacctgtggccgcggcctggcgtctgctgcgacaggagcccttacctcccctgttataacacctgaccgccacctaactgcccctgcagaaggagcaatggccttggctcctgagaggtaagagcccggcccaccctctccagatgccagtccccgagcgccctgcagccggccctgactctccgcggccgggcacccgcagggcagccccacgcgtgctgttcggagagtggctccttggagagatcagcagcggctgctatgaggggctgcagtggctggacgaggcccgcacctgtttccgcgtgccctggaagcacttcgcgcgcaaggacctgagcgaggccgacgcgcgcatcttcaaggtggggaccccagccccgccccgccccgggtgggagagcccgcctaggaccccgcgggcccggcacacgtgttctgtccccctcttcaggcctgggctgtggcccgcggcaggtggccgcctagcagcaggggaggtggcccgccccccgaggctgagactgcggagcgcgccgg

SEQ ID NO: 2714 - DNA, 6000 bp, Homo sapiens
tttaacattcattttctagtattctttacaataaacatataactatgcaattcttctgccagaacctcccaagtagctgggattataggcatctgccaccacgcccagctaatttttctattttttttttagtagagatgaggttttgaggcaggtggatcacttgaggttgggagttagagaacatattttaaaaagcccactctgtagaatatgaaactggactgcaaaccatacaaattaggaaacatatgttttaagaaaaatgaattaaaatctaagaaagatgaggggaggatctgacggggaagttggcaaataattttaagtatgttgatacttcattatcctacttaagtaggataattttaagtatgtcagcagttggaagaaaagcagtgagcaaggacagctgatagagcaagtctccaattaactggacttacaggcacaaataaagtgttagtattggaaaataatacaaagacctttatgagttgagaaggtaaaaaaatgcatgaagacagaaactgcaaagtggagaatacatcatgagacagaactgactacagcaactgggaaaaacataacctttttttttttgagaaggagtcttgttctgtcacccaggctggagtgcagtggcctcatttcggcttactgcaacctccacctcccggattcaagcgattcccttgcctcagcctcccaaataggtgggattacaggcacgcaccaccacacctcgctaatttttctacatttggtagagatggggtttcgccatgttggccaggctggtctcaaactcctgacctcgggtgatctgcctgcctcagcctcccaaagtgctgggattacaggcgtgagccaccacgcccagccataacctcttatatataacatataaaaccatttatatcaaaattcatttatggggaaatttaaaaaataaatctgagataaattaccgaacattgggcacaaatggtcaattgtctcacagctaatttgcctggtaaattttcctggtcatctgtagcacctcttaattgttcaaggaccaatttcaggaggtttaacagaatcactgtagctatcttacaatgccttctgtgatttccaggtttttcttgagtgtattccttgagtggcaaacacttcttcccaggagaactctataagagccatagaaatttatgaaagttattggtgtaggctacatttaaacagatcaggtcaatgaagatctcgctttactaaaagactatttacttatgaaatggtctaagacttccttaaatagcaagatctatattaaaggcattaatttatttgcagttaaaaatgtatttgtccgaatctaaattcatataccttgctctgagcctttgtacattctcttcctttcccatcaactggctaactttcactcattttttttttcagtctatgttaagcttcaaagttaccagctaaagtctcctattattttcttcatggcacttacaacaacataatttttaatgtgattcttttaatgtacacgtctcctgacagattgcaagcttcataagggagggcagaggccatatatgtcgggttctctgtaatatagcacccagtaatatagtgtttggcctataagaagagtccaagaagtatcaatgacatcatttaagatcttgctgttaaaagaatacaatctcttgctaagacataataaggaatctttgcatatacatctttgcctaaactccgggaaccactatagttttcaattcacagatcaatgtaccatttctcatacagattctaataactggatcttgctcttaaaaggcaacagtgataaggaagaatatgaactggttgaatacaaatctttacattactgcacctctgcatttccattacctacatccccttttccaatgtgcaagagataaatggaggagaggagatagggagcaacaagtgaaagagaaatcttctgaaagaaggattactagagagcactgttatatctgccagcatacaaaaatggagatttggaatgctgcttgccatcaagcaatccaaaagtgtttgaacaattcagcattaaagggaataactttataagtatgtaaagagtgaccaaaatgtactgttttaaggataatttcacagacaaggaagatattaaggagaataactgatgtggcaattttaggactgagcacttgtacattttacagcagtgcagggaagaggcaggaggaaaatgcgacagagatgcatgacagaagaaaatatgctcatatccattaataaatactgcatgctgacaagagtatattaccaaaattgagagaagagtaatcagttggtaatcaaagtggtgaaaagaggaactactaggtcaatggctgatactgccacactgaaggcaggaaagagaaaggaagggcacaaagacatctctatcagcagtatgcataaggcagagataaatggtggccaaaatgctaggaaagctcaaggtatgccagacaacattctgatggtagggaataaaatagcacagagaagcaggttatcagagggcaggacacatggtaccagcagggagaagttacaagccttgagggcagtacacacaggaagcattcacaacccaggactggtgctggtcgctggcttcactacttttaactgattcttctcccacactgcaccaagtttcctagtatttttcaaaagccctctctgaatttgctttgattttttttcacatttgtactgcaatgtgtattttatatcacctaagagagactcaaacttaccaatctgttgcactgctacaagtcggctgaatggcctggtcaacatggtgaaaccccgtctctaccaaaaatacaaaaattagccaggcatggtggcgtgcgcctgtgatcccagccgctggggaggctgaggcaggagaagcccttgaacccggtagatggaggttgcagtgagcagagatcgcgccattgcactccagcctgggcaacaagagcaaaactccgtctcaaaaaaaaaaaaaaatgtcggctgagtgaggatagcagaccatctcttttttctcctttctgaatgagggacttaagcctgctaacaggtacaaagttctctccagagtttagtccttctctaagtccaaggcctgctactagaggttaccttccctgcggttgtgacctctccatctcaactgctctggttttgtcttttaaaaaatcttaaggttggcaactttggcttaattacctaagtccagttcagtggttttcaaactgtgttccaaggagtggcctctaggatagaagttaagtggggtggtggggcctggcccttttaaatttagttccaccagagcatgctgctttatatattgggttccagataaaaattcatggggagaaattgttccactcctttaaaatgtttgaaaatcacaagtctggatattggtttgtatggagtcaatactcactgcaaagcacatttcattcaaaccactcagttttttttttgtttttgtttttaagactgggtcttcaaatggacaaagggtgtatttttcatatcttctttccccatccccattttactgatgctaaaattggagtttaggagtcatttggggccaggcactgtagcataattctggcgctttgggaggtctaggcaggagaatcgcttgagcccaggaattcgaggttacagtgagctattatcacgccactgcattccagccaggacgacagaacaagactctgtctcttaaaaaaaaataagaaaagtcacctccttatttaatttggcctttgagaacactgggggatttacaaaataattacatatatccaggtactcatggtctatttttcatcattacacgacaatcaaatgaccaaaactaggagtgtgtggactggcacgtgttaaggtttttaagagaggtaagattgacaggtggaagcaaaaggtgtgcagacaacaaggtgacagcttttctcttacagaatcccagactcaacagcacatttcctgacgggaagggcttctctgtctgggagaggcctccacttcattctcataagccaaatctgatcctggctttgggtaaacctgctctcaatttaagagcaggtttcctttagacaagtagattaggggtcgcctcttcctcgcctcgggataagggcaaacaagacgccaggcttgggcgttgggaggacggcgacagcgacgctgggaacaggggtagaatccacgccgtccagcggcccccaggcctgtcagctcctcacccgcccacccacccgcccgcctgcattcttcggtctaaacttaccaggtggaagctacaactctagacaggaagtaactaactgggttggatccggtcgagttccgctgcgcttcttagagccgctgctgggaagaggccgaaacccagtggccgcagcagtagccaccgcctctgttactagggggtctcgcctccatcgctggctgcgaggagtctgagggcacgtgaccggaagtagcaaggcgggccctgggcacgtgactcaagagcgcggccgccatgacaccttccgctagttccctccctcccccacgggttcccgcctgtttcgtttcctctctccggtctcgagcggcgaagggtcctgggatcctggctggcccaaccatttggcctagagctcctccggttccagtcggcgccgtgtctccagcccgcaacggccctgcggtcgcaggccgtagagagcgtaatcgcgaccgcggcctgagggggagggaccacgcggaaggaggggcgtgactcgtcacgtgatgaggaagtgccgttagtagcgttgtttccagtctgcggctctcctggatgacgtcagcaaggaaggggaggaacgcgaggggagactgaagttcacgttccgctcttagtgcgcggtgagttccccggcgctaagccgggagacaagatccgatctactgagagctgcgaggtactgccctggatgtggtggagctgggctgggacctccgggctgctggtctgtgagcctggctttgaaaattggttactgggtctcctctcaagaaatctcaagatattaaagttactgctgttaaaaaggtagtagttccactaggcaaggagctttttgtgggtagggattgtgttttgttcatccctgtgtctctagcggtgtgttcaggtcctggaacatagtaggcactcagaatgttgaatgaatgaatgtataaatgagtcagtcgccatttgtctgaggcagagagttgttttctgatcatttcttcttggatagaaagatcccattgtgaaaatgaggcagtctgcaacttccccttctcatttcttcaatttttgctatctttcttacttctttctcctcttcctccacgcacctactggggcaaaagagaaacatgtttgcatttgatgtgtgagcaacaaacactgaactattttacgataatggaaagatgagatttggattcaggagacgcgtattctaatctcagctctaccatttatgaactctgtgatccttgggcaagccagtctcccaaaagttgtttcatttactttggttaagcatttgtcgccaacttctatgttcttagtttttggtagagtgccttcacagaagtaacatttaaactcagctttgcagaaaggtagggttttggtaaatgggggaagattccataaacatcatatattaaaccatggaggcacagcaagtttatggaatgaaaaagaaaaaaagagtcgagtccaatgtagttggagaatagagaggttaagatgggaaataaggctggaaaaagaagcagggaggagataacagattttcaagaaatagagctgttgaaggcttgtacaatattatgtatatattttttaaattttattgtggaaaatttcaaacg

SEQ ID NO: 2715 - DNA, 6000 bp, Homo sapiens
aacagagagcacgtgaaaatgaaactgatacaaggatcaagaaattcacctttagacgactggagtccagccgcagggctgagagtaatggatccagagattcaaactctgcaagaacatggctgtaggactctggtatcactggcacaaaagccatttagccagaaagctgaaacttgttgaatgatagatacagtattcctcacctgaataaaatccacaaaaatataatttaagaagcccaccattcatttaacatgcatttaacaaatatgtggggaacatagagaaacatgagaaagtccccactatacagggacttagaaagaaaacacataaggtaacatcgtatgccacagtgtgtttacattgtgtcattccctgactctaaaactcccagagtagcaggtacggattctcagggccctccataagcctatccccctgtattatctaacagtgtgagtaaacagaataggtagagtaggatttaggaaaattggcatatcaccctgagttaaaacagcaaccttgctgctgcatttctatgaatactaaatcttctgtctttaggagtctctcattaaaacgcaatcttctgtaaaggcctcaacttattaactgttatcagcaaaccctacagttatcagctaacaatttaacagtggtttataggaataggccactagacttctctcttcaaccgagcaggggcttagtaagtatggtgaatgaatgaacagatctactaagtgagaaggtacagggaattagagcacaaagaaaaataagcgcttcaacaaaagagactagataggacagaatacggataagaatacaaggtaacaaatgccaaataaccagtgaggactttgtaaagtaacacgaaagtttttatgtgttcacctactctcaaatgcacttttttgtcaacttgcaccaatctccagaaaaaaagaaaagaaaattctactcattaattataacttttctcaatcacttgttacctgccaaatttagaaagccaatgaatacaacagaaaaagtcatgaactgtttatacattcttgttgtttgttcatgctttacgtttttgactttttttccagaaacatatatattccatcactcatttattcaacaaatttgtactgagcacccacctacgtgccagacattattctaggtcctggagatgataaagttctaaccctcatagagcatactttctagtggcaaaacgaagactatattttttattgcacacacataacacaatcttattttctgctagtaacactgttcctaatacaccttgacctctgcaaggagaatgttcaggaaaaaaaaaaagaaaaaacccagaaagaaactttcacatgcctgtactcaaaatatttgagaattattgacctaagaaaatcttccctcattgttttcactcattcatttcattgagtacctagtaaagtaccaggcacagtggtaaaaataagacaagtaaaataattccagaagtcagtcagtttataatacggaggaaaagacaaataccacacacacacacacacacacacacacacacacacacacatcttataagggaaacataagcaaactgctttgttagaactttacaggacagagggatcacattgaattaaagggaactgaagaaaacgctctaaggaaagtagtactgatgctgactaggcttttatctcaaggaaaagggaaagggtagcaggtagggtagcaataagcaaatatatagagaagaaaaaaatgcagaatatactagaagaatacaaatttagtctttggttgaaacaggatacaagcaacggaataatgaaagataaagctggaatcttaatttgggcccaagttacaaaacactttgaatttcaaaccaaagaacctgaacttaacttggcaggcaacagaaaggaattgaagaattgtgtgttgggaggtcacacaatttctgtaaagtgctgtgggtggttagatgctagaaaacaaagacttgagaaaacgggtgggtgatatgaaaatgaggataaaacatttcaattactcaagaagtctggtggaaaaggagaaaacctctcttgacgttattattggggagactcttcaacagatttgtaggtagtagctaaaagtagagtctagaacgaaagggactgaagattcaagaaaaagataaaaccatggtacaggatccaagagatggaaaggaatgataatatcatagtgtctcttctacttgtgatcttgaaacaaagaaactctgagtaggtcattttgccttaatctcggtaaaaagagaatgtcctggaagttataatataatgcgggggtgtgcagggggacacacctagtaagttctactgaaaagaaaaaaagaatttaacagaaatgagaatggaaaataaaaacagcataagcaatgccaattctcagagaagctgctgaatgacagtgttaaaccaacttcaactttatactttatgtttactctccctgaaatgactgcttcccttccagattttcttatccaaacatacccagctttcaagatcgcacatgagccctacttcctagaattctcaagatggaaaaagattcataggtaattcagtgaacatgtccacctaattcagaaattagttttgccctagatccctgaacattttcagccatggaaagaaagcactcactctcatgaagctgccaattccagtcctccaaagggctcactattataaggttctttttaatactatgctgaagcctgatcacttagagctctaccattattcctaattgtatgtagcttctacagctgaagggaacaagctgtctctttccaaaacaatccttctgtatttgaaaagcattatcaggtcttctaaaaatttaacattcccagtttcttcatcactcctgacatgacattttccaaccctctgttccagtcaaccttctacagaggcactgtagtttgcctaaaaatgaggtgcctagaactgagcataatactccttaagtagttagatgagcccagaatagagtagaaacactaacttcctggatctagacactaagtttctatattacaacctaaaaacagtattagttgtgtttaagtggccatgttacacattgattcaacagagcaagtggtcaactaaaacccaaagaaattgtttacataaataaaatcttcttagccagtagctacatacagtagaactgagctcaaattgaaagctgctattaatcaaatgcaacaatggatataaaaagtacctagaaatgtacaaacagtataaagaggaacagcagaatgctgataattgttcaagttgcgttaagtgtacatgagggttcaatttattatcctacttttgtctgcgtttgaaattttccacaataaaatttaaaaaatatatacataatattgtacaagccttcaacagctctatttcttgaaaatctgttatctcctccctgcttctttttccagccttatttcccatcttaacctctctattctccaactacattggactcgactctttttttctttttcattccataaacttgctgtgcctccatggtttaatatatgatgtttatggaatcttcccccatttaccaaaaccctacctttctgcaaagctgagtttaaatgttacttctgtgaaggcactctaccaaaaactaagaacatagaagttggcgacaaatgcttaaccaaagtaaatgaaacaacttttgggagactggcttgcccaaggatcacagagttcataaatggtagagctgagattagaatacgcgtctcctgaatccaaatctcatctttccattatcgtaaaatagttcagtgtttgttgctcacacatcaaatgcaaacatgtttctcttttgccccagtaggtgcgtggaggaagaggagaaagaagtaagaaagatagcaaaaattgaagaaatgagaaggggaagttgcagactgcctcattttcacaatgggatctttctatccaagaagaaatgatcagaaaacaactctctgcctcagacaaatggcgactgactcatttatacattcattcattcaacattctgagtgcctactatgttccaggacctgaacacaccgctagagacacagggatgaacaaaacacaatccctacccacaaaaagctccttgcctagtggaactactacctttttaacagcagtaactttaatatcttgagatttcttgagaggagacccagtaaccaattttcaaagccaggctcacagaccagcagcccggaggtcccagcccagctccaccacatccagggcagtacctcgcagctctcagtagatcggatcttgtctcccggcttagcgccggggaactcaccgcgcactaagagcggaacgtgaacttcagtctcccctcgcgttcctccccttccttgctgacgtcatccaggagagccgcagactggaaacaacgctactaacggcacttcctcatcacgtgacgagtcacgcccctccttccgcgtggtccctccccctcaggccgcggtcgcgattacgctctctacggcctgcgaccgcagggccgttgcgggctggagacacggcgccgactggaaccggaggagctctaggccaaatggttgggccagccaggatcccaggacccttcgccgctcgagaccggagagaggaaacgaaacaggcgggaacccgtgggggagggagggaactagcggaaggtgtcatggcggccgcgctcttgagtcacgtgcccagggcccgccttgctacttccggtcacgtgccctcagactcctcgcagccagcgatggaggcgagaccccctagtaacagaggcggtggctactgctgcggccactgggtttcggcctcttcccagcagcggctctaagaagcgcagcggaactcgaccggatccaacccagttagttacttcctgtctagagttgtagcttccacctggtaagtttagaccgaagaatgcaggcgggcgggtgggtgggcgggtgaggagctgacaggcctgggggccgctggacggcgtggattctacccctgttcccagcgtcgctgtcgccgtcctcccaacgcccaagcctggcgtcttgtttgcccttatcccgaggcgaggaagaggcgacccctaatctacttgtctaaaggaaacctgctcttaaattgagagcaggtttacccaaagccaggatcagatttggcttatgagaatgaagtggaggcctctcccagacagagaagcccttcccgtcaggaaatgtgctgttgagtctgggattctgtaagagaaaagctgtcaccttgttgtctgcacaccttttgcttccacctgtcaatcttacctctcttaaaaaccttaacacgtgccagtccacacactcctagttttggtcatttgattgtcgtgtaatgatgaaaaatagaccatgagtacctggatatatgtaattattttgtaaatcccccagtgttctcaaaggccaaattaaataaggaggtgacttttcttatttttttttaagagacagagtcttgttctgtcgtcctggctggaatgcagtggcgtgataatagctcactgtaacctcgaattcctgggctcaagcgattctcctgcctagacctcccaaagcgccagaattatgctacagtgcctggccccaaatgactcctaaactccaattttagcatcagtaaaatggggatggggaaagaagatatgaaaaatacaccctttgtccatttgaagacccagtcttaaaaacaaaaacaaaaaaaaaactgagtggtttgaatgaaatgtgctttgcagtgagtattgactccatacaaaccaatatccagacttgtgattttcaaacattttaaaggagtggaacaatttctccccatgaatttttatctggaa

SEQ ID NO: 2716 - DNA, 6000 bp, Homo sapiens
actcctaggtttacatagagtataaccaaacacatgtgaacacacaataggaaattacaaaagatgtaaagaaataagccgtcatgagtgagaatcaacagaataggtttagatcctcaatacttcaggttgtgaaataattaatagatgataaaataacaatgataaaaaatgaaaacagaatcacaaaaagcatgccatatgagattactaaaaggtaaacaggcatattaggagaaaaaaagccaaataagactttttaaaaatcactgaaatttaaaaccaattgatagcttaaacctcagatcagacagaattatcaagactataccaatactacttagggttataggcaatgttgatgacataagacatcccgagcagtgttcataagagaaaggtgtattcctctcctatattaacaggacaagctaggtaggtgggctctgttttgccattctgtacatgtgacttcatctttgggtctacagcaattgtcccagtcatcttcagccatatgattcaaggtagcagcaaactagcagcaaattaactttctagcccattaaaagggagaagcagagtattaagggcaaataacttcagatttctagggaatgaatattaagttgtacatatcacttctgcttatataaaagtaaccaaaacctagcattatcgccacatgtaactgtaggagaaattgggaaatttactctctatctgggtggccattttcagctaaaacctggtggtaggctaaaatgaagatggggaatattgatcttgggatataacagcaatttccaaagcaaaatagaatgatatggagatagaaactgggacagagcggttacatgatatgagtagtgtgagaagatctaagatctaatataggcccgatcaaagtgacaggaatgatttttaaaaagtggaagaaaggaaatattggggaaaaatggctggaaatttttcagaatgaagaaaaacacatatccacacataaatgaaacacaacataaaacaagcaagaaaaacagaaatttacaattagatattctgaagtgactatagatactgaaatcgggaccaccttaaaataaacagaaagaagaaatcactctacaaaataaccacaagtagacgaatagctttcttatcaacaatgaaaaccagaaaagagttaatatctttaacatgttaacctgaaatcaggaacacagcaaaactaccttccaacaacaacaaggaacgatcttagtaaataaaaactgagtttaccaccaagagaccttctccaagggaatttgaggtacaatcatgggaaacaaaattgttaaaccaaaacactggataataacttgagagtttatagataagagatcagggttaaagtttcctaaggtccatagtatcattaagaaggagggttaagatactaatattagatatttttaagttaaatatggtaagttttgagagtaaaagcatgggtatagaattaacatcctaactggtagaggggaaaatatcatgaaataagaagacaaacaaatatttagtcaattaaagaactgagaagtgaaacatagagaaatcaaaggaagtggaaagcacaaaataggatagcaggaaaaagtccaatcatacagtgttaatatatgacaatgataatagaaaaaaatagactttaaagcagaaaagcagtcactacaaacaaaaggttcaattcattaagatgatataacgattctatatttgtttgcatgtcataaaattgctcaaaatacataagatgataattgataaaatttcctgaaacaatgttacaatgggagatttcaatagtgctccctcatttgataggacatagggaaaaaacacaaaataaatatctctagattttataaagaagttatcaaatattctatttttatagtcttcctctcacttttttctctctcagtgtatgcgtagattcctaatcttttcaagtccttaagagaaagtatataaagctctaatgctggtttcatttattcaaacactacaagtatctaccatatgctggacactgtgctaggcttctggaaataaaataaatgacagatacggcttccactttcatgttgcttttgtttatacccttgggcattttacttaatcttttagcgtatattcataagaatacagttttggtgtgaagattaaataagattatgtatgtaatgaacatatggagactaaaataacagaataataaatggtaagtataaaatagattttaaaatgttatttcttaagtctattgtcaatctttacaattttattgtaaatcatagtgtgagatacagctgcaaatatagggaagtaagttcacaaactgttattttctaaagctaaagctaacattaggccttgctatggtagaactcttcactgggttgtttcttaaaaaaaattcacgcaactgacaggaggaattgtctttattcttgcattaatgataaatgtaatctacaagatggccttcatggattagaaaaaggaatcagaccacaaggaaaaagaaattgctggttttcactcaagatttatctagaaaagtgtactgactactggaataatagtttacccctgggttgtaccacagaatgagaaattctacaagattatacaactctttttctacaagattacactactcatattgtttttattccattccggaattagaaattaactttctaaatatcatttttttctccaaaaaaatcctcttaccagctaacctggatatggacaaaaatatcttgattgctgtaaaggtctatctccctagtaaaaatgaataaattgcccttgaatttattcaaggcaatcactatcagctgtggaacacccaggtaaactaacacaactaggttcctacacacaaaacaaatattctaaactgtttccacagggcagccaccaagggaaaaataaggaaatttaactattttattctaaacacttcatttacatataaggcaactgtggccccaaggttgtgatttattaacctagttaacggcagaagctgcactaaaacctggatcttctacttaaaatgttgttttggccaggcgcggtggctcacgcctgtaatcccagcactttgggaggccaaggcggacggatcacaaggtcaggtgtttgagaccagcctggccagcatggtgaaaccccgtctctactaaaaatacaaaaaattagccgggcatggtggcctgcgcctgtaatcccagctacttgggaggctgagtcagaattgcttgatcctgggaggcagaggttgcactgagcagtgatcacaccactgcactccagtctgggtgacagagcgagactccatctcaaaaaaaaaaaagtttgattcttttatcatcaagcattaatttaatatccaaaggcatatattcgtatttactgtgctttaaacatttgtctgtgcgtcaatgctttaaagggacatactatgtggtgattcattttcaaagtaagaatttgcagaaaatgagaaacaaactttctgaacaatacaattttaatgcatactaaggctggttaactggttagaatactaggttaacaaggccaaactccagataggccaacagcttttcaaaccaatattcctgacactgccaggaataaagaaaactcttcactactgagggagggacagaaaacctagaaaaataaaccatactaaaagaaaaagggtattttgtttgtcactttaaagctgctttttctttaaacggtacacatattttcaacattcttacaaatgggccttctattaaaaagcaaactattgctaattccatggctttaagtggagtacttccaatcacttcctctatccagaaaatccgtgacactacatgccagctactttgcatatttataactgtttaataaactattcaaaattagcatctaaaataattatactttggacacacgaaggcatatatttggtgagaacattgtaattttcattttgtaaactatatattctatattcaagtaataacacagcattgcctatacagaactgaggcctgcgctgagacccaaaacttgtcttttcctaaatgcaccactacgaagagctaataagaggtctgtccagatgctaagaccaggtacttcaaaatctccatcctgcgctttacaggtctccagggcagttagaactttatctttcagaggtggaggggcctgacagaggctttgaaacctattgtgcaactcctcccagggcacatcttgggactcagttccaacccaaatgcctttctgaaggtcatagtgcaaacgttgaccccagtctgttagcagacccagatagacaggagacagcgctgggtggcggctagtcactaaagtcaaaagcccggctgggagggcgcgacaaaaggcagcaaagacttccgaattccccagaagccagtggactagcacttggctcccctctccaggtgatttgtggatgccgggttccaactcttcttggggccgacgagacaaaggcggctgcaacagcgccaccgctatcaccttcaggaagttgttctgaggcaagcgctcccacaggctgctgagaaacctggcgggacgctccgcttcggccttccccacctcctgcagacgctccagcagcagctccgcctgggtcttcatcagagagtcctcctggagatttgggttctctctatagccattgaagcgcagcatgtgcaccgcagaccgccggcgggcaaggcgggccaggctctcttggagtgtctcctcatcggcgtcccggacgcccgggccgggaaagagttgctgcaccaggtggtaacgagctgcatccccgagggcccggttctccagcaggcgcagagagagcaggacgtcacagtgaccgagggcctggaagttcgctaatcccggaactggaccccgcccaaagccgccctcttgcctccactggttgtgcagccgccgctccagagccgtgcgaatggggccatgccgaccaaagcgccgatggatgtggcgcaggtagcgcgcccactgcaaggcccggcgcacggtggcggggtcccaggtgctgacgtaggtagtgcttgagaccgccagaagctcggaaaagcgatccaggtgctgcagaagggattccatgaggtgcgcgaaggccctacttccgctttcaccttggagacggcgactctctgcgtactgattggaacatccgcgaaatgatacgcctctctgcaatgctattggtcgaaatgcatgtcaatctcccagcgtctttatccgtgttccttgactctgggcaacttaaaagccctaatacttttactttcgccacacaaagaggttcttcttagtggagggagagcagatgtagggcatcctaccgagaatttccggaaccacgtgcgagatgatgccagtcatgaacgtctccgcgcttcctttcgctttggaaatatccttaagtagaaattttctgagctttgcctaaaactagaatctgtgttgaggtttttcaaaattaagtaacgccagagacatactgtgacgtgaggaaacgctcttaaatgaaattttaagatctatttgagaaacatgtactaaaaatgtactgacctcctattaatgccaggcgctatgctgaattctgggccttcacattgtccttccattattagaactgaagcccagattatttgaaacaaaaaataaacttcaataatttattaaaatttgcaaaggaacaaaattttacttcacaattgtacatttcgttttcgtaatttttaggacaaaatagcttaattgactcttctgtcatacaaataatcagctgaaggaaatggcatttaagagcatcgaacaataataaatgtttgattaaataaaaaccgtgacaagagagtagggaggagaaggtcc

SEQ ID NO: 2717 - DNA, 6000 bp, Homo sapiens
gcaaaaagaacaaatctagaggcatcacattactcaacatcaaattctacaaggttatagtaagcaaagcagcatgacactggtataaaagtagatatatagaccaatggaagagaatagagaactcagaaataaagccaaatacttacaatcaactgatctttgacaaagcatacaaaaacataaattggcaaaaggacaccttatttaatggtgtggggagttctttgtagattctggatattagccctttgtcagatgagtagactgcaaaaattttctccccttctacaggttgcctgttcactctggatggtagtttcttttgctgtgcagaagctccttagtttaagtagatcccatttgtcaattttggcttttgttgccattgtttttggtgttttagacatgaagttcttgcccatgcctatgtcctgaatggtatttgtagggacacggatgaagctggaaaccatcattctcagcaaactagcgcaagaacaaaaaaccaaacatcacatgttctcactcataggtgggaactgaacaatgagaacacttggacacaggaaggggaacatcacacaccagggcctgttgtggggtgggggaagggtcaagggaaagcattaggagatatacctaatgtaaatgatgagttaatgggtgcagcacaccaacatggcacatgtatacatatgtaacaaacctgcacattgtgcacatgtaccctagagcttacagtataataaaaaaaaatggtgtgaggaaaactggatagccctatgtagaagaatgaaactggatccctatctctcatcatttaagaaaaatcaactcaagatgtattaaagacataaatttaagacctgaaaccataaaaattctagacgaaaacttaggaaaaactcttctggacactgaccgaggcaaagattcatgactaagaccccaaaagcaaatgcaacaaaaacaaaaataaataagtgagacttaattaaactaaaaagcttctgcatagcaaatgaaatattcatcagagcaaacagacaactcacagaatgggagaaaatatttgcaaaatatacatcagataaaggacaaatatctagaatctacaaggaactcacagaaaccagcaagaaaaaaaaaccaataatcccattaagaagtgagcaaatgacatgaatacacatttctcaagagaagatacagaaatggccaacaaatgtatgaaaaaatactcaacatccctaattatcagggaaatgcaaattaaaaccacaatgggataccaccttaccccagccagaatggtcattattaaaaagtcaaagaacaatagatgttggcatggatgtagtgaaaagggaatgcttatacactgttggtgggaatccaaaccagtacagcctctatggaaaaggatactaccttaccctggccagaatggtcattattaaaaagtcaaaaaacaatagatgctggcacggatgtggtgaaaaggcaatgcttatacactgttggtgggaatgcaaaccagtataacctctatggaaaacagtatggagacgtctcaaagaactaaatgtagagctacatttgatccagcaatcccactactgagtatctaccccaaagaaaagaagtcattatatcagaaagacacttgcatgtatatgtttatcacagcataattcacaattgcaaagatacggaaccaacataagggcccatcaattgaaaagtggataaaaaagttatatatatatatacacacatgcatacatacatacacacacacacacacataccatggaatactactcagccataaaaagaatgaaataatatattttgcagccacttgggtggaactggaggccattattctaagtgaagtaactcaggaatggaaaacctaacactgcatgttctcacttggaagtgggagctaagctatgggtatgcaaaggcagacagagtggtataatggacactggaaacttggaagcaggggaggtgggatggggtgagggataaaaatctacatgttgggtacaacgtacactactcagttagagggtgaactaaaatctcaggcttcaccacactgaaattcatccaagtaaccaaaatccacttgtacccttaaagctattgaaataaaaaaaaaattctgttaaagcaatgaaaagacgacaagaaagttttatgagctacaatatttgaaaacttcaccaaagaacagaaaaaaatcaaaataaataaataaaaataaaatctgctgaaatttggcctttttctttcccaatttactgtatcccaggaatttggggatcaaaaccaagaggagggagattgttcctggtattcatggcacacagtacacacatttgtgttctcatatattttaccttatattatttctctcacttggattttcttctgtcccatgattgttcaaacactttgaggcctaaatcaagtatcagtcctctgtagtcttcccagaactctcctgtcagtttctatctagtctctcatagcaaaattcttaaaattttcaaaatatataaaatctgctttgcattataattaagtttttgtatccctccccaccctgcctcaagaatataggttgaaatgctaggcttttctttctttagagggggaaacttcatagacattttatttaatgaaaatagactaatctgaaatatgtaggagtttatacgttactatgctcaaggaagaatttaaaatcaagatttaaacagataagtagaaaggtatgaagctaaagttaatctgcataattcttgccatacactgtcatccccattctgaatcaaagcttttttggattttttccacctccttaaataggcctggttctttcaactcagatacctgcaaaaaaaattaaggattcctgtagccttgaaggctcctctgaacactcagctttgaactttcaactgaaaagttggtttcttttcctttttttttccattttcctttttttttttttttgagatggagtcttgctgtgtcacccaggcaggagtgcagtggcccgatctcagctcactgtaaccttcacctcccgggttcaagctattctcctgccttaacctcccgattagctaggatcacaggtgtgcaccgccatgcccagctaatttttttgtttgtttgtttagtagagacagagttttgccatattggccaggctggtctggaactcctgaccccaggtaatccacccgcctggcctcagccccacaaagtgctgggattacaggcataagccactgcctccggcctgaaaagtcagtaattaaagagaccttcctatcccctaagacttggtgaccccactcaatttcatcctactatcacatttgaggttattcatttaatgtctctcttaaatggtacaagatgaacttctccactcatgctaggactgcatttattttactactaaatctgtagcacctcatactatgtatcataataggtgttaaatataagaataaataaatgaattagtgatgcctgtacatttgctaaaggcaggctgcacacttggttctaagtttgtagtagccaagaaaaagaattttaagattcatagtatccttaggataaaataaaataacgatttcaggaccaagtaagagtttgagataactaataaaaatcaaataatagccgggcgcggtggcacacgcctctaatcccagcactttgggaggccgaggcgggaggatcacttgaggtcagaagttcgagaccagcctgaccaataaggtgaaatcccatctctactaaaaatacaaaaattggccgcgcctgggcgacagaatgagactccgtttcaaaataaataaataaatgcataaatctgaattaacagcatgcacatcactgctttactttctaaaaggtgtaggaatgcttattttaataaatgaaaaatgactcttcccctcttttaaatttgtttctcttcccctttttgttaaagtacaaaacaaaacaccttcccccacttttcgaatagttttggctgtgtctttaggactggaaggaaattcagctcaaatgaattactatattatgaacttaagtaagaattgttgtgcattttgtacagaatgcaactcctaggagttgacaaatgtttgttaagtgcatcagtgagcgacataggaccttctcctccctactctcttgtcacggtttttatttaatcaaacatttattattgttcgatgctcttaaatgccatttccttcagctgattatttgtatgacagaagagtcaattaagctattttgtcctaaaaattacgaaaacgaaatgtacaattgtgaagtaaaattttgttcctttgcaaattttaataaattattgaagtttattttttgtttcaaataatctgggcttcagttctaataatggaaggacaatgtgaaggcccagaattcagcatagcgcctggcattaataggaggtcagtacatttttagtacatgtttctcaaatagatcttaaaatttcatttaagagcgtttcctcacgtcacagtatgtctctggcgttacttaattttgaaaaacctcaacacagattctagttttaggcaaagctcagaaaatttctacttaaggatatttccaaagcgaaaggaagcgcggagacgttcatgactggcatcatctcgcacgtggttccggaaattctcggtaggatgccctacatctgctctccctccactaagaagaacctctttgtgtggcgaaagtaaaagtattagggcttttaagttgcccagagtcaaggaacacggataaagacgctgggagattgacatgcatttcgaccaatagcattgcagagaggcgtatcatttcgcggatgttccaatcagtacgcagagagtcgccgtctccaaggtgaaagcggaagtagggccttcgcgcacctcatggaatcccttctgcagcacctggatcgcttttccgagcttctggcggtctcaagcactacctacgtcagcacctgggaccccgccaccgtgcgccgggccttgcagtgggcgcgctacctgcgccacatccatcggcgctttggtcggcatggccccattcgcacggctctggagcggcggctgcacaaccagtggaggcaagagggcggctttgggcggggtccagttccgggattagcgaacttccaggccctcggtcactgtgacgtcctgctctctctgcgcctgctggagaaccgggccctcggggatgcagctcgttaccacctggtgcagcaactctttcccggcccgggcgtccgggacgccgatgaggagacactccaagagagcctggcccgccttgcccgccggcggtctgcggtgcacatgctgcgcttcaatggctatagagagaacccaaatctccaggaggactctctgatgaagacccaggcggagctgctgctggagcgtctgcaggaggtggggaaggccgaagcggagcgtcccgccaggtttctcagcagcctgtgggagcgcttgcctcagaacaacttcctgaaggtgatagcggtggcgctgttgcagccgcctttgtctcgtcggccccaagaagagttggaacccggcatccacaaatcacctggagaggggagccaagtgctagtccactggcttctggggaattcggaagtctttgctgccttttgtcgcgccctcccagccgggcttttgactttagtgactagccgccacccagcgctgtctcctgtctatctgggtctgctaacagactggggtcaacgtttgcactatgaccttcagaaaggcatttgggttggaactgagtcccaagatgtgccctgggaggagttgcacaataggtttcaaagcctctgtcaggcccctccacctctgaaagataaagttctaactgccctggagacctgtaaag

SEQ ID NO: 2718 - DNA, 6000 bp, Homo sapiens
gggccagggaggtggacgctctctgccagcccaggacctggctccctatctgcaatgtttcctctttcttcctccttgtaggggaagacgagtctcaggcaactattctaggcctcccctcctagccccccatgtcacacagtaactttcaaagctccttctgggccaggcacagtggctcatgcctgtaatcccagcactttgggaggctgaggcaggtggatcacctgagatcagtagttcgagaccagcctggccaacatggtgaaaccctgtctctactaaaaatacaaaaaattagccgggcgtggtggcatgtgcctgtaatcccagctactcgggaggctgaggcaggataattgcttgaacccgggaggcagaagttgcattgagccaagatcgcgccactgcattccagcctgggcgacagagcaagacacagtctcaaaaaaaagttctttctgggcaagagtcgctctagaacattgatgttgcagttgcttctggactcagaaggtaaccaccaggagggctaggggtgctgtagccaagcaggtgagtgggtggtgcagccctctgcccccctcaccctacccccagcaggtctgtgggtaccccttgtgcaaaggttctgtcaagaaagaggagggtcgggctctgtggttgggctgggcatggtggctcatgcctgtaatcccagcacttggggaggctgaggcgggcagatcacctgaggtcaagagttcaagaccagcttggccaacatggtgaagccccctctctactgaaaatacaaaaattagccaggcatggtggcgcatccctgtaatcccagctactcaagaggctgaggcacgagaatcgcttgaacccaggaggcgaaggttgcagtgagccaagatcgcaccactgtactccagccagggtgacacagcgagactccgtctcaaaaaacaaagagaaaaagagaagagtgctgtgtgttgagtgcctatgatgtaggaagtatcctgtctcctttaatacaaccacctccataacaactttcattcattcattccacgactagtaattggtggctaaacacatgccaggcaccatgccaggctttggggatacaagtttggaaaaggtaacctcagctcctacactcctggagggcatggtggtgacagttacgctagcatagtaagggctgtgatggggcatgcataaaaggggctgtgggagctctgggcaagggaggggacccggggacagggcagtctaagcaggccttctggaggaagtttagaaactgggtttagaggaagaagtagggacagaacattctagatagaaggaagagcacgtgcacttcttcatggctgggccacagcaagactcaccagacacaaggctgcccagtcaggccgactccacgtggtgcaggtcctaagagctgtggtgagtgagtggaatttctcctgaaggcagtggagagccacagagaggcttcacaccagggcacagcctggaccgatctggacttcaggatgatcatatcagttgcaaggtggagagtagattggctggagtggaggacagggaggtgacccagagagctcagagtggttaagtaacttctcccaggccactcagcttctaaattgcagagcctgattggaggctaaatccctctgaccccaaaactttccccactgccccgtgttgccagatgctgtggcaggaagtataacatgcattgttcagcccctggcttctgggagcatgggatctggctaaaaagaccagactgtcaccatgggcaggggcccagcagcccagagcaggcaaggggctttgcaggaaagcgaggcagtaagagtccaggttctgggattatcaggaaaggattccccaggagaagccaactttgaccttgacagatgagtagaatcccccagaaaggaggagggtgtttctggcacaggacatgaacaaggacactgaggcccagggtgagaagcagggagacgagcagggaagctggggcgaccataggacagaggaagggcctgcacccccgcctgccacgccaaggagtgtagtcctcatggcagaagtggggagccacggaagctctttgagcaggaagtgacacaagatgagagtctcagagtcactgccccaaatgacacaagagattctaacttaatgtgccccatgatgacatcataggctcccattccatgcaagaagcagccaaggcttagacactggaagtcatttacgcagggtcaccttaaatcacattaaccactaagtggcactcattcttcagaactcagttcaactgttattttcagatgccccaggccagcacagtcgcccacttacaggctctcacagcaccttgtactactttatggacctcattacaattcttacaattgtaattaaagaagtaactgggaagatttgttttaatgtctttctcctctgctagcagataagctgccagaggaggttttcttgccctgggcggctcccatagttcatgtggagtgctttgcctgcagtggagactctggctgtgcttattggagggaggcctggggaggaacggggagggccgcaatactcagtctgtgaaatttggtgtctgatcctctgtccttcttcctcctcgtcctcatccctcttcctcacccttccccactcctcctctccccactgcagggggcttctggcttggtgtggaccaggagggggcagaaggcaccctgtcgtggctgggcaccgtcttcggcgtgctggctagcctctgtgtctcgctcaacgccatctacaccacgaaggtgctcccggcggtggacggcagcatctggcgcctgactttctacaacaacgtcaacgcctgcatcctcttcctgcccctgctcctgctgctcggggagcttcaggccctgcgtgactttgcccagctgggcagtgcccacttctgggggatgatgacgctgggcggcctgtttggctttgccatcggctacgtgacaggactgcagatcaagttcaccagtccgctgacccacaatgtgtcgggcacggccaaggcctgtgcccagacagtgctggccgtgctctactacgaggagaccaagagcttcctctggtggacgagcaacatgatggtgctgggcggctcctccgcctacacctgggtcaggggctgggagatgaagaagactccggaggagcccagccccaaagacagcgagaagagcgccatgggggtgtgagcaccacaggcaccctggatggcccggccccggggcccgtacacaggcggggccagcacagtagtgaaggcggtctcctggaccccagaagcgtgctgtggtgtggactgggtgctacttatagacccaatcagaatacggtggttgagaaggaaccagtgtttacaagtaatatcagaaagttgaaggaaccagtgtttacaagtaataccagaaagttgccaaacccttctctatcctctcgtatttctgagtttttgtccttcccgagggagcaccctagtgagagttgaaccccttccttctgcctccagggcctgtctgcctccacatcactctgaggacagggacaggcaacaaccttgaagggacagcaatggcaaagccacaaaggcttcactgtactcaggggagatggccctaccacagccacctggagagggttgggaagccttccgtctgcggtgggcaggcagcctcaccctgggcccacagaccggccttcctttggaggaaagtgtggcctggactgagggaggaaatgagcgagttccctctgacaccagcagatccccaggggctgctgggcagtggcctgggaatggggtggattgtgagaaagtgctcaccatctatacaccctgtatgtccagcttttgaacacaagggaaccatgcttctcttagaggttaagcagggtcattaacatcctcccccagtccctaacatcacattgtcctgcgtggctcctctggccctgagtggcacctgtccctctggtctcccagcacctggcccaggtaacagccttctgaaagcagagccaaggagctgcttctctcttctcccagttctacctccccagaagccttcctccccaggtggggctgatggagcaagggtccagactaggagccttccaccccagctgtgtctggcgcccctagatctctgcaagggaggtgttacagctggttctgagccgcttgccttgtgatggtaagacaccaacctttacattcttccctgaggttgtggctgacagagcctgcttggccccactgttagtccagcgagctcctatatcaaaatgccgtaggccgggtggcttacaaacaacagaaacgtattgctcacagtcctggggggctgggacgcccaagatcaagaggccagcagattcggactccgctgagggctgtttcccgatccatagatggtgccttctcgctgtatcctcaatggtagaagcacaaacaagcaagctccttcctgcctcttttataaggactccaaccctgttcatgagggttccgcccccatgacccaatcagctccaaaggccccacctcctaatactgtcaccttgggggtgagaattccaatgtgaatttgcagggggagtgggggacacacacaaatttcggggccataccacccttcaccacaccctcctgcgctcagggtggcttgcagtccctggcccttctggtgggcatttggtatgtcctttctcttggggtgatttctgatgtttttactctatatagtgaaaagctagggagagcgggtcttctcccccctccctctccagtcccctcacaatcccagatgggttctaatgcagctgctggggcctgatgccctgagttgtttgtgattcaataaagaatccataagatcctgtgtgtgtggcctgagggaagaggcagcagggctggagaggatttgtgaacagggcctgggggtggaggggaggttgggacctgtcagaggcagcagggctgaagaaggtttgtgaacagggccctggggtggaggggagctggggatctgtcaggaaggagggctcatccctgccttcaccaagcccacccaccagcaggcagcctttctaggagctggttctttctaaggataccaggctccttcctggaaggtaggtgaccagacttgaagtttcctattagtcgtaattgccatttactggatgcttgttgggggccataggctgtgctgagtgttgtacatccacccttgtgaagttgagaagttgtgaagttcatcttcacaactccccgtggccccttaggtgggagccgtcactgatctgttttttttacacatgaggacactgaggctcagagagggccccaggaaggaagaggcaggaggaggattcagagttctgtgccttcagagcttggtacttaactctaccccagcattctgagtccaatacccagcactgttttttgttttttttttttaacagagtcttgctgtgtcactcagggctggagtgcaatggcgcggtcttggcccactgcaacctccatctcccgggttcaagcgattctcctgtctcactctcccaattagctgggattacaggtgcctgccaacacaccaggctaatttttcacatttttagttgagacggggtttcgccacgtggaccaggctggtctcaaactcctgacctcaggtgatccacccacctcggcctcccaaagtgctgggattacaggaatgagtcaccgtacccagtctacccagcacttttctgagcacctgttatatgccaggcactgtggtaggttgtcttagtccacttattgttgctataagggaatatctgtggctgggtaatttataaattaaaaaagactcattggtcgggcacagtggctctagcctctaatcccagcactttggg

SEQ ID NO: 2719 - DNA, 6000 bp, Homo sapiens
gccttttcactctccgaataatgttttttgattaacagttcctaattttaacacagtccaactcatcaacattttctttaatggttagtgcttttcatgtctttttcaagaaatgtttgtcttcccccaaggttgcgaagatattctccaatacaatcttcttaaagctttatcgttttacccctcacattaagcatataatctatctggaattgatttgtatgttgtgagatggagtcaagtttcacttttttacaatggaatacctgattgacccattactttccccacttctttacggagacatctttgtcgtgaataaaatgtccagattcatgtggacctgtttctggattctcaattctgacttattagtctattgacctttccctaatttcatattgtacttttattataagtatcatcatccccattttacaaatgaggaaactaaggcacagagaggttaattagctcgcccaattaagtaatttgctagttaatgtcagatctggaaatggaacccagggagtttagttttacggtctgtgctctcaataagctttactgcttctcaagcttaacagttccaagaacaaacattttacgtcactacatcaaaataggcttttgcgtgaagccttgggaacaggcatgccacctctgcaccctggattggtcctggtgttccccgcccagccgcaaaccgaaccgccgctgtcccagtcctaccactagagggcgcggataacttaaactggccggggacttccctcccgccgcgcctggttaccttcagccaatcatcaaatatttacccaaagcgcagttcaaagccaaagtagaaagttgtctaatccagtctccatgcaggacattaacaaaaagagacaaaacaggactgatctatctgcgtaagtatcttcgggggagaaagacgccactcagttcctggctaattcatctcatccttaaagcaccttatcctaagtctctccaatctttcactcttcctagtgtaaactaggttgtttggcatcctcatgacaaccactctttggaggtactttttacaaggtgtacactagagtgcattattatgagatcaaaaattagcttttatttctctcgaagagacaatagtaccccattacatttcacttccttagcaatgtacaggtttctttggtctctgtccaatttctctgtgtcccttttaaagtgtaaaaacccaaagtggactttgcactctagtattctatctagtgtcagatttacttcccgattcttttttttttttttccgaagtctcacttcgtcactcagactgaagtctggtggcgtgatcttggttcactgtaatctccacctcccgggttcaagtaattctgctgcctcagcctcctgagtagctgggattacaggcacgcgccaccacacctggctactttttgtatttttagtagagacggggcttcaccatgttggccaatcaattcctgacctcaaatgatcctcctgcctcggcctcccaaagtgctgggattacaggcgtgagccaccgcacccaccctacttcccgattcttgaatgttacactgttaatatactgaagcaatatgcaattattcaatgaagtattaatagttcatctttatcaacttgacaacacaaaccacaaaaaaacacaaaagtaatgatgcagcaatatacaacatgcttaatattttaagttttaaaaaagctgggccgggtgcaatggctcatgcctataatcccagcactttgggagcccaaagagggaggatcgattgaggctaggagttgattgcttcaagaccagcctgggcaacatagcaagacccctgtttttaccaagaaaaaaatgttttttaaattagctgggcatggtagtgtgtgcctgtagtcctagctactcaggaggctgaggcaggaggatcccttgagcccaggagtttgaaaatgtattgaactagggtcacagcactgcactccagcttgggtgacagaacaagaccctgtctcaaaaaaaaaaaaaaaaaaaaaaagaacaggctggacacggtcggtggctcacacctgtaatcccagcactttgagaggccaaggcaggtggattgcctgaggtcaggagttcaagaccagcctgatcaatatggtgaaaccctgactctactaaaaatacaaaaattagcccagcgtggtggctgccacctatactcccagctacttgggaggctgatgcacgagaattgcttgagcccaggaggcagaggttgcagtgagctgagatcacgccactgcactccagcctgggtgacagagcaagactccatctcaaattaaaaaaaaaaaaacaaacaaaaaaaaaaaaaaaaacacaacccagggagcactgaacctctgctttgattaaagttttaaaacttaaatgtttgtggacaaagtctagaaggcaacatgaagataagaaataattgatttgttaggttttgggaactgaggttgattacttgttttttcattattggcaaaatttcaaggactttaaaaaaataagtaaaatattttatgtagtcagcaacttatggagcccacattacatgtaagacccagggctgagcattacaaggaagacaaaaccagacacaggtcctgctgttcagaataacagtagctgacacagtacaaatgcttactatatcctaagtgctattatcaccctattgcaaagattaagaaagtgaggaacagagaggttaactagcttatccaaggtcacagagaataaaagcagaactagaatttgaactcagcaactccaatgtgcaaagcctcaggtttaaccattacatcacactgcctctcatgatagcttaataagagagcgaggggaggggagggaagtgacttttgatcattcaacaaatgttttttgagcacctactatatgttaggtaccagagtaccagctgagaagacactgaaaagtaagacaagcacagtccctgcctcacagggttcacggaatacagatatagcattatgggaatttagaggagaaaaagggaagaggacccatctctgaggttaagggagaaccacctccttacactctgtttcattcctagcaaagcaccaaccttgtggagagaagagggcataggagagggggaacacaaaaccttaaaataaaagtaatgaaagattgcatcgatttattcagcaagaatttggaaaggaaattcaaaaataaggaaagggtcaggtaagcggactaggataaacctttaagagcctgccaatatgagactctagttcaatttttactcaaataatccttgagcgttaggtgccaagccctgagctagacttcagacatacaactgtatgtaaataagccacagcccctgctctccaggagtttatactctaatggggcagaaagacttttaagcaagaaatttcagtattgtgtgccaagacaagtgaccaaaaagaagcacagaataagatggggcactattcaggttgggatcagacagcaagaaggtgacatctatactgaacaatgatacagagcaaactggagttagaaacaaagatggaagagggagtgtgatctagactgctggaacagctcgtgaaaagccctggaaatgacagagaatgcctaggattgcagtgacactggtttagagagtggtgccaattaatgccactaaattgcagactaaattactaaatgctttcatcactctgtcccaggtccaggaagggttccaagcatgggctcaacctagggtcaagttgaaacagactgttttccacctgataaccccaaagctgcagcttgactaagccgtcttagcccaagagggttccacctggcgtcccagaagaatggggacagtgtcctccacatctctgaaccctacccggaatccagtacagtgctttgcacacactggatctactaaacagactaaaagaaaataaattcatctgatggcataattactatctcaattcaagtcccccacattcccagtccttactcccaaatcctctactgctgcatattagggcactccttccccgtccttagactctgccacttggaattaccaaggatcttcgcacaaagagaagtatagcttcgtggataaaagcagaaatttcgaaatcagaataatctgggtgaaatcctcttagcagctttatgatattgaataagtcactcaacctgcggcaccctccgttttcttcatctgtgaaacgaaaacaacagcagctttttcactggggttcgctaaatgaatgtaactgggctgagttgagaatagtaaatgagaccgtctacgtaaggagatgatcatgtctcttgccatataaagtgcacttaataaatggcagctgtagtagaatgatgtagatggtgatggtgacgatgttggtgataataggaaggtcagctgtcagtcttgcaagtcactggctgtagtcacagcaacccctaccagcccaggcagcttcttctagaagcaggccctgaacaggacgtgggtaagagatccgctgtcccttgagacttggcctactcccggcactccgcggacagccccagcctgcggacagccccagcctgcgtcacttgtccgcatgccagctccacccgggcggacccacacatggtaggaacgtgagggggcgggcctgttccggcgcctctgggccaatcgccaggtggaaggcactcagccaatggcagaggggctctggggccctgtgggcggggactaagggtggagttgcggcgtcataggtcactgggcgggctatgggcggggtccacgtcgcctaccggggcggagcgggggtggctggagcagtctggacagtcatggcggcgactgtggcgacggcggcagctgtggccccggcgccagcgcccggcacggacagcgcctcttcggtgcactggttccgcaaagggctgcgactccacgacaacccggcgttgctggcggccgtgcgcggggcgcgctgcgtgcgctgcgtttacattctcgacccgtggttcgcggcctcctcctcagtcgggatcaaccgatggaggtgaggggacccggggctgggtggcggggacgcagccaggaccctgaccctggggtgaccggcgaacagcacgatccccccaaccccgccacggctggaaggccagaggggagaagccgagaccggggaagtaattcgtcatggtcctaacgcgccggtgggccagggttcagcctctgacaaagcgcgttcgcactgttacccctttgagcctcacaactgcctgtggaacggagatcatgatccccgttgtacagatgagacccttgagccctggagacccaaagtcgacctgcccaaggacttgtagccagtgagtggcagaacaggggctcctggtctagggctcttacggtctactcagggaggggcggaagggagataacgtagtgtgagggcgggacgggtttttgctcgcattcttcaagagcccgttgctgggctcggggagatcactccgaagcctctggctcgtttgaatccgccctaccacccatcctggctaccctgcacccagaccgtcctgcctctaggggtgtcaagtgaccctggcttagcattaaataaggtcttctcccctatattataaataaagaagccaaaggcgtcttcaggtggagtcgctttatgttcaaagctccagagaatccaggggattctccaaaatgttttaagccctgctctggagctttgacctcgatagaaaaatttaaaagaatccaaagtgtcaccccgtcatcctcttgtcatgattttagaggacagtagagccattagagatgagacttttatgaactgttgtggtaaggttagggagcaggaaagccatgatatcaagggcccctctgatgaccccccagg

SEQ ID NO: 2720 - DNA, 6000 bp, Homo sapiens
gcgccaccacactccagcctaggtggcagagcgagactccgtctcagaacaaaacaaaacaaaaaaccaaaacaccaccaccaacaacaaaaactctgctcccccaatgcttggggaaactgacttgagtaataataaaactccggtatcctgcacagctggctctgcgtgaattactctttctctgttgcaattcccctgtcttgatgagttggctcaggcaaagtgaaccccttgggtcgttacaacagtactactgtctccatagaattagctttcctgagtgcatccaaaaatcttaattggtgaccaggcatggtagttcatgcctgtaatcaaagcaatttgggaagctgaggctagaggatggcttgagcccaggagttcaaggccagtctgggcaacatagtgagaccttgtctctataaaaccaaaaaccaaaaaccttggtgggcatagcatacttagtcttcaaatgtgtacctaccttgaagtattttacttgtttcacatatatttttattcagttcccagtaggttgtaaatcttttagaggcaaagtccatttcttacacttcaatatcccctgcaactgagcaccctgctgaaggacaggttggtcttagttggcatgttggttggtctgaataaggggagggggcgaacagtttgcttctgcaacacagctctgaaaacacagctctaggctagcaggggagaagctcccagcttgcccctttcccaggcaaaaccatttcttttttttaatttttaattttttattttttgagacagagtcttactctgtcgtccaggctggagtgcagtgatgtgatctcagcctttttgtgtttttttttcttttttttgagacggagtctcactctgtcacccaggctggagtgcagtggcgcgatctcggctcactgtaagctctgcctcccaagttcacgccattctcctgcctcagcctcccgagtagctgggactacaggcgcccgccaccacgcctggctaattttttttgtatttttagtagagacagggtttcaccgtgttagccaggatggtctcaatctcctgacctcgtgatctgcccgcctgggcctcccaaagtgctgggattacaggcgtgagccaccacgcctggccgtgatctcagcttactgcaacctctgccttcccggttcaagcgattctcatgcctcagcctcctgagtagctgggatgaccggcacgtgccccatgcctggctaatttttgtatttttaatagagaggggtttcaccatgttggccaggtgggtctcaaactcctggcctcaggtgatctgcccacctcggtctcctattgggattataggcgtgagccaccgcaaccggccttctaatttcccttttggagcattcattccgttgcaagagcttatttaatttttatttatttatttatttatttatttttgagacagagttttgctcttgttgcccaggctggagggctatcacgccatcttggctcaccgcaaccttcgcctcctgggtccaagtgattgtcctgcctcaggctcctgagtagctgggattacaggcatgtgccaccatgccctgctaattttgtattttcactagagatgggttttctccatgttggtcaggcaggtctcgaactcccgacctcaggtgatccggccgcctcggcctcccaaagtgctggaattacaggcgtgagccactgcgcctggccaatttttatttatttatttagaaacagggtaaacctctgtcatccgggctggagtgcagtggcacaattgtagctcactgcagtcccaaactcctgggcttaagcgatcctcctgccttggcctcccaagtagctgggactacaggcgtgtgctaccgcacctagctaagttgtgtattttctaattttttagacaggggtctcagtattgctgaggctgatctccaactcctgggctgaagcgatcctatcctcttgccctctcgaagtgctgagattaccagcatgagccaccacactggaccaagagttgattttggtaacatcttctgtccctatctgtctgaaaaatccttgagagtaggatctaccattaatgcattaaacaaattattattttttgtttgtttattttgagatggagtcttactctgtaacccaggctagagtgcagtggcgctatctcagctcactgaaacctctgcctcccaggttcaagtgattctcctgcctcagcctcctgaatagctgggattacaggtgcgtgccatgatgcccagctaattttttatatttatttatttttatttttatttttttgagttggagtcttgctctgtcgcctaggctggaatgctgtggcatgatcttggctcactgcagcctccctctcctcggttcaagcgattctcctacctcagcctcctgagtagctgggaccacaggcaagtgccaccacgccccagctaatttttgtatttttagtagagacggggtttcaccatgttggtcaggctagtctcgaactcctgacctcaagtgatctgcctgcttcatcctcccaaagcgctgggattacaggcatgagccactgcgcctgatggtatttttagtagagaaagggtttcaccatgttggcccggctggtcttgaactcctggcctcaagtgattcacctgccttaggctcccaaagtgctgggattacaggcttgagccaatgcgatggcctaccattaatgcatttttgtatatctcctcccacccccacaaactgtcaggcacggggcttagtgggtggaggaaaggcccagcaatgcctgagtaagcccaactcctgcctgcctcttcgcagaaactagggtgcatccaaactgtctcttctcaggctaggcaggacagcgcggcctcacctgtgaaccttcaagacttggactttggctgaagcgagggcgtaggagttctaagtaccgctggctgcacgccctctggcccatcacgtcccaggctgctcctaggtggacacccaacaggttaggcaagtcttagttaaaagcagtgagaggccaagaggctgggcatggtggctcacgcctataatcccagcattttgggaggccgaggcaggcagatcacaaggtcagaagatcgagaccatcctggccaacatggtgaaaccctgtctctactaaaatacaaaaaattagtcaggcgtggtggtgtgtgcctctagtcccagctgctccggagactgaggcaggggaatcgcttgaacccgggaggcggagattgcagtgagccgagattgtgccactgcactccggcctgggcaacagagtgagactccgtctcaaaaaaaaaaaaaaaaaaaaagcagtgaggaggctgggcacagtggctcacacctgtaatctcagcactttggcagaccgaggtggatggatgccaggagttctagaccagcctaggcaacttagggagactctgtctctacaaaaaatgcaaaaattagctgagtgttgcggcgcgcacctgtagtcccagctactcgggaggctgaggtgggaggatcgatgtccaggaagtccagcctgcattgagcccacatcctgccactgcactccagcctgggtgacagagagaggccctgtctcaaaaaaaaaaaaaaaaaaaagaaagagagaaagaaagaaagaaaaaataaaaacagccaacgaccaaacaaataaaagagcagtgagaaccagacacggtggctcatgcctgtaatcccagcactttgggaggcagaggcaggaggatcacttgagcccaggaggtccagaccaacgtgggaaacatagcaagaccttgtctctacaaaaataaaaataaaaaaattaggcttggggatacaggtctgcaagcctacttgggaggctgaggtgggaggatcagtgaaacttgaggtcaaggctgcagtgagctgtgattacatcactgcactccagcctgggtaacggaagagagacactgcctctaggaaaaaaaaaaaaaaaaaaaaaaaaaggcaaggagttccaatcattctcccttcacagagaagcagcttggattcgatgggactgtagtttctggaatccgactgcaaagctgaccgctggtagagcccagcttctaacttaggaaaggcactagctctctacaaagccgccactccccaactacaccctgtagggaccagccaatcccaaagcccgagcgggcgtcatcaccaattgcaaggcgggagacagagccttggctggcaccgggcctcctccccggacccgcagaggcctggcagcgccgcgtttgaggagggttcgtgtcaggaagtcaaggctggatgatcgcttaagcccaggagttaaagaccggcccggacaacaaagcgagaccccgtctctccagaaaaagaaaaaaagagagagagagagagaaattagccgggcgtggtggcgtacgcttgtagtcccatctacttaggaggctgaggtgggaggatcgcttgagcccaggaggtggaggctgcactgagctatgatcgccccactgccctccagagtgagcgacagagccagaccctgttgctaaaaaaaaaaaaaaaatccataaagccggggaccatctttgctccagggaggtcagctgacccgggctggcactggccctggcgcagttcccgcccctcccgggagcgctggcaccgccccttggcaccaccccctccccgcgcccccgccttccaggaaggggcggggtctccgagacgggtggggccggagctccaagctggtttgaacaagccctgggcatgtttggcgggaagttggcttagctcggctacctgtggccccgcagttttgtagtccccgccttgtttctccccagaggcctctcaatcctccctccatgatcttcgcatagagcacagtaccccttcacacggaggacgcgatggctcccaagaaacgcccagaaacccagaagacctccgagattgtattacgccccaggaacaagaggagcaggagtcccctggagctggagcccgaggccaagaagctctgtgcgaagggctccggtactgcctgtgcctgctgcttgaatatttccgccttttagggtgctcgcgcaggaggctgcagcgggggatgggtgctccgaggctcccgaggcccgcgcaggtcacgggtgcctccggctgtgcattctacctgcaggtcctttgacaccagagtgtttaggtttcaacacctctcccgctaggtaacaggaagcagatgagctccgtaacaacagacacacggacttgtcagattccttgttcgtatcagggttcttgcacagttaggacggcttcagagaatcctacctttcctggcgctgtgtgtgctggatttcatagtcacgcttgttagctgcacgtcctcggtggtcagttgtgagagcccccaattccttcctccttagaaagctcattctctgaggtttactggggcttgaacctggggctataaggagtttcgagacactcaaaaacgagctggggcttgttaatcaagtggtttttgtccatgagaagaaagaattggttgtcaagacgtcggacctatagtgattgggtcctcaaatacagtttggtgatcaggagttgttgctttattgctattctaatttcacttacctccccagaagtaacctagttaagagcatttccaggccttcctattccttcttttcctaaacggtgacttctgccatgctgccctaaaatctttttattgtgcattatatgtgatttataaaattgtgacccagtcccatctcgagttttgcagcccaaactgggaagagttctgcattgtactttatccttgtgtgtttctttggctggggtctcaggaaccctgcacgactgtatttactttcacttcagacttactgtttgtgg

SEQ ID NO: 2721 - DNA, 6000 bp, Homo sapiens
gcaagtctgtcagtaccatttttccaacaacatgtgttcactttgtgtctgtgtgtcaaattttggtaattcttacagtatttcaaacttcttcatgatttattgtgtccgttagtgatctttgatgttgctattgtaattgttgggcgggggggcaccatgaaatgtgcccataaaagttactgaatttatttgataaatgaaatgctgtgtgtgttctgaccactccacccaccagccgttccccatctctctccctctcagacttccctatttccttagacacaacaatattgaaactaggccagttaataaccgtattatggcctctcggtgtccaagtgaaagaaagtgtcccatgtctgttacttaaaatccaaagctagaaatgattgagcttagtgaagaaggcatgtgaaaagccaaataggccaaaagctaggcctcaacaccaaatattagtcaagttatgaaagcaaaggaaaattcttgaaggaaattaaaagtgctactccagtgaacgcacaaatgataagaaagcagaacatccttattgctgatatggagaaagtttcagtggtctggatagaatatcaaaccagccacaacattcttttaagccaaaccataatccagaccaagatcctaactcttgaattctgtgaaggctgagacaggtgaggaagctacaaaagaaaagtttgaagctagcagaggttggttcatgaggtttaaggaaagaagccatctccataacagaaaagtacaaggtgaagcagcagatgctgttgtagaagctgcagcaagttatccggaagacctagctaagatcattgacggtgggtacactcaacaacagattttcaatgtagacggaatagccttctattggaagaaagtgacatctggaacttgcacagctagagagaagtcaatgcctggtttccaagatgcaaagatcagagtgattcccttgttagggactaatgcagctggtgattttacattgaagccaaagctcatttagcattctgaaaattgtagggcccttaagaaggtggggctaaatctactctgcctgtgctctgtaaatagaacaacaaagtctggatgacaacacatctgtttacagcatggtttactgaatattttttaagccccccattaagaggtactgttcagaaaaatagattcctttcaaaatattacagtgcacctcattaccctaaagctcagatggagatgtttcatgcctgcaacatccaatcttcggcttatggatcaaggagtaattttgactttcaagtcttattacttaagaaatacattttataaagctatagctgccctggatagtggttcctttgatggatctggacaaagtaaattgaaaacctggaaaggattcaccattctacacgcccttaagaacatttgtgattcatgggaggaggttaaactatgaacataaagaggagtttggaagaaattgattccaacccttcagccctcatggatgactttgagggattgaggacttccatggagggagtaactgcagatgtggaggaaatggtaagagaattagaatccaaaggggagtctaaagatgggactgaattgctgcaatctcatgttaaaactttaatggatgaggagctcttagggatgaccaaagaaagtggtttcttgatggaatcttctactggtgaagatgccgtgaacattgttgaaatgataatgaaggatttagaatattacataaacttaattgataaagcaggtgcagaatttgagaggattgattccagttctgaaagttctactgtgggtaaaatgctatcaaacagcatccatcacagagaaatcttttgtcaaaggaagaatcaaatgatgtggcaaacttctttgttgtcttattttaagaaattgtcacagccacttcagccttcagcaaacaccacccttgtcagttagcagccatcgacatcaaggcaagaccctgctggtgggtcttggaaaaagatgacaactcactgaagtgtctgatggttgttagcatgttttagcaataaagtatttttgattaaggtatgtacattgtttactagacataatgttattacacacttaatagactacagtatagtgtaaacataacatttttttttgagatggagtcttgctctgtcgcctaggctggagtgcagtggcacgatcttggctcaatgcaacctccacctcccaggttctagcacaggtgggcaccatcacacccggctaatttttgtatttttagtagagacggggtttccccatgttggccaggctggtcttgaattcctgaactcaagcgatccacctgcctcggcctcccaaagtgctgggattacaggcatgaaccaccatgcctggccaacataacttttatatgtagtgagaaaccaaaaaaatttgtgtgccttgccttattgcaatatttgctttattggtagcctggagctgaaccagcgatgtccctgagatatgtctgtacataaaccagtaacgtactgtacctaattatgttatactttttttttttttgagattgagtcttgctctgtcacccaggctggagtgcaatggcatggtcttggctcactgcaacctccgcctcctgggttcaagtgattctcctgcctcagcctcccgagtagctgggacttcaggcgtgtgccaccacatctggctaatttttttttttttgtacttgtatttgtagtagagatgaggtttcactatgttggccaggctgatctcaaactcctgacctcgtgatctgcccacctcggcctcccaaagtgctgggattacaggcgtgagccaccgcgcctagctatattatacttttatacaactggcagtgtagtagatttgtttatacctgtatccccacaaacgtgaataatgcattgcattgtgacatgatgatggttatgacatcacttggtgataggaatttttcagctccactgtaatcttatgggaccagtgtttgtgtggtccgtcgctgacatgtcattatgtgacacatgactctatggcatcctgaactgcagaagggagtaggggcctaaggcttctagggggtggtggtgacacaagttatgtggggggatggggaggaagtgcactacagagtctctcaggtaataaaagttgtctcagagcagaccttagataaataatgcatgacagtctgtgacaaagactggcatctagtcttctctcttgtgagaccagttcattttccctggttgagattcccaggaaggggattcatgatgttcctttcagatgacctgcccttagagaaagaggggcaagagacaggagggcaggacatggtcagagagaccttggttcaaagccctcagcgtgccaaaccaccatactttggggtattgttttctgagatccaatattacttaacctctcagaaaagtgggaatggtaactatagactcagtggggttgttgaggtttagatgaaaatacatacaggtgctccttgatatacgatggagccacatcctgataagtgcatcataagctgaaaatattgcaagttgaaccatggtaaatcggggaccgtctgtgaatacataggtcagaacggtgtctggcacgtagtcaggatttgcagttgttctcactcagcattgggtcttagtctgtggtgggatagagcagtgaataaaacagacccgatttgggcactgatgtaatttatagtcaggttagtaaggcagatgtagattaatttcacatgtacacatttaattgcaattataagtgctagagaagaaaagcatgagatgctgagagaatgggtaacagggtttctaacctaacagttatgtggccctgggtacgtgactttccctttcagatcttgaactccttcatctagaaaatgggaatattggcacagctttgcagggtgtgacagctggtgttgtggagatggcatgctaatatgctggtaacagggtgcctgatgctcacttaagatgctacatgaatgggagctactgctgtgtgtgttgatgaaattctcgtcctcattagcaggttgtgagcaggatacaagatatttcttcttgccccgtattctcctgagccctgctcagtgtgtttgtataacaaaggtgtccatcctaacaatatggctcaccggttttcaccctgtactgtacctggtgttttgatttagaaccgagttaggtagctgaaaatacagcgtgagctttttaatggggagttggttgactccaggtgtgatcctaaatctagaaggaatttggccagatgttcatgaatttctggagtcccatgaggaatgttgcccagcctcatctgcctcttatctggtcctgctctgtgttaggggcctgagtgccctggggttggaacactatgagctagaaaatgctgatggactgttccacttacgagcaagtagtgagcactaggcataaacaagctgagctctgaggtttttcaactaaacctagccgaactgcagttgcccagaaagctcaggtgagaagggggggctggcattgctttattcattcatcccaccagtgaaaaatgccaggcactgagggaggcactgggggtagtgtgcaggtcagcctagggaaaacaaacaggagcctgcggtgtgataaatactaattagagaaggcctggttgtttgggaatctgttattagggatcagtgttcagactaaaggaggaaaagccttctcacagttgcctcttatctttctcctcagagcatagcggcctgaccacaggggtggccttcgggcatcacgccaagttcatcgcttcaacaggcatggacagaagcctcaagttctacagcctgtaggccctggcccttctgatggaagctgggcctcatctcagtagaggggtagaattagggtttgggggggggggtggggggaatctatggggggagggggctctgtggggtgggacattcacatcatttcactctggtctgagtggtggcctgagaaccatggtggcatggaccaccctcatccatgcaactccaggccccatgggaacggatgtggaaggaagaactgtcaccctcttaaggcccagggtcggagcccagggcctctcccttcctgtcgttcaatggacgtggtggtggctgttccacacccattttgttgcagttcctgtgagacaggagaggctgagccaagggaactgtgaaggggatgggcaggagggcttgtgcagggttttgtaagcagtgatctagtttcattaaaaaaagaaaacaataaccataaccacctccccgtgtctgtctgcaccaggagcacctgggactgggaaggtcaaggggagggagcacacactgggacactggcttccgggaagcccatcttcctttcctttcacagctcttaccctttttttttttttttaattgcacagcagaaataaaaacaaatctgcagatgaaatttgccatgtccctgcggttcttgaccttgtgtctaaaggcctcaagtcactagtcctgccacttgccttgtagacttggtttcctacacaagcctggaagggagggagacctgcagggaagattagctggatcttgctggtggggaggtctgagcatctccatcagggttctttagttgtaggctttctagcctgtcctcagctggcataagtcaaaaaggagatttttttattgactctggcgattgaaaagctgtggtaggactggtttcgggacaaagatctgataatgaatgtgccttatagggaattcctgtagggtcacgtgactgctttagattgcaggtcaggaaaggcctctgaagtggtggtgatgaagctgaagctggaatgagagggacctgagaggggaggagtgttggcaggcagagagcaggttctagggctggactgagc

SEQ ID NO: 2722 - DNA, 6000 bp, Homo sapiens
tgctactgaagatacctgggaaattaagcttcttttgggtctttggccaatgtgtccccatgctccccaggcagcaacagcagctttggtctgggaggaacaaggcatagagttccttcctcagggacccaccagcaccaatgcatatatctcttttcccttaactctccctgtttctctgaaaccaagtgccctgaattttttctattccctgtgggctggcttatgaaacggaaaagccttgacaggacttcctttttcctgcatcctgctatcatagccataaactccccagtagagggacacctctggttttgctcattgtgatactaccaacacctagtatcgtgccgggctgacacgctatgggtactcaataaagattggttcaacaattaattactgagtctccctccttctagtctgtcccactccaacccatccagtaagtgtcttccagaggaaacttctgaaagtatggttatcactccatagctcaaatgcaaacacatgctgttgtgctgccagcccaatcaccacccaagttttaccaccttgggttcaaggcctctcctaaacggatccattttatttccaaccacacatccaagtacagtagttgagatgactggcctgtcaggcaacctgtcttccaaccaacaatcatcataaagttcctgctatgtgccaggcacaatgtggcactcttacactcttgagagcaagagtaaccagaacaattatggttcctgccatcatgaagtttacagtctagtgaagaacccagacatcagatacttataaatagataattaaatgattacagttctttgaagtggtttggaggacaatcacagtttgctgtatggactaaatttaaaccagggaccatgaaaagggctccagaggaagtgacatttaaggtgagactgaagtttacattggagggtttgagacaggagggggaagagggaggggggagaggacagtgatccaggcagaagttctgaaaccagccagcgcgggtatgtttgaggaactgaaaggccaatgtggctggaaagaagataaagtgagactgtgatggtcagcatgggccagatggtgcaagacttacgggcaagtttcctcagccagaaactctctccctcattcatggcctcaggaatgacccctggttggggctcagagaatgataccccaaagtatggtgctttagtattgtttctgagcaaataggctcactgcctgatgcacatagaagccaatactatggtaccagcttttgagaacagaaaggctttattgcagggccacccagcaaggagactggaggcatggctcacatctgtctcctaatttggggtctggggcaagatttaaggggtcagagggtgatatggtttggctgtgtccccacccaaatctcatcttgaattctcacatgttgtgggagggacccagtgggagataattgaatcataggggcaggtctttcttgtgctgttcttgtgatagtgaataagtctcatgaggtctgatggttttgagaaacaggagtttccctgtacaagctctttgtttttgcctgctgccatccatgtaagatgtgacttgctcctccttgccttctgccatgattgtgaggtttccccagccacgtggaactgtaagtccaattaaacctcttttgtaaattgtccagtctcaggtatgtctttgtcagcagcgtgaaaacagactaatacagatggcaaggaaacgtattaggaattttggcttggcagggtctgattggagggtgtcaaatttgactacacgggtatgttgaggtggattttacccctggatctttctggtcaacagaccctttgctcctgaaagagttccagcatttaggttccgatcatgtctaggtcttcttggtaccacagggaggaatcattggttctgggtgttgttagatgtcaaagcattttctattgggcatgccctactgacatgacttggagttttggctctgtcatacctacaagagaacatgacattctgttatcaaaagagtaggcccagtttggattggtcctgaggttacagcatgctgagcacttttgaatgaaaagaaatgggaaggtcttagaagctgccttagaaccaaggactttctaaccttctcttgccccctgacccccaccctaagtacagggagaagctctctctagaagttcccttatctgactgagaaaatttctttcagaagaaatgcaattgtctcaaatctccctccacaggaaactcatcaaataaccaggaaagattaaccactggagaagaataaaaactaaaagtcaccaactcaccactacacctagagagacttttaatctattcttctgatgggagctctaacagattacctgagagaccttatgtgcataataagacaacctttgttcacaatggagttctgcccctcaccttcccacaatttgttgccacctcctccagagctcataagaactttgtcccaaggcattgtttgttcttggggctcattcatttcccctaaaaattatttgctagccctccctaaaaattatttgctagccctcaaaattgcctacatttcccccatctccgtctttcctgggtgccatttaagtaagcatcagccacctgttccttctttgagcctcatattttgtattactcctgtgcacactcacacactaatacacttgtatgccttttctcctgttattctgtcgattgtcagttaatttcagcaaatctttagagggcagaggggaaacttttttgctccataccctcattcagttctcagcaaaaaaatcagctcctcagtgatgcactctctaagtgccctgcctcaagtagccgttcctccaatccccagcacctctgtctaccttgctctgatttgttgtattcatagcacttactactctggaattttcttcttaagtgttgattgtctctgtgctcccaccacccacagtagagtgtaagctccaagacagcagaaactgtgtctttcttgttgaccttttctatctccagtttttacaatagggcttggcacataggaagcacccaatcaatatttgttggatgaatgaaatgcctggggaataacatgaatagatatttcgttcaaagtggatcactgtctgctctgtggaaagtagattaggaggaggaggccaggctggaagcaaggaacaagtgggaagttactttgttggtgcaagacagagatgagatgcccttttgcatattaactcttcataagagttcagtgagttagttctacccttgtcatcactccctctgttttacagatgaggaaactaaggcatagagaagttcatactgccaatcacctgagtggtgctaggatttgagcacacagtctgacttcagagtccatgctcttggccactatgccatattgccttttgtacctgtaacttttatttttctctccaagcttttgcttacgttgtttcttcttccggaatgcctttcgttctccttctcctctgaatactgcccacctgtcaaagtccctctcactcacatcctgttcatcctgcccttttgtcttgataccttacagtccacaccacgtcttttgcatgattcctgagagtatcttatcttacagatatccacaaagaatcatacactatctgagctggaagagaaatagaaaatacaaaatccaaaatacaaaataaagaaatttataggaggccattggtttggactgagctcttctgctaggcctaacagaccaagctaaaaagagttagtcctgctgaagctccacgccaataagctgaaacgaagatctttacgaccttctgagtgtgtatgtgtgtgtgtgtgtgtgtgtgtgtgtgtgtgtgtgtaggggggagctaaattcccaaacaggcaagttttaggtggcatgataagtcccctccactttaacctttacaagaaaagtaattttgaaattaccaaatgaccaatccgctttttgttctctgttcctgttttcctcagtccttttctgtctataaaaccaagttctcctgttcagctcattggaacaaccattatattttatagtatgaggcactgcccaattctatagaatcgcaccttaagtcccagctactccggaggctgaggcagaaggatcacttgaggccaggagttccaggatgcacctgtgatagccatgattgctatgaccgcacctgtgaatagccactgccttccagcctgggcaacattgccagagtccgtctcttaagaaaaaaaaaatctttgaactaagtttgttgtgattttgtcttttgacaaagaagaaagggcaatgtgaattgccccaaatcacagagcgaaatggtagtagtcaggaccaaaacactttcttagccgttttcttagttcttgtacccatctgtttctgtattttcttcaccaggccatccagcagtgtctcttaaagggtagcccgagaaacaactgacttagaaaagcgtggggcacagtctgtctacgcagacccgaggaatctgcattttaacaaactcactgggaaattctcgcgcacgccaaggtttcaaagaccagggtcccgtggcacagtgccgcacagttgtcaaaacaagtgctgtccaattgttttggttttaaattctcactgcgtcatgggaaatgtagtttcgagcctcctctctcccgacgccccagccaatcctccggcgctttacggaacgagccgagtcaatccggaaataaccgagtgttcgtggcgggccctttcctgcccggctgcattctgggaaagggcaatttccgttaggtgctgaaggctgtggcgcgcggctgtccccattcccacgtgaagcgctacgctagcatcgctcggctggcggctcccagctcgccgcggagcagtcccggcagcagcgggggaccggaagtggctcgcggaggctcagaagctagtcccggagcccggcgtgtggcgcctcggagcacggtgacggcgccatgtccctaatctgctccagtgagtgttggctgcggccaagcgcgggtctcaggaggccagagagcggcgcgggagcgtgtgcggtccgctgcggcgcccgggccggggtggaggcgggaatggggcgctccggaggccgagcggcggcctgtcagcaccggagccccccccgtcggagcggggtgcatttgcgcagtgccccgcagtttacatagtgcctgaggtttattgtcgcagacattactgaggccggtcgcctcattctacagagtggaaacaggtctggacagagagagctggtgcaagggaagcagccttaatgtaggagtcagaaaactcgaggtcttgtccagggtccgcctcccattggctttatgaattggctcaaggctctgggcctcggtttccccatctgcaaaatcgagagcattgcagtggatgttttgcgaggcctcgctcggatagtcggagcttttgcaatttgcaaaggtcacatgatgagttagaggtagaggcaaggctggcagccaggtatctggctcccagccttacactgtatgactaataaaaacagcgcacatttataagcccttattggtttacaacgcgcttccaagtctatgatctcattttatcctcacaagaattccctaaaggagaaataaagatcctggttttgcagatgaggatgcaaggcgcaggaagagcggggcttatctaaggatgcgtagctagtcagtggcagagctgggtgacgtagttaggtgacacggatcttggaccctgaatccatgcttttttcataccttccactatctttccctttgatattttatcatgacgtacagacattttcctttcccttttcgttgtttcatcagattactcgtttcccctcccttttgctattcacttccttctcttct

SEQ ID NO: 2723 - DNA, 6000 bp, Homo sapiens
acagtcctgagaaatgcacattaacaccaaacagcagtactctactagatgaccaaaatccagaagtttgaccacacattatgttggtcgggctgtgagaaaataaacatgcttgtgcatcctctatagaagggaattgggcaatatcaaagacagcagttagcgatttacttagtagtcccagttctgagcctctacctgacctttatatgtataaagtgacataaaaatacaagcttatttcttgtggcattgtatgttatagcaaaatactgaataaatataatgagaagggatttgttaatctgcataatttaataattatagataaatgatttacacaattaaatactgtgttctgataagggcttcaagcatatattgttcaatgaaagaacaaggtgccaaatagtgcatgatagactattttatatttgcatttgtttgtaatactctatttccttaaagtaaaaaaaattaagcttagtgttgcatagtgggcctgtagtccttactgttcaggaggctgaggtgggaggatcacttgagcccaggagatcgaggccagactggagcaacatagcaagatcctcccacaccccatctctttaccagaaggctaaacaagatgcctttattgattacttgtttgggggatgggttggagggaggtatgggaatgagacttttctgtgtacttttaaaaaataaatttaggctgggtacagtggctcacacctgtaatcccagtactttgggagaccgagtgggcagatcatgaggtcaggagatcgagaccatcctggctaacacggtgaaatcctgtctctactaaaaatagaaaaaattagccaggcgtggtgacacgcacctgtagtcccagctactcaggaggctgaggcaggagaatcgcttgaacccgggaggcggaggttgtagtgagccgagatcgtgccattgcaccccagtctgggtgacagagcaagactccgtctcaaataaataagtaaataaataaataaataaatttagactttgggtcatggaaatgtatatccaatcccaaatttaaaataggctcaaaacagctttaaaattatctaacttttggcccggcgtggtggctcacgcctgtaatcccagcactttgggaggccaaggtggcggatcacgaggtcaggagatcgagaccatcctggctaacatggtgaaaccctgtctctactaaaaatacaaaaaattagccaggtgtggtggcgggcacctgccttcccagctactcgggaggctgaggcaggagaatggtgtgaacccgggaggtggagcttgcagtgagctgagatcgggccactgcactccagcctggtgacagagcgagactccgtctcaaaaaaaacaagcaaacaaacaaaacaaaactatttaactttttagagccttaaaaccaagaaggagcagagagggggttccagctcaggactccatgttccagcccttccagtggtgtcaggctgccatgtctatatatatatatatatatatatatatatatatatatatatatatatatatatctatcctttttttttttttttttttttgagacaggatcttgctgtgtcacccaggctggagtgcaatgacatgatcatagctgcagcctctttctcctaatcttaagcaatccccccacctcagcctcccatgtagctgggactatagttttgtgccaccacacctagcaagttcttttgtatttttagcagggacaaggtctctccattttgcccaggctggtctagaactcctggttccaagcagtcctcctgcctctgccttcccaagtgttgagattataggcatgagccactgcccctggcctgccctgtccgtagatatgcatgctaagtgttggtctgtcctatgcatctgaatccttggtccttgttccaggattatggccactgcggtctgaccctaatcgtgagactgatgacactttggtgctctcttttgtgggccagacaaggtaaggatgggtctagtgccagctgtaggtgctggtgagaaggttgtgaggtggggaagctggtcccaggctgacccaggccctccattctgctgcagagttctcatgttaaatggagaggaggtagaagaaaccgaactgatgggtttcgtggatgatcagcagactttcttctgtggcaacgtggctcatcagcagcttatccaggtgataactgagaaaggggcaggtgttaccatatacttgaattgacctagatgcagtacagagcaccactggattttaaaacaaccaatttttatggctccaaaaataatgtaaaaattctagggaaaaaattacagataatccactactcagagatcacaactcttaaccttagagttgctccttttagctttatttttcttctgcaaatgtctgtgtatttatttacattttcttttatagactcgggtcattatatatataaacataaaaatatagtttcggatcctattttagcactaattatatcttccgagacactcaaattttttccctttgttaaactagtgatacatccttatttataaaattagaaaatgccaaaatgcacaaaaaaagaaaaaatcatgatgctaccatccaatatgactcttggcagccctttccacatactaattataaccgaagcttaccctattctgatccttactttcaatctatctgcaatacgggggcagatagccttctggcatattgttatccacgagagcctcatttctgacacccttccacccctcagcaattttttgaagtttggagtgaccctgacatccttcagcttttagcactctctccttaccttctgagctgttcttcactctgtggccagagtctgtcttgcctttggtgggtagggcactggagtgcctaaggattaatgaactgtctctgtctttttatccacctggttttccttttagccacctggcagtggtagattggtaaaaccggagggaaagttctgtcagtttgcagaccaagtgtgggacgtgcccagatactgagtcattgctttgtcagtgttatctaactattggcctgaagactggcaccagctcacctatttattattaaagagctttcatccttatatataaactcaattgtgctaggtaagatgaatgaatagataacagtgtcaccaacctacttcctgttttatttcagtgataaatttatacaatatatttctatacaattttgtaatctttactaaggaactttaaataatttaaatggctcatacacagtaaagaacttagatattttagaggtctgatttgggggttgagaaaaactgctaagactggtggtcacagtcaacatggtggctcacgcctgtaatcccagcactttgggaggccaaggcaggtggatcatgaggtcaggagttcaagatcagcctggccaacatggtgaaaccccatctctactcaaaaaacaaaagttaaccaggcatggtggcatgcgcctgtaatcgcagctacttgggaggctgaggcaggagaatggcttgaacctgggaggcgtaggttgtggtgagctgagattgcaccactgcactccagcctgggcaacagagagagactctgtcccaaaaaaaaaaaaaaaaaaaaaaaagccaaaaaactggtggtcacagggtcttactctattcatatcttcccacaggatgcagtttgtattacccaagtaagtctcaattagaatgaaataggccttttccccaccagctgtaggtttgtaagctgtaagctacttttaagctggcctccttcaggcattcatgcaaaaatgacatctattgtaatcattagcaggactttggggaataagaaatagaagcctcatgtagcttattcgtagggctctattagggctgcatttaccacctttccactcctgtgtggaccctggcagatgcttggagacatttgttcatctgctgtttatctagatcacttcagcatcggtgaggttggtctctcaagaacccaaagctctggtcagtgaatggaaggagcctcaggccaagaacatcagtgtggcctcctgcaatagcagccaggtggtggtggctgtaggcagggccctctactatctgcagatccatcctcaggagctccggcagatcaggtgtgtgtgtttttctgtctgctcgctttcctcctcttttctctaggacttctttgagccttggattccttcctctgccatattcttctttgttcagccacacagagatggaacatgaagtggcttgcttggacatcaccccattaggagacagcaatggactgtcccctctttgtgccattggcctctggacggacatctcggctcgtatcttgaagttgccctcttttgaactactgcacaaggagatgctgggtggaggtatgtgtcatttagggacctgggttgggacagagtcaaaatgtggaacaagaacataatgtccccctttctcacagagatcattcctcgctccatcctgatgaccacctttgagagtagccattacctcctttgtgccttgggagatggagcgcttttctactttgggctcaacattgagacaggtgagagtagtattttgagtgagggactctttcaaaaatagagtattagaattacacagaattcttagtcccagggttctgcttttgaactttcacaggccagctttttgtcctgttttctttcttcctttctcctgatgtcattctctctgtaggtctgttgagcgaccgtaagaaggtgactttgggcacccagcccaccgtattgaggacttttcgttctctttctaccaccaacgtctttgcttgttctgaccgccccactgtcatctatagcagcaaccacaaattggtcttctcaaatgtcaacctcaaggaagtgaactacatgtgtcccctcaattcagatggctatcctgacaggtgagtctctttttccttatttaatgagagctattgattgagggggtcatgatgttttcctcaaacccttacctcaaagcctttttccggtgtcaaaatcataactgagatgggaagtatagtgcagaggttctcaaaactggctacccaatagaaacacttgggaagttttttaaaactacaggatttttggaatcctcagtgggtctgaggttgagctctggaatctgtattttcagaaaacttatcaggtgattcagatgactgtttcataatccctaatttagagatcattttgtgtccctctagagcaggaattctcaaagggtgtccccaaccagcagctacagcattacttgggaacttgttagaaatgcagattctctggctgggcatggtggctcacacctgtagtcccggcactttgggaggccgaggcaggaggatcatttgaagtcaggagtttgagaccagcctggccaacatggtgaaaccttgtctctaataaaaatacaaaaattagccaggtatggtggtgtgtgcctgtaatcccagctacttgggaggctgaggcaggagattcccttgaaattggaaggttgctgggtgcagtggctcatgcctgtaatcctagctctttgggaggctgaggtgggtggatcaccggaggtcaggagctcgagaccagtctggccgacatggcgaaaccccatctctactaaaaatacaaaagttagccgggtgtggtggcaggcacctgtaatcccagctactcaggaggctgaggcaggagaatcacttgaacccaggaggcagagttttcagtgagccaagatcccaccattgcgctccagcctggtgacaagaaaaaaaactgtcttaaaaaaaaagaaactgggaggtggaggttgcagtgagcttagatttcaccgctgcactccagcctgaataacagagctgagactctgtctcaaaaaa

SEQ ID NO: 2724 - DNA, 6000 bp, Homo sapiens
tggccctgcaggagctgcaggttggggttgcaggccaccaggccagcaagagcgtcatcagcacagccagccaccgagttcaccagcttcttggaggtctgcaagggaggagtgagaaggaggtcagaatgtggtcagtacagatacccccatcctgcgcagccacactgctgtggtgtagacccctctcccgcatccacctaggaactccaggagcacaggacttccttgagttgggcgacatcttaggtgggtatttctgtgagttttcagtaatgtgtgactttctattcagtacctaatttatgaagtgtcttgcaccataccttcaatttattctgaaaaaatggctgcaatacaaagaaaatgggggagtggttgcctgcagtgtaaaatattttaataaaactggggcccaacaccttcttctgtcaaaaggaagaaaagcctcaggctgaggctcctatgctgggggaggagctgagcaggttccacagccaccgctgctccctggtgctccaacgcggggcaaacatttccccagcctcttggtatgccaggcccagcactagacactatgtgtagagataacagctcaggtgcagtggctcatgcctgtaatcccagcactttgggaggctgaggcaggcagatcgcctgagtccaagactttgagaccggcctgggcaacatgatgagactccatctctacaaaaaatatgaaaaatgatccaggcatggtggtgcatgcctggagtcccactagtcggaaggctgaggtgggaggatcacttgaacctgggaggtcatggctgcagtaagctgtcatcgtgccactgcactccagcctaggtgacagagtgagactccatctcggaaataaaaaaagagataacaatgctgttcctgccctcagtggaaacacagcagaggtcacagccatgtgtagtgggcactgctacacgaggagcgcacgtgcaccatgggagcatagaggaggggccgcagcctcccgaggggcctggaggtctctgggaaggataagcaggaccggggtagggaaaaagggggcaggagacatgggaggagggaaaagggaggctcttccagccagagggggagcataagccaaggcctggatgagtgaatagtgtggtggtgccaggaagcacgggtgaccagcaggaaggggtggggaggagaggactggccacaggcagcctcaggaggggttgtggacaggctggtggagggttacagagcagtgccgccaggcttggctgagtggatacagggtgcagacagaagtgagtagcgtgggggccagaatggagtgtggcttgagctctgctgttacagggacttgggttcaaatcccacttctgcctctcattagctgcaggaactcagggaagatacatcattgtcgggagctaaaattcttcctctgtaaaatagggatttactagaacagagtatatgcccatgatatagtggaaactcaatcaaatgaagctactccctttttcaaacaggctgtgaaaagccagagtctgctgaacaagggctgcagcccctggctttgtcctgaagacagagtgagactggggcccaacgtggactcagagggctgggctcccaccgccacctggtggcccggtgggaacctgcagctgagccaggtcctggcaaggtgaacttccggctgtggcttcttcctgagcttgctagcaccagctcctttgtacaaaatttggctctgctgcctccctgccaacctgtcctgcatccagccagggccagggctaagccacctgcttcagagtagcctaggtctgtagggagcaagaagaacaataagattggttccatttgctgagcagtgactaagagccaggcccagttctaagtgtttttgagcatgtctcatttaatcttcccaacaggccgggtgtggtagctcatgcctataatcccagaactttgggaggccaaggcgggtggatcacctgaggttgggagttcgagactagcctgatcaacatggagaaaccccatttctactaaaaatacaaaattagctgggcgtggtggcacatgcctgtaattccagctactcgggaggctgaggcaggagaattgcttgaacctgggaggcggaggttgtggtgagccgagattgcgccattgcactccagcctgggcaaaaagagcaaaactccgtctcaaaaaaaaaaacccaaactaaaacaaaacaaaacttcccaacagccctatggaggaaagatgagcccagtgaggaaactgaggcacagttaaactattttgcccaaggtcacacagccagcaggtgtccaggtctgcctggctccaaagctggttcccttttggccatatcatgctgctttctcgaggggctggagggaagtggagggtgacagaggttgccctagaaaggacatgggtttgtggctctcagagcctaccagggactggaacacacaatgaagttgtgagttggcctcactccaagcccagcctccagcagcactaccctccaagaaagtggcctgctccccatcatgataatctgtcttttacagagccagaagagggtttagggaccagtgctatccctggtttcagtggcctgaaaggatggaaaaggaaaggaagtcaagtgaggcctccaggactctgcttgatcaacaccacacaaccactggaggtaggccttaatttgccttataatgcagatgaagaaaaagaggcgcagagaggtctgtaaaaggtcatgcagctggtcagtggcaggctgaaatttgaatccagatatgttcaaggcttgttttggttcaaatcagtgggcctggagcaaagcccagggacatggccagcctcccacactgtagatcccagctccagaccggcccacataagccccaaggttaggaacggtcacatggtcattcttcacgattccttctgtgaccggtacaatgtctattacagagcaggtaactgttactgttttactctgaatgcaagacccagataaggggcagagtggctctgaagggactcaagaggctgcagccccaggcctggctgggaccagcagcctccaggaaacaaagaaaagcagggatcagaccctgggagagaggatgaccctctctcttcacccgtgagcctcaggaggcaatagcatctctcagtcaaagtgtaaggagctttagcttgcccaaggctgggatcctgctttgagaccatgctgccattcccgtcccggccctgtatgactcaccatggtgtggaggctctgaaacaggctgagttcacaccgttgcactgagctgctggaggatggacaatcctgtgctacctgggtctgagtacagtggaggcagcagcagcacctgcaggagtgggtaacgatacaagctgcggaaggaactcgcagtcgactggcacaatcacgccttcagcaccctagtaattagggagctgccccagacttcggtccaagtccaaactctagtacatgggctacggatggagaagagtgtggggctgaccaaggttcatgcctgcacttcactgccagaagacagatcaatccatgtcaagcacaggtctgcctttatgtccaggaacagcacccacttcatcactaaaggacagtgatcctcagaataactatcttttacacgggcatcacatgcagcgaaaaagttaacaaagctcgtcacacgcttgccctcactggccttggcaccaaaagggaagggaatggggggagctagccaggtttgtgacccattttacttctgggaaacagactcagagagctctagggacttgtccaaggtaatacaggtaacagccagaatctaaaccaatgtctagtttttctacagagtgtgtttttactactgataattcagtgcctccaaagtcaggcagagtctctgctatgggaaaggcaagatgtaaaccacgatgactttctagcttttcctcagttcagcctggttcagcagcgtgttggcctctgtgtgggtgcacaataggaagaatcaacatagctctgcctcagcctacttggggttgtggggagggtcttaggtaaaccaattcctccctaagcctcagcttcctcatctgtaaaatgggggttggctcctctctggcattctgcgagtgtgccaagccacgtggtattcctcttgttcccggggagcctgtttgatgtggggtaccctggaggctgcagggctgacggctctcctggctcattaaggttccctacggagaaatactggttttgtgtttgaggttcgaatttgtagagcaataggggcactaataacgttgggcaagcagaccggtgggccctttgaagtctgaagaatcaacgcgcaaaagggaggaggtgagcaggtggtcgttcaaacgtcaggcgagggcaccagctggatctggaggaactgagacagtgaaaggaaagcaggcaaggttctagtctgggatatgcacgaatcgcggtctcccttccctctctatgcctccgcagtccttcccgttcccaaaggaggaacagcccgagggctcctggagcaacggaaggaggactggatgcggggaagggcaaagggcgcggaacggggtggggagtctgcgggcgagctcggaggacactggcgcacctcccccgccggctcacggccgcatccgccacatccgaaggcgccgcgacttcccggagaccccgaagcgtgcgctctcatccgggtcctgcgggcgctggcggaaagaggcgaggcggtgcctccgggggcggggcctccttcggttggcggcctcgggcttcgggagtcctccaagaggccaggtgaggccgtcccgtgatgccccgcgccccggccgctctggcctgcaacgtgtctctggggcggaggcagcggcagtggagttcgctgcgcgctgttgggggccacctgtcttttcgcttgtgtccctctttctagtgtcgcgctcgagtcccgacgggccgctccaagcctcgacatgtcgtacaactacgtggtaacggcccagaagcccaccgccgtgaacggctgcgtgaccggtgaggctgccggggccggagaccccggcgagtgagggagttggggggagccgcggcctagggaggcccgccgccccgggggcggccgggcaggagtgggcccggcgaatggaaggcgctggcggccgaggaacctcccccagcaccgcgacctcgaaagagtcgtccctgtacgcgctttttgggggttggaagccgctctcgagggtcccctttcgtcctggggaggtcattcggcctcgagaacagggcgggcccagtgagacagaggagtgtgagttggttgtgcggtgtcgtttgggcccggagattggctttctgtggccaggaaaaggggaggtggtaatgacgactttggggtcaagattttcctgtggggaagtctggggggcccaggaggtggagggatgtgaggaatgcccgcattatcccacagagggagaggagccctcttcaggctaacccctttgcctggggctgttgtttacatgagggccctgctggagaagagggtttggtttgcctggcccagtgctgggtttgccttgttgacgatgcgcttggattgttaaggacaccgatgttcagaacccgggaagagtcatcttaacccacattctcagctgaatatgcagaccccaagcttgcatgtttatatacaccctaatcatgattccaaaacaaaactgttgttcagagttggaggtagctgagtgtggatggaggtattggtagactgccaggagggcagggggtgtggacaaaacagtgttttcatataaagctctgggacttcttcatttgacttggtctgtcagataaaagttttgtgagactttagatgaagactggaagaagtgaacactttc

SEQ ID NO: 2725 - DNA, 6000 bp, Homo sapiens
gcttcagaactacagtaacactaagaaatatacaaaaatatatcagcacctccaacatataacaaggctatcaaactgtttatgtgccaacacactctatgtggaactggactatcatttccttccatcacttattcagccacatgcaaatgaaatgatcttatgctgcatggccctttgttaaagggctgagattttaccaagatactggcatgttagtctggtgctctaccaccccacccccgcttaacagatctggaccagagaacagctgcccaggatcagctctgctacagttttaggcagactaaaatagaagttaagagccagcaagttgccgagcacggtggctcacgtctgaaatctcagcactttgggaggccgaggcaggcggatcatgaggtcatgagtttgagacgattctggccaacatggtgaaaccacgtctctactaaaaatacaaaaattagctgggcgtggtggcatgcacctgtaattccagctactcaggaggctgaggcaggagaatcgcttgaaccaggaggcggaggttgcagtgagccaagatcaggccatcgcactccggcctgggcaacagagtgagactctgtctcaaaaaaaataataaaataaaattaaaataagccagcaagtcaccagtaagtgattactggacaaaatgtaaacctcttcttaaaaaacacatataaggcatcaccaagacaatttctctttgcttaatataaaggcaagatctagataatttcttgacaactaagttttaataatcccctagcactccagtaagagaatcaaagtataaactgggtcatcctatgaaatctcccaaggcccacaaccagagtgtaatctcaggattaaaacctgctacaagccccagagagcttgctgcctccacaataagtactactgcactcaagaagcaacgaaagtctgacccatattaattgtgttgttcaaaacatttcaggacaaacacattaaacacttctctctatcctaccaaacccagacatgccagttagcaaaaacaactcctatcacatcaacctcacagtttctcgctctctcttcctgatccagtacctggtagacaaagcaaatagtaggtgcttggcaaccatataggaacttgacatcaatgacatgcagctcctccaggcggatgttgaaggccttgagttctttattatcgcgatctagtggaataaccttgaaaaggccatcatagagacgcaggccaatcatccggcactcagggtcaatgatgccaataatgccggtctctgaggggcggccaatgcggtcctgagaaacaaaatcgggattagggaagaacctcaacatccacagagcaacagaggacgctgggcaccacttgtgcagaaaaattttaggagaggtattaaaactaatggatctatttgataggccaaatagttggagccccaatgtcagtgcatgcctttttcatgaaacactgaatctcaatgaattattaccctgtcccttgggtcttgagtgaactacaggagtcctttctccaaaaagctcaaacccatagtgtcttctccttatttctctgatcgaatagagagctgcccccagcactttaattttttccatgaatcatgacagccctacttagaaaactttcattggcctaaagcagccacctcacctggacattgccatgggctcgcgtaatgatgtcaatgctctcgccactctgtttatactccaggatgcaggcattgtacttcgctgtcaagataaacagcaggtccttgctctccccctggaaaccaatattatgctatcaaaagaggttctttttaaaacaggaacaacctgtccagtctttaagcacaccaaattctttaagaattttccaaattcttctctccctaaagagaaaatacatggtgagcttgtaacccacactaggtacacatacaccctaagggcatgtacaaaaagccagaactgaagctggtaaacatctagttctcactttcatgattctccatctctctgttctacaaacaaagtcttcatctatttcaatctcaagctaatctcaatcatcccattcaaattctgaaagatgaatgtaatgcctcctccactcctccccaagtatttgaagaaagaggaaaaaaaatgtgggaataacaacggaagctaaaatggatcaacaaagtcctacttatttaacacagactccaaaaaattgctgttttgttcaaagggttataattaaaattttgaacccactgctttcttgccagattcagttaagacaacataaagcaatgtggtggtgatttggatgaaaacatttgcgctaaaataatgaaaatactgatggtaattgttttttttgtttggtgtttttttttttggagatggagtctcgctctgtcaccgggcaatgggcgccatctccactcactgcaacctccgcctcctgagttcaagcaattcttgtgcctcagcctgccaagtagctgggattacaggcacgtgccaccacacccggctaacttttgtatttttagtagagatggggtttcaccatgttggccaggctggtctcgaactcctgacctcacgtgatccacccacctcggcctcccaaagtgctggggttacaggcgtgagccaccatgcccggcctggtaattgttaacataactgtaaatgcttgctatatgataggccctatgttactgaatcatttcatcgtcacaacaacccaggggatttgatctgaaaggtgccttaagtggcacctaaagtcagaattaacaagaaatgaagccaggactgccccactctgtagcctatcctctgaaacaaactgctttaatttctcccttctaaagaagtcaacttcataaatgtttccctaatgaatctctccttttacttctagaaagcttggtcaagagtacatactgaaatttgctatccaaagagagaaaaaagagaagagtttttctcctaaagcatattccacccatcccaagaattcgcaaaacaacctaacacagcccaagcacggtggcatgcctacaataccccagctactctactccagaggctaaagtggagggattgcttgagctcaggagttcaagacatcctgggcaacactgtgagacccccgtctcaaagaaaataaataaacaaacaaaaataacataaaacaacctacgaccaacagttccccctccactgcttgtcccaactgcaacacttaccttgggcctgaaaagctccatgaccgcaatcttcccatacatgcccacctctttgacgggccgaagcccctcggcggtgaccacatagatctctaatctcgtgtttttggcaatcaacaggtttaagtcttcggccgaagtaaagtgtcctgaaagaacagaccctctaacttttgaactcaggggaagggcctcccatcccttcaaaataatcctatcacttatgtctaaatacctccagaattctcatttacttcacatacttctccaactccctccagctactccccttcttgccaaatccggcacctcaaagagtctcagttcatgcattcaacaaagctacttccctaatcagactaagaaaactggactggacctaagagccgtgtgtcctccaaatgacaatgactgcgtaatcccttctcatgcctcttgcccctccaattttactctattacagttacagtggcaggctctaattgagaatgccggagaaagtgttcacttcttccagtcttcatctaaagtctcacaaaacttttatctgacagaccaagtcaaatgaagaagtcccagagctttatatgaaaacactgttttgtccacaccccctgccctcctggcagtctaccaatacctccatccacactcagctacctccaactctgaacaacagttttgttttggaatcatgattagggtgtatataaacatgcaagcttggggtctgcatattcagctgagaatgtgggttaagatgactcttcccgggttctgaacatcggtgtccttaacaatccaagcgcatcgtcaacaaggcaaacccagcactgggccaggcaaaccaaaccctcttctccagcagggccctcatgtaaacaacagccccaggcaaaggggttagcctgaagagggctcctctccctctgtgggataatgcgggcattcctcacatccctccacctcctgggccccccagacttccccacaggaaaatcttgaccccaaagtcgtcattaccacctccccttttcctggccacagaaagccaatctccgggcccaaacgacaccgcacaaccaactcacactcctctgtctcactgggcccgccctgttctcgaggccgaatgacctccccaggacgaaaggggaccctcgagagcggcttccaacccccaaaaagcgcgtacagggacgactctttcgaggtcgcggtgctgggggaggttcctcggccgccagcgccttccattcgccgggcccactcctgcccggccgcccccggggcggcgggcctccctaggccgcggctccccccaactccctcactcgccggggtctccggccccggcagcctcaccggtcacgcagccgttcacggcggtgggcttctgggccgttaccacgtagttgtacgacatgtcgaggcttggagcggcccgtcgggactcgagcgcgacactagaaagagggacacaagcgaaaagacaggtggcccccaacagcgcgcagcgaactccactgccgctgcctccgccccagagacacgttgcaggccagagcggccggggcgcggggcatcacgggacggcctcacctggcctcttggaggactcccgaagcccgaggccgccaaccgaaggaggccccgcccccggaggcaccgcctcgcctctttccgccagcgcccgcaggacccggatgagagcgcacgcttcggggtctccgggaagtcgcggcgccttcggatgtggcggatgcggccgtgagccggcgggggaggtgcgccagtgtcctccgagctcgcccgcagactccccaccccgttccgcgccctttgcccttccccgcatccagtcctccttccgttgctccaggagccctcgggctgttcctcctttgggaacgggaaggactgcggaggcatagagagggaagggagaccgcgattcgtgcatatcccagactagaaccttgcctgctttcctttcactgtctcagttcctccagatccagctggtgccctcgcctgacgtttgaacgaccacctgctcacctcctcccttttgcgcgttgattcttcagacttcaaagggcccaccggtctgcttgcccaacgttattagtgcccctattgctctacaaattcgaacctcaaacacaaaaccagtatttctccgtagggaaccttaatgagccaggagagccgtcagccctgcagcctccagggtaccccacatcaaacaggctccccgggaacaagaggaataccacgtggcttggcacactcgcagaatgccagagaggagccaacccccattttacagatgaggaagctgaggcttagggaggaattggtttacctaagaccctccccacaaccccaagtaggctgaggcagagctatgttgattcttcctattgtgcacccacacagaggccaacacgctgctgaaccaggctgaactgaggaaaagctagaaagtcatcgtggtttacatcttgcctttcccatagcagagactctgcctgactttggaggcactgaattatcagtagtaaaaacacactctgtagaaaaactagacattggtttagattctggctgttacctgtattaccttggacaagtccctagagctctctgagtctgtttcccagaagtaaaatgggtcacaaacctggctagctccccccattcccttccc

SEQ ID NO: 2726 - DNA, 6000 bp, Homo sapiens
tagttgatctaaattgtgaggctttcttaaaggcactcctttgatctcatggagtgagagactagaaatctattcaacgtattaaaactcctctcccagcaaaataaaataaacaaaacatcctcctcctaatggctgaagttccatctagctgctatggccattttatggagcatggtgccatcttgtggccactctcaaaccacccattgttaatcaagtgcaattacagcatgttaagagtgaaaaggaaagctatttggagccatggtcacttgggatattttcaaatgttctcaaagaacatgacattttggttacttttagaattttattgacttttttcttcataactttaaaacaaaaacagcgcatgaaaaccagtgtcttattccaaagtctcaactcagctgattgccaggtgaacatcaccatcttactcctctgaataactagacacaaattacatagcaagttcgagtttctgcccacccaagacacagccagtaatcagtcacaaacacagacacagccaactccaggggctccagctttctgcccatcttctctcagcagttcctcccatctgctaagatgcgccttcctggtggctctctctcaaggtgggtcaaggctgaacaagacagaaaagcacagtctaggtccaccatcacctcccactggccaccagttggccagccaggaaatcatttctgtacatcttttgtctcccccttttatctccctctctcttctccaaaacttgttgctatctatcactttcatgtaacaatggacttagtgtccattaaactgcctgagaagtggtttgagcctgacatattttcctgagctaaaaaaggaaaagtacctctgtggccttcttgccattaagatcaagtaaaaaagggactagcactactgaaaagggtcacgctagaaaagccttagaatcctctctccaccccgtgaaggtttctctagctgtagctcttaagggtacaagacggcaaatattctggggtgaaggaggtataatggggaaacacatttattttccccttttaaacttccctgctgccccagtctttgccttcttcttagtggatcccttgggttctggctccttgcgcttagctgaagagagtgagccggtcaccttgaagaaatcatccaggcggccctgggtgctgccttggcggctcttactcagcctcttgaccccactgcggattcgctcctcagagaactgcttttcaccacacatgaacttgatcagctcttcttcatttggctcgctccacttcagctccacagactctgggtccagcacctcaggttccaagaagagctggtgagcctccttgtggagccaattttctggcacagggtacttgttggggtcaagtcgccgcacgatctcctcgatgctcttgtgcttctggatgaggtccacagcccgcttgggcccaataccccggatactctcacagtagtcactgcctagcaggatgcacagatccacaaactgttcctggttcaggcccagctcctgcagaatccggctcaggtggaattcctggattggcagctttttggcttcactggcagtcaggtgtcgcattagcacagggctgccgaaggtgaggcagtccatgtcctcggtagccgcagcatagactttgccagccttcaccagggcagcacagctggcctctgcctcactgggtgcatcaagataagggatgcccatgaggctcagcagatgtttgcactcatcattgtgctgcttagtgaccttcaccagccgcttagtgaatttttccacctcctgctcggccccagcagcctgagcctgctgcagctgcttctctgcctcagcccgccgctcactgcgtttggccagctcgcctgacttgagctgtggcggcttgccatcaaagacatacacgggcttgatgccgttctccatcatgcgaatggtgcggtagaacatgcccatcaggtggctggtggtctcaccctcctcattctgcagcacatccccaccctggcgaacagcaatcaggaactgataaatgctcatagaggcatcaatggccaccttacggccaaagtagctcttgatgtcattctcccggatggcactgggggccacatcagcaattagtttggccaggccttgaattcccatggcaacacagaggagggatgactaaaaaagaaaggcaagtcagagacggaggaaaggagaaaggttataactggtgttatctcaccaacttcatgccttcaactaaattccacacaacaaaaaggacaccatgtcagcactgctaaagataaaaagatgaacaaggtccccattctcaaaaaactcagtctagcaggagaatttactcaatagtaaggctcaacgagtaccagaaattgaaccacgtgcttagagaaataagatactgttgatattctaaggtagcagcattatttattacacaaaaaaaacctgcaacataggtctccatcaaggaccacagaaggccaggatgcttggcctggcttgaggagtccagggaccataatggcagacctgaaagacaggcaaatacaccagctaaacaaacagatctgatttgttttgagtctctggagaaccctgactaataaggcagccttgaaaaaggattgcaaacatatctgaatggaggtgatgtggctttctcacaagcttctctaaactctcttcatcatcgcctcagcacataagagtttctacttttattataatgttgctagagtttcaagtctttccctttgcgttttctcgccaccactcagtctgaaatgttaactccatggctcctccccaggtcctgatttaggggtctggcatgctgtagtcactgggctcaaaagagtattgcacttcagagttcagtgtttcccagatagcagtgtttcccaaatcaccctcacgatttttgctacttccaactaaaacccgtactttcattcacttagaattttttttaaaaaactaaactggaaaactcataagcaataatatttgtgttctattagttatattttaatatgtattaaatgtataactattaaaaaggatttttagggggtgcaatttaaaatcatcttgccatcctggccaacacggtgaaaccctgtctctactaaaaatacaaaaaaaaaaaaaattagctgggtgtggtggtgtgcacctgtaatcccagctactcgggaggctgaggcaggagaatcgcttgaacccaggaggcagagaatgcagtgagccgagattgtgccgctgcactccagcctagcaagagagtgagactccgtctcaaaaaaataaaaaactcatcttgtgcccactgttggtatgtgtccaatactccaagaaatattctactggggccaggcacagaggctctgggcagtaatcccagcactttgggaggccgtggtgggaggatcacatgagcccaggagttccaggctacagtgagctatgattgtgccaccacactccagcctgggcaacagagcaagaccctgtcaagaaaagaaaagaagacaaaagaaaagagaaagaagaaacgaaagactccatcaggccttttcattgttcccactctttcttcacagggttctttctagagcatcaatgactgttcaattcttccttctaattcagtccaaacacttcagcatggcatcacgatctttcatgttctggttcccaacctaaccctacattctgggatctcaacagaaagctggaataaggcccgccttttcccacttttccttagctgtgccctcctctcgccatcctctcacgcgtccttccaggtccatccctggattattaatcaattaataattaattgacaatgaattattcatttgattaatatgaataattcccctgtgaactgcagcggcaaaagctctggccttgaatctaggcgcggcatttaccatccgtgtgacattaccaagccactgaggtttattttctcgtctacagaagaagaacgattaccatgcctgtctctcagggctgctgccagggttaactgagacaacagacagaaacctctaatgtcccctctccaggcctgttcaacccttcggctcttgcctcaagccggccgcgctgctggagtgtggactgaggaccagaccatgtagcccttgatcccctcacggcgtcccacagacaggtaggcaggaaaggggcctaaacaactcaagtgtcagaaatgtttctcgtccaaggtcttaggaaaaatacaacacgaccccataaggtggaacttattaccgcttttctacaatggaggaaagagaggctcggagcttacgcgactggcccaaggctcacagggggaaaagtggcgggacctcttgactgcgaatcccgcgcactccagaccccggctccccacggcccccagcgccaagcggaccccgtcgctcccggaggcgcttcccatggggtctcacctggcctttgggacacgcggcctcggcggctaaagcttggttcggggttgccccgggcaggcggtcctaagctcgctctcccttctcagcttagcggcgggtggcctgacgttcagccgccttccaaagcccgcgctcccgtcacgtgacctgctcgccacgcacagcctcttggggcgcgtagtgcaggctgcgtcccctcagacggctgctctcatggcaaccagtccctccagggagaacagagtctctcagcgaccctggcgtacccttctccaccgcttgtccccactccacccacaccaggtccccgcaggcccctgctccctctacacccgaaatcgcaggactacaagtccctcaatgccacttgcgccggaggcacttccttttccggttgtgctaggcgcctgctcctgccgacgtgttcttccggtggcggagcggcggattagccttcgcggggcaaaatggtgagagcgttgaggggagttccagacggagatgcgaggacccctcggggtctgacccacaccgcgcttatctcctcagacgccggagatccagagggctagacgctcctggaacctccggcttgggctgaagggtggggaagggggaagccccttgccatgaactccttaggtttctcagctcgcgatttctaagggcgagaggcgtggggcgaattttgaataccttccagtttgtatatctctgttatcggtggtgtgttatctttatttggaaagttcttctgccgaacccgtgcccatcctacaatgccctgggcaaatgtttattggtgaagcacttccaactctcaggcacttggccagactttcctaggagcgcccacagcctctgtacagatctctggccacgttccatggacttctttgttttcggccacgcctcctagtgaccaccgtctgacgcgcatctagctctgggatgatgtctattcatctttgtattctcagtgccaaacagagggcccgtaattggaagctcaataaatggcagtgattgtctttatcattttgggggaagggggccgtgattgtttactgaattgaattccagtgtctcagaacaatgggggcagtttacttctctagagttgttatgttctggattttagaagcattggctgaccggtgacaatgaagttaacatttgtacagatctttacgtttacagccctctttcataaaagacattatctcatcatcttccctacagccttaggaaggaagcaaatacctgttgagcaaaatactccctgctaggcactagatgctttgattcatcatctttcttatttttcagttctgtgaaatagatattacagtcgctttactcagactcagattactcagaaccagaacttgaatgtcttgaccatagctcacaagattccataatagcataggtagtgaggaaaatactgaattagaaattgagggccag

SEQ ID NO: 2727 - DNA, 6000 bp, Homo sapiens
ggggaggggttcctcagtgcaggagttggggacaggctggggatccaagctgcttgagggggtcaaccttggaccaaagttgccttaagcctgtggtaaaagggcttcagggaaggtaagtgggccacctgctggaagctgccagctgcccggctggcaatggtgtgagtgtcttggccctgtccctgccctggggtccagcaggtcatccctcccttcttctctctcctttggcgtttgttcctgtagtcactgggctaatctccccctagcttcaagctgtacatagggcctcccagtgcaaatcctcctgcccataccgtgcacccttagaagcctgcgtgtgcatagagcgccccctacttcccagttaactcccagttcttctccctgagcttggtatttgtcatgtgccaactctgactctgaggtgggcagtgagggaagcagccccgggcctgcttgcttcctgtccccgaaatgttcgtttcttctgaagtaaatatacatatataaataaatgtataaatactgctttgtatctgagcttgcctccttgtctcttcttgggattggtctggtgggagaggagtcacctataaggctagggccaattggaattcaaagttcttcctgagaagcctggaatctctgagcgcctgaaccagagggccaaatggatgcttcataccccttatcctcttagcttcatattggggctaggagtggactcatcagcctctcccatggccacaccttcccctcctgcgcacccgctgctgcccacctgcattaaaagtagccactgaggagaaaagccttcttagggggagaagctgagcctggtgaggatgccccagcacagagaatggtggctatgtttatggcagggactggcctagggcagaatggaccgatgtgggttcccagagaagtttgtcctagaaacaatagaaaagggtaggcccagaccctatccacaggtaagccttaaattccaatgacaaaacaccggtgctacacaaatctcatcccccttaagtagatcagcagcaggaactgtgaaaggcagatgagaaatgggaaagggaagagattggggaagcaatgtaggtcccagcacccaccacccctgcagaatgggccccagacaggactgctatacatctgcatttattatgagcagcaggtgggacacttccagcaacagtaaaaaaaagtaatttacaaaagcaggtttcagtgaagccatctggttgttacctaaaagaggagaggggtatcaaaataagaccaatggcccttctttcctccttctctccctgcacccctgtgctcctggggcaagggctattgagcacacacctctgaggatgagccaccagagctgattcctagtggcctgtttggtggattgtctgcagcaagttttaagccctggatcttgaccccctttcagccagctgacttcccagcagcctctccaagtcactggggtctgacttctaagaatgtaaatgtacagccatgggatgcctgcgtccacacttctaggtggtacatcccaaaggcagatcgaggccttgggccatgtgagctcagaactgagagtcacatttggctcaaatccgtatgaggggcagggaaagaggcacaaatgtctagtgtccctacccattccactgagtctgtctccatcaaccaaggggtcatgctggtaagagctttaaggaccctgctgacctgactctggggaggcttccctgggctgtgccttggaggctcacgcatccatcccattgcagctcttacccttgggtgctcacacgtagatgccaacccagagcagcaggaagaggactccaaagcccatgaagagtgaggccactaaggagatgaggagctctttatagatatcacgagtgtacttggtagaggtgacctcgtaactgggcacagcagttaaggcaaagcgaaggggtggactgtggagtgcagagagcccagcccacggcaatctgaggagaaaagcattggctcaatgccttctgggaggcctatctggctcagagcagccaggcagaggggcctaagagatgccttggactctggtgctccactgccatgaagaaaatgagacccagaggagttaggtcacttgccccaggtcacacagctcatgagggccggagctgggactagccctcagacctcctgacacctgagtgcacccttccttataccacctttccaactgtagcacccctattccccacctccactccagccaggtcccctgctcactgtcctggaaatccaaagaacaaactgagctcacctgaacttgggaaataaggctataacctgcccctgggcatcactagccctcctctcctccttaccttctctcagccccaatccaatgtacaaaaccggcggggtccatgtacctagcgtggtttctccctgagcttcccacatcactaatgctggtcctctggctgctcagtgaaaggatacacgaagaaccaggcggtgaagaacatgccaatggccaaaagcaccacggtcagatgggggaagacagctgggttcactgggctggtatatctgctcatggcctcgagctcctagaggagggaaagagatcagagctatcaaagaatcccacgatttcagcctggagagaacatgcggttatcaaggagcctggtgctgccgtgaaacagaggctgattttagcccggaaatgtagctgcagatcaatggcccttattagcattttctgaggccaataatctgaccactatgaaaacgtgactaaaggtacgaactctctgcctgagaaaaaccacatacaagaaaaagtttgcctacaatttccggagctttgtggaccagtgtctatagacaccaagctgagaacccccgctataagtcactgactggtggtacccagatctcaatatcttttttttttgacggagtctcattttttggacggcgtctcactctgtcgcccgggctggagggcagtggcacgatctcggctcactgcaacctctgcctcccgggttctagagattctcatacctcagcctctcgagtagctgggactataggattacaggtgcgcaccaccacatctaatttttgtatttttagtagagatggggttttgccatgctggccaggatggtcttgaattcctgacctcaggtgatctgcctgcctcggcctcccaaagtactgagattacaggtgtgagttgccgcgcccaggctcaatttttttttttttccagacagtcttgctctatcgcccaggctggagtgcctggagtgcagtggtgccaactcggctcactgcaagctccgccttctgggttcaagtgattatcctgcctcagcctcccgagcagctgggattacaggcgtgaaccaccatgcccggctaattttttgtatttttaggagagacagggtttcaccttgctggccaggctggtcttgaacttctgacctcctgatccgctcgcctcagcctcccaaagtgctgggattacaggagtgaaccaccgcgcctggccctcaatttctaattcagtattttcctcactacctatgctattatggaatcttgtgagctatggtcaagacattcaagttctggttctgagtaatctgagtctgagtaaagcgactgtaatatctatttcacagaactgaaaaataagaaagatgatgaatcaaagcatctagtgcctagcagggagtattttgctcaacaggtatttgcttccttcctaaggctgtagggaagatgatgagataatgtcttttatgaaagagggctgtaaacgtaaagatctgtacaaatgttaacttcattgtcaccggtcagccaatgcttctaaaatccagaacataacaactctagagaagtaaactgcccccattgttctgagacactggaattcaattcagtaaacaatcacggcccccttcccccaaaatgataaagacaatcactgccatttattgagcttccaattacgggccctctgtttggcactgagaatacaaagatgaatagacatcatcccagagctagatgcgcgtcagacggtggtcactaggaggcgtggccgaaaacaaagaagtccatggaacgtggccagagatctgtacagaggctgtgggcgctcctaggaaagtctggccaagtgcctgagagttggaagtgcttcaccaataaacatttgcccagggcattgtaggatgggcacgggttcggcagaagaactttccaaataaagataacacaccaccgataacagagatatacaaactggaaggtattcaaaattcgccccacgcctctcgcccttagaaatcgcgagctgagaaacctaaggagttcatggcaaggggcttcccccttccccacccttcagcccaagccggaggttccaggagcgtctagccctctggatctccggcgtctgaggagataagcgcggtgtgggtcagaccccgaggggtcctcgcatctccgtctggaactcccctcaacgctctcaccattttgccccgcgaaggctaatccgccgctccgccaccggaagaacacgtcggcaggagcaggcgcctagcacaaccggaaaaggaagtgcctccggcgcaagtggcattgagggacttgtagtcctgcgatttcgggtgtagagggagcaggggcctgcggggacctggtgtgggtggagtggggacaagcggtggagaagggtacgccagggtcgctgagagactctgttctccctggagggactggttgccatgagagcagccgtctgaggggacgcagcctgcactacgcgccccaagaggctgtgcgtggcgagcaggtcacgtgacgggagcgcgggctttggaaggcggctgaacgtcaggccacccgccgctaagctgagaagggagagcgagcttaggaccgcctgcccggggcaaccccgaaccaagctttagccgccgaggccgcgtgtcccaaaggccaggtgagaccccatgggaagcgcctccgggagcgacggggtccgcttggcgctgggggccgtggggagccggggtctggagtgcgcgggattcgcagtcaagaggtcccgccacttttccccctgtgagccttgggccagtcgcgtaagctccgagcctctctttcctccattgtagaaaagcggtaataagttccaccttatggggtcgtgttgtatttttcctaagaccttggacgagaaacatttctgacacttgagttgtttaggcccctttcctgcctacctgtctgtgggacgccgtgaggggatcaagggctacatggtctggtcctcagtccacactccagcagcgcggccggcttgaggcaagagccgaagggttgaacaggcctggagaggggacattagaggtttctgtctgttgtctcagttaaccctggcagcagccctgagagacaggcatggtaatcgttcttcttctgtagacgagaaaataaacctcagtggcttggtaatgtcacacggatggtaaatgccgcgcctagattcaaggccagagcttttgccgctgcagttcacaggggaattattcatattaatcaaatgaataattcattgtcaattaattattaattgattaataatccagggatggacctggaaggacgcgtgagaggatggcgagaggagggcacagctaaggaaaagtgggaaaaggcgggccttattccagctttctgttgagatcccagaatgtagggttaggttgggaaccagaacatgaaagatcgtgatgccatgctgaagtgtttggactgaattagaaggaagaattgaacagtcattgatgctctagaaagaaccctgtgaagaaagagtgggaacaatgaaaaggcctgatggagtctttcgtttcttctttctcttttcttttgtcttctttt

SEQ ID NO: 2728 - DNA, 6000 bp, Homo sapiens
ccgatgcccacattcagcaagctcaggccttctgactcggccaacttctgggccagctccaggccctctggggtcaatgagtacctgggaggcagaggggacaacacagctctaccttcttcactcattcctggcaggctttcctgcctgcccccagctgggctggcctcaccacccccttggcgccctgcacaaatgaccccagtggctcctgctcctcctggtcttcttggctcttagagcagttccttgggcctgctcagcgccattctcaggtctgcaagaagtgtgtctcagacaatttccttcctcctgtcttcactaatgctgtttcctcctcctcggaatacttatcctgcatctctacccgccaaatcctaaaacgtgtcaaatgctatctcctctgaaaaggctttctcctcctccaataaccaccgcaccctcccacccccgctgctgcggtttcacaccctccaggtattccaacagtgggggctcctgaggaaaggcccaccccccccaatctcaacagcatcagctctgggagttgttgggtgactctaaggccctactaagaagttcactcatgctctcctgtatctcctgcagttggccccacctggctggctggtgtgtcctgaggaccaggttcctgtgaaggagggagcggagggctggccagggtcgagcactcccaggggctacctgtggatcagaaaagagaccctcagagagcacctggtaccaccacaagtccatgttccctgtgtccccagccatgggccacacatgggcccactgcaagaaaaggcagtctttggtgggccccagagccacttgggcctgtcctccctgatccctgtgctcaccctgggggacttctgagcacacctctgcagcagctcctccttggttaagaagtggtgaccattaggattctgaaaccaaggtagaaaagacagggtaggctcagtgccagggcccctcctcatcccgctcaggtggctgggataatctttgcctgccctgcctgggccaggcccctcggggaacctcccaccccactgccatggttccgcctcccggtgtagcccagtgctcaccaggtgctcccggtagagcaccagcagtatcactcgggctcctgagtgccgagctggccagtagctgccagagcctcccgctttgggctgggcaggaacctgaaaggtacagaggagttctgaacatgaaagccagccagtcatctttgaataagtccccagcaggctttgtggccctgggtaagtcactcagttgtctctcagtttccttctctgtaaaatgggccaggtgatgggatgatccgctgcaaatctgggataaaacagcaggcagtttcggggcagtgggtgggggtgtctgcccagcctggcctcacttctaccatgcgctgcaggacaggtgtaattagacaggaaaactcaataatggtgaccccgtaactaactgagctgggatccttaagtagcttgatcatggaattctctcattggctgttaccaatatttctattcacaggttaaaatactaagtcgaaaagaggataagtcatttgctcaaggccaggcatcactggtgagatttggactcaggcttgccaaatcccccaagccagaaaatcatactcccgcactcccactttgccttccactccccttgccccttcctcactggcatggaagagtcctggacttccgcaagtcgcccctgcggggctggactgttctctccagatggtgagtccggggcatggtcacctgcgggagagaaaagagttaactccacactccacgaatccggcagctgcgaggatctgggatgcaacctactcagatggttacgtgagaccggtgagggaggctcagggagcgccagccactagccctaggccgaacggcaactgggacaggagtggggagcttaaaagccaagggctcccaggagagtacggaggctccacctgggggaggtgggggatcaccgacccctttccgaggcgctcaccgcccgatgttcggtgccgctgcagccgctcgtccagcatccggcagagcccgtctccgaagtgctgtaggatcttagcttccttcccgctgcgcagcggcagtgggtaccgtcggagggaacgcagcgcctggccgggcaggggtagggtacctggtcagggcaggcctgacctggccagcagcttttcccatcgggccacgccaggacccaccttctgaaatacgaagcgcgtgcggcgcctgctgcgggtcgcctcgtcccgccactcggtcagccagcgaacgaagagcgggttgggacaggcaggcagcgggcgcttccggcccaggcggaccggggccgccatgagcccgagggcgggtcctccggcgctccacgcccgcgggactgggacgccgccagttctggagtcgggattcgaacacctggcccagggcggggcgggggaagagggagaccgagggcaggaccgttgagatcacggggccccaaacacagggggcactaacgagaggagagcctgcggccgccctcccacccctgcgctgctctaagtggttggtcaggggcgctgtctctaacgatcttttcccttggctccactccagccagcctttgagacgcgccctttcccagcccccggagcctggaccggctccttcctgtcaccccagattcgagagcggggtctttgtgtaggcgagaggaaggcggacagcgccccctgtgacggggaggactggctgggcggcgcttaacggactaacctgagcttggcggctctaaggtctcttaagattgtcagcttcagcctcaagcttgaaggaggctggagatggagactggtcttgaaaagagtccaggagaggcgggggctaggagacaaacgggtgcaaacgtattggtgggagggacacccagaaatgggtgccggggatgaggacacaaaggtaaggcaggaggagctgcaggacccttggaggaaatggtgatcctcatccccgggatacagggcaaagagtgtgtggtggagaggaagtcggggacgtgccgagaaggcccaaaatagaactcggaatgtcgggggtcagaggcctagaggaaggaggactgtaagtaagaggtgcttgggcatcctggcagttggggaggcctgagatgggcacgcggttgggtttgggagcggaggagcaggctgcgggttaagaagcccagacacaggtagaggggagaacacttcgtcatttttgtggctaatcggaagtgggagaccctcagggaggttgaagatggaaaccctacaaagggcttcaacctgagaagcctgaaagacacgtatagctgagttggacacaggcgacccgccagggtttgaagcagcacccggcctctagctgctatgccggaagtcgcaacacgcaggtctccagcctgcgaggaagggagaggtgggcgccagagctccagtcccgcccctcaggactgtgcctagcccacggcgcagtagccccagccaagctaaattggaccaatgggctccggctcccgcctcccgcccgccgcggccttataaggagcctcaagccggctgtcgggctggccccgccccctcgagtctcttgtcctaataaggacatctagggcatcccgcggctgggggcgggcgagagcgcgtctccagggtaactgcgaagcccccctctctctccccgttgctcttggaaactctaaggctcagaaaagggggcgctagcctcatattcatgtagggtcgctcgcgggaggcggggtcaagctgctgtctccacctggagcgccgggagtccgggcgggggcggtgctgtggaatgtccccgactacaacccccggtatgctctgcaaggtaccccactcccaggcatcgctctccgtttacacccttaattccgtttataggattagggcccccagttccctttctgggtttgcctctgacttgtttgcgacccagtcttttcctgcagagtgtgaggctgtggtcactgttctagaacaacaaaatcatcccggagtcccccgctcgtttctttttttttttaaggcatatactaccacagaacttgtctcagttttgcggatgttagaataaccatgtacctggctatcaactcgagagctgggttcaagtctggtttaatatctatttcttctcattggcacgtaaaggcatgtaaagaagccttgaattgaatgcacaaaccctcgtctttaccctttaacgcctcatgactttgccaaacatctttaaacaagaacaaagctctcagagatttccttgtacctttcccctgtgccttttcctcctattcttgttttactgacgttggacatggccttttttcaggagacgagagtggctttacacatgcagagtactagtgtttatccgactgacgacgccttcatacttgtgatttcctttgctttaggtcgggattccaggctaatcaatagttgcttcgattcagaaatgcaaaaccctaacctcactcaaaaatttcaggccaagggatccagataataccagatgggtcttaagaaagccgttttgctgtgggataaagagccgcttagtcggggatcgttttcgggtcattttactgagcgccgcctcgccgggctcagagcggttcctgggaaattggaccaatgggctcgcgctgcgcgctgcggtgccgcccaggacctgggcctacatttccctacatgcactgcagctcggagccggccggcgggaagactccgttacccagcgagcgaggcggcggcgcagggccagcggactccatttcccgtcggctcgcggtgggagcgccggaagcccgccccacccctcattgtgcggctcctactaaacggaaggggccgggagaggccgcgttcagtcgggtcccggcagcggctgcagcgctctcgtcttctgcggctctcggtgccctctccttttcgtttccggaaacatggtgagcggcaggccacggcgcctgagggaggcggctgcgggtcggtcgcctgcgcgcgggaagcgactggggagcgacgtccgcaccccctcccccagcgccccgggcgggatgagggtctcgcacgaaggggcgggcggtgccggaatgcgcgtgcgcgcccgtgggcgccggggagggccggtctggacgtcgctcgcgctccgcctgggctcccctcccccacccgctggtgcgcccgcgcggacaccggccgcggggggaggggttcggggcgcgcgctggggcgcccctcgcggaacggccggcgtcgcgcctttcttcttaggggcgcgctctcgactggagcatgcggcgtccaaacccggcccgggggcggcgaggaaaaagcgcgcgagaggtctcggcgcgcgcgccccacccaaggctgttcctgtctgcgcgtcaccctccctcggcagccgggtccgtctcgggagcaggtggcagggatgcctgcgcccgggaggggcgggtgctggcgcggcgaggggtgatgctgggaagacggggtcccggttggggcgtgggtgcctgcgattaaggccttgcaccgcaaggcttggagggggcatcgcagagaccgcggcccgttcgggagcgcatctaacgagctgcgttctcacccgtgcatcgggcgagggctggaacggcgctgtctgtcggcgcgtgcgcgcacgctcaggcccggccgccggtgccgaagccctgggccagcgaggccttcccggatgggcctgagtgagggtggagccgagtttagggaagtgacccaggcgggcaccgcccggaaaccaccccgccccctgtatacggcccgagggctgagaaaaccgaaggttatgtagcttgcccaggctcctgcctgcaggagatgggtctgatacacccgttgttttagggcgattc

SEQ ID NO: 2729 - DNA, 6000 bp, Homo sapiens
aactcccagcaacagcaaagccacaggtgactttgagaaacccttgggctggcagtgaggagtcttttgttacaaccccctccccctccaaacccacacatctgggttgaccaggagccacagaagttcccatcatgagaaagggggcaggtgacaggaagaagtgccagaatgagctcaccagaagataaacaccagatcctccttcttgctctccttggtctcataggttgcatcatagagggcatagcggcagtccttatctggcagcatcttgacaaaggtggcgtaggggtcgtcgacagtctggcccacatcgcccaccaggatctccttgccctcctccaggatgatgttcttcttgtcctcactcaggcagaagagcaccgccttcttgcgcttcttcacctcctctggcgttgaagacttacgcaccttcatgtcgttgaacaccttgatgacaccatcagagacagccacaccggaggcctaggagacatgccacgtatacgtcaagaaaaggattctagggaactgccccttgttttttcagaagatctcagtccacgtcccgagtggtcactagtgcccttcccaaggcaagtcactagttttcccacccaagtcactgtcaaagaaccagatgggacacaacctcagaatggcagccatggcctctgatcacctagttcaacaaccccttccctcattttacaggatagaaatgcaaaactcgtgaaaagcagaaccttgaccaaaatgtgaacccagaattaaaagatccaccggctactgactcatttgctactcacagtacttgctctcagcctttggataaaactggtgatttagaacttcggatatggaggacccaaacacctgagccaagactcctcttcagaaagagccaagaccccacaatgctagatgggaccccaaggacaccgaacagttacaacaaacccaccagaactgcttaatacagttactacacaaacgacccctgttcccagctaggctctttcccaaccaagacaagaattgcaacccccattaaggaccctgcccgacaactcccttcttccgggaatggtgctaggccccagaagtcgctgataaaaattaacatgccaaactcaagtgcccagaggcctcgaggtctttaaactcttcctactctgcgtcgtgcttcggggtgcccgagccaggagagggaggggcaatccaaggtaaatctggtcccccaaactccccggaactgcagaagaagccggccacgtgactcggccgcatccggagtgggcggggacaggagatcggctgggcccggccccctcaccaatgcagaaacgcgtatccgagaggcagcagcatctccaggtccctaaccctgtggaatcgccctaaaacaacgggtgtatcagacccatctcctgcaggcaggagcctgggcaagctacataaccttcggttttctcagccctcgggccgtatacagggggcggggtggtttccgggcggtgcccgcctgggtcacttccctaaactcggctccaccctcactcaggcccatccgggaaggcctcgctggcccagggcttcggcaccggcggccgggcctgagcgtgcgcgcacgcgccgacagacagcgccgttccagccctcgcccgatgcacgggtgagaacgcagctcgttagatgcgctcccgaacgggccgcggtctctgcgatgccccctccaagccttgcggtgcaaggccttaatcgcaggcacccacgccccaaccgggaccccgtcttcccagcatcacccctcgccgcgccagcacccgcccctcccgggcgcaggcatccctgccacctgctcccgagacggacccggctgccgagggagggtgacgcgcagacaggaacagccttgggtggggcgcgcgcgccgagacctctcgcgcgctttttcctcgccgcccccgggccgggtttggacgccgcatgctccagtcgagagcgcgcccctaagaagaaaggcgcgacgccggccgttccgcgaggggcgccccagcgcgcgccccgaacccctccccccgcggccggtgtccgcgcgggcgcaccagcgggtgggggaggggagcccaggcggagcgcgagcgacgtccagaccggccctccccggcgcccacgggcgcgcacgcgcattccggcaccgcccgccccttcgtgcgagaccctcatcccgcccggggcgctgggggagggggtgcggacgtcgctccccagtcgcttcccgcgcgcaggcgaccgacccgcagccgcctccctcaggcgccgtggcctgccgctcaccatgtttccggaaacgaaaaggagagggcaccgagagccgcagaagacgagagcgctgcagccgctgccgggacccgactgaacgcggcctctcccggccccttccgtttagtaggagccgcacaatgaggggtggggcgggcttccggcgctcccaccgcgagccgacgggaaatggagtccgctggccctgcgccgccgcctcgctcgctgggtaacggagtcttcccgccggccggctccgagctgcagtgcatgtagggaaatgtaggcccaggtcctgggcggcaccgcagcgcgcagcgcgagcccattggtccaatttcccaggaaccgctctgagcccggcgaggcggcgctcagtaaaatgacccgaaaacgatccccgactaagcggctctttatcccacagcaaaacggctttcttaagacccatctggtattatctggatcccttggcctgaaatttttgagtgaggttagggttttgcatttctgaatcgaagcaactattgattagcctggaatcccgacctaaagcaaaggaaatcacaagtatgaaggcgtcgtcagtcggataaacactagtactctgcatgtgtaaagccactctcgtctcctgaaaaaaggccatgtccaacgtcagtaaaacaagaataggaggaaaaggcacaggggaaaggtacaaggaaatctctgagagctttgttcttgtttaaagatgtttggcaaagtcatgaggcgttaaagggtaaagacgagggtttgtgcattcaattcaaggcttctttacatgcctttacgtgccaatgagaagaaatagatattaaaccagacttgaacccagctctcgagttgatagccaggtacatggttattctaacatccgcaaaactgagacaagttctgtggtagtatatgccttaaaaaaaaaaagaaacgagcgggggactccgggatgattttgttgttctagaacagtgaccacagcctcacactctgcaggaaaagactgggtcgcaaacaagtcagaggcaaacccagaaagggaactgggggccctaatcctataaacggaattaagggtgtaaacggagagcgatgcctgggagtggggtaccttgcagagcataccgggggttgtagtcggggacattccacagcaccgcccccgcccggactcccggcgctccaggtggagacagcagcttgaccccgcctcccgcgagcgaccctacatgaatatgaggctagcgcccccttttctgagccttagagtttccaagagcaacggggagagagaggggggcttcgcagttaccctggagacgcgctctcgcccgcccccagccgcgggatgccctagatgtccttattaggacaagagactcgagggggcggggccagcccgacagccggcttgaggctccttataaggccgcggcgggcgggaggcgggagccggagcccattggtccaatttagcttggctggggctactgcgccgtgggctaggcacagtcctgaggggcgggactggagctctggcgcccacctctcccttcctcgcaggctggagacctgcgtgttgcgacttccggcatagcagctagaggccgggtgctgcttcaaaccctggcgggtcgcctgtgtccaactcagctatacgtgtctttcaggcttctcaggttgaagccctttgtagggtttccatcttcaacctccctgagggtctcccacttccgattagccacaaaaatgacgaagtgttctcccctctacctgtgtctgggcttcttaacccgcagcctgctcctccgctcccaaacccaaccgcgtgcccatctcaggcctccccaactgccaggatgcccaagcacctcttacttacagtcctccttcctctaggcctctgacccccgacattccgagttctattttgggccttctcggcacgtccccgacttcctctccaccacacactctttgccctgtatcccggggatgaggatcaccatttcctccaagggtcctgcagctcctcctgccttacctttgtgtcctcatccccggcacccatttctgggtgtccctcccaccaatacgtttgcacccgtttgtctcctagcccccgcctctcctggactcttttcaagaccagtctccatctccagcctccttcaagcttgaggctgaagctgacaatcttaagagaccttagagccgccaagctcaggttagtccgttaagcgccgcccagccagtcctccccgtcacagggggcgctgtccgccttcctctcgcctacacaaagaccccgctctcgaatctggggtgacaggaaggagccggtccaggctccgggggctgggaaagggcgcgtctcaaaggctggctggagtggagccaagggaaaagatcgttagagacagcgcccctgaccaaccacttagagcagcgcaggggtgggagggcggccgcaggctctcctctcgttagtgccccctgtgtttggggccccgtgatctcaacggtcctgccctcggtctccctcttcccccgccccgccctgggccaggtgttcgaatcccgactccagaactggcggcgtcccagtcccgcgggcgtggagcgccggaggacccgccctcgggctcatggcggccccggtccgcctgggccggaagcgcccgctgcctgcctgtcccaacccgctcttcgttcgctggctgaccgagtggcgggacgaggcgacccgcagcaggcgccgcacgcgcttcgtatttcagaaggtgggtcctggcgtggcccgatgggaaaagctgctggccaggtcaggcctgccctgaccaggtaccctacccctgcccggccaggcgctgcgttccctccgacggtacccactgccgctgcgcagcgggaaggaagctaagatcctacagcacttcggagacgggctctgccggatgctggacgagcggctgcagcggcaccgaacatcgggcggtgagcgcctcggaaaggggtcggtgatcccccacctcccccaggtggagcctccgtactctcctgggagcccttggcttttaagctccccactcctgtcccagttgccgttcggcctagggctagtggctggcgctccctgagcctccctcaccggtctcacgtaaccatctgagtaggttgcatcccagatcctcgcagctgccggattcgtggagtgtggagttaactcttttctctcccgcaggtgaccatgccccggactcaccatctggagagaacagtccagccccgcaggggcgacttgcggaagtccaggactcttccatgccagtgaggaaggggcaaggggagtggaaggcaaagtgggagtgcgggagtatgattttctggcttgggggatttggcaagcctgagtccaaatctcaccagtgatgcctggccttgagcaaatgacttatcctcttttcgacttagtattttaacctgtgaatagaaatattggtaacagccaatgagagaattccatgatcaagctacttaaggatcccagctcagttagttacggggtcaccattattgagttttcctgtctaattacacctgtcctgcagcgcatggtagaagtgaggccaggctgggcagacaccc

SEQ ID NO: 2730 - DNA, 6000 bp, Homo sapiens
cagcgtcatgattatcgtagctctgtgcaacctgaaactcctgggcacaagcaagctttttgcctcagcctcccagctgggaccactggtgcacatcaccatgcctggctaattgctctttttctttttttttttttgtttcagacagtttcactctgtcacccaggctggagcacagtggtatgatctcggctcactgcaacctccacctcccgggttcaagcaattcttgtgcctcagcctctcaggtagctaggattatagacacgcgccagcactcccggctaattttttgtatttttagtagagatggggtttcaccatgttgatcaggctggtcttgaactcctgacctcaagtgatacacccacctcggcctcccaaaatgctgggattacaggtgtgagccactgcgctgggactaatttttatattttttgagacatggggtctccctgggttgcccaggtttgtctcaaactcctgggctcaagtgatcctcctgccttggcctcccaaagtgctgggattataggcattgagtcactgcgtctggccaaacttcttactatgtgtcttacattgtgttcaacacttgttattgctcaaaatggccttatccttcatacatacctgccaagagaaatttttattagagacaaggcctccctgtgttgctcaggctggagtgcagtggtgcgatcacagctcactgcagccttagcctcctgggctcaagtgatcctcccatctcagcctccagagtagctgggactacaggcacacaccaccacacctggttaatttttaaaattcttttcatgtagatgggggtctatgtttctcaggctggtcttgaactcctgagctcaagtgatcctcctgcctcagcctcccaaagtgctaggattacagggatgagccaccacacccatccccaaatttacaattaaaaaactcttaaacctaaaaacaaaaatgtggtaaagccagttattttataggtaagatgatactcatatgtgtaaagaatctagctgggtgtggtgggtcatgcctgtaatcctagcacattgggaggctgattctggaggatcacttgaggctaggagtttgagagcagccagggcaacaaattgacccccgtctctacaaagtaaaaattaaaaaattatctgggggtggttgggcatggtggttcatgcctgtaatcctagcattttgggaggctgagctgggcagaccacgaggtcaggagttcaagaccagcccggaaggtccaggctgcagggagccatgatttcatcactgtactccagcctgggggacagagtgagactgtctccaaaaaaccaaaccaaaccaaaacaaacaaacaacaacaacaaagaaaaaacctgcaaacttttctttgagatcagccaagccaagctagacactttacagatgagaaactcagtgagggctgcaggagcgaagagggttgcccacctggaccataaaactgaactagggctaatttaatgctatttccattattctagatcaaggagtcagatccttattcaagccccagcattctgatttgccagatctgtgaaatttggcaagattctttacatctatttaattaatttatgtatttagaaacagagtttcactcttttgcccaggttagagtgcagtggcaccattacagctcactataatcttaaaatcctgggctcaagcgattccttccccctcagtctctcaagtagctagaactacaggtgcaccaccacccgcagatatatgtgtgtgtgtgtgtgtgtgtgtgtgtgtatatacatacacacacacacacacacacaaatatgtacgtatgtattttttgagacggagtctcactctgtcacccaggctggagtgcagcggccacaatctcagctcaccgcaacctccgcctcctgggttcaagcaattctcctgcctcagcctcctgagtagctgggattacagacgcacgccactacgcccagataattttttgtatgtttagtagagacggggtttcaccgtgttggccaggctggtcccgaactcctgacctcataatttgccttcctcggcctcccaaagtgctgggattacaggcatgagccaccccgcccggccgccggctaatttaaaaaaaaaaaattttagagatggattttggtcgttgcccaggctgtccccaaccttctgggctgaggcgatctacctgcctcagcctcccaaagcactgggattacaggcatgagccaccacacccagcctacaattagtttcacctgtttcttttcaccttttaaaatgcagctactagaaaaattaaaagcacctatgggtctcactgtgttaacgtaagaccccacctgccgggtggggtgactcacacctgtaatcccagcactttgggaggccgaggcaggcgaatcacaaggtcgggagttcgggaccagcctggccaacatgctgaaacccctactaaaaatgcaaaaattacgccgggcgtggtggcgtgcgtgcctgtaatcgcagctactcgggaggctgaggcagggaaaactgcttgaacccaggaggcggaggctgcagtgagccgagatagcaccactgcactacagccagggtgacaagagtgaaactctgtctcaataaataaataaataaaatggctatccttactgggtagctaggggtttgctgatatcctgttctgggaatactgccagcagtttggatttcaggagataccagagtagtgccccttttctttctttctttctttctttttttttttttttttgagacggagtctcgctctgtcgcccagcctggagtgcagtggcgcgatctcggctcactgcaagctccaactcccgggttcacgccattctcctgcctcagcctccctagtagctgggactacaggcccccgccaccatgcccggctaattttttgtattttagtagagacggggtttcaccgtgttagccaggatggtctccatctcctgacctcatgatccgcccgcctcagcctcccaaagtgctgggattacaggcgtgagccacctcgcctggcccaagcacatgccatttcaatggccttgtgctacacaactcccaccctcctattctgctctctgttccaggttctggccatattgggctcttttttttttttttttttggagacagagtcctgctctgttggccaggatggagtgtggtggcgtgatctcagcccactgcaacctccacctcctgggttcaagtgattttaatgcctcagcctcctgagtagctgggattacaggtgccagtcatcatgcatggctaatgttttgttttcaattagcaataattgcgcctcggataaacctcattggctatgatactgccactgcgcaaagctaatgttttgtagttttagtagagacagggttttaccatgttggtcagactggtctcgaactcttgacctcaggtgatccgcccgcctcagcctcccaaagtgctgggattacaggcgtgagccaccgggcctggcccatactggctcttgactcttccttgaaccagatttgcttctgccccagcactctttgacttgtactttctggccggcatgatcttccctcagaggatggcttagttcccttgattactccaagtcctcatcaccatctaacacgcttatgttttacttatttcttgcctgtttctccccaccataagatccaagaaggttgggatttctgtcatttttttttgttcactgctatattcttggtggtgtccacatggtaggtgctatttgttgactgaacacgtaggcaaatatttccctgagtttgtcacatgtctatgtttttgatgttgtctgccatgcaacaatcttatttacatactcaaatctgtttaaaaaaatttttgagacggaatctcactgtcgcccatgctggagtgcagtggcgtgatcttggctcactgcaacctccgccttccgggttcaagtgattctcctgcctcagcctcccaagtagctgggattacaggcgcgcaccaccacacccggctaattttgtatttttagtagagacggggtttcaccattttggccaggctggtcctgaactcctgacctccggtgatctgcttgccttggtctcccaaagtgctggaattacaggcgtgagccaccgctcccggactaaaattttttttaaggctcaacttttgcttcctgcagaattaattttctcgtttattaaactgtttattatgaaaaccttcaacatacaataacgtcattccattatttcttgactgggaattccatcagggcagaggcctttgatttttcaccggctgccaggacctcagcaaccccagggaatgtttccaaagaatcaattaatggcacgagggcttctccggggcctgcctcaggtcccctcgcggtgctcagcacagtcctgggagccgtttgccgactcaaggcgcctgtcctggtttctcccgccaggcccggccttcccccgtacactcacgcggcaacccccaggcgcgggtttggacagggcttccagaatgggaggagccctgacttccaattgtacaaagttttcctgggagcccgccggtcccagccccacccgggccagagaccgccttacagactaggcctctctgccgccggcgccgctcgcgcgcgttctcctctcttcagccctccctcttcttcccaaccccctctcccgccacgggctgtggcggttggtcgtccctttcccaccccctcagctaacgagcgggctctaggccctctgggattggctgtgcctgagcacatcttccctcagcgtttctgattggtcgctggacgcgcgggatgcgagtccccattggctaggccagggcgcctgcgcggcggggttctcggtcgccagccattcctgaggaggactgccggtcgttcggacgtcttgcctgtcgctggaggagaggtccgggctctccaggaaggtggctgcggcgacaaaatgaagatattcgtgggcaacgtcgacggggcggatacgactccggaggagctggcagccctctttgcgccctacggcacggtcatgagctgcgccgtcatgaaacagttcgccttcgtgcacatgcgcgagaacgcgggcgcgctgcgcgccatcgaagccctgcacggccacgagctgcggccggggcgcgcgctcgtggtggagatgtcgcgcccaaggcctcttaatacttggaagattttcgtgggcaatgtgtcggctgcatgcacgagccaggaactgcgcagcctcttcgagcgccgcggacgcgtcatcgagtgtgacgtggtgaaaggtaacgcggaggcgcgctcgggggcgggggcgcgctcggggcactctgcctgttagccacgccccttacccgggggtcggtcactgcgcggttgggaggggtggggaagtgcgcgggagcaggtcggaggtgttgggggcgcgttgggtagagccaccctcctcccctgcggtccaggaaccgtccaccaagtaggaggaagcggctctgggtgggtgcggcggccactgcgagccaagctacggggccggggacgcgcctgagagccttgcgagtgttccgggggcgcgccttctcctggtctcctgggcctggcacccagcggaaattgggaagtgacgggcacaagccggatcatgaagcggggaagatttctccacttccccacttcctctccagacgtcggtcagagcaagggaagagggaaaaggtgggggctgacgccccaaggccgccctcctgttccctcccgatgaatgtgctcaagcggaaggtaacggggcccttggacgtttctcgggctggggtcttttagtcttgtctggcatgggtctactcatgggcacagttacacgtgggtacgagagg

SEQ ID NO: 2731 - DNA, 6000 bp, Homo sapiens
taggggcaggattctctccttcagattctgcctgtgctttgtgagtgtggacatgagaatttctttccattccttcattccctgaagttttctccttctgtgtagtagataagtatagctttgagaccggcatcctgtcttctcctaccacagcttattcaggtcataatgagagctgcaggggtaacctggttagcagagcctgttagctgcagtaattgcagcttcataccttataggtgagaaaccagatctttctggtaagcagtctgctctgtgaacagaagcccaaggtgtaaggtatacctctgtcccttaaagaggaaacagtggaggatgcagtgtggtctgggacagggggattgggcatgaactcagccagtgggcttagtttctattcccatacctcattggcttacacagggtccatcttctctgcttctaagcctaaatttttagtcatattacacagtcctgccttataccttgacttctcagggatagattatgtagcaaaggggcattggaagagctgtgattctggtcctgactctaacacactttgagtggggcaagccatataaaaactcttgagcatgtatgtccacctgttaaatggaggtaatgattctttgccctgcctacctcacaggattgtgaggcccaaatgaggtcctcctgtacctaagagtgctttgaaaacttgggaagtactgtgaaaaagcggagagatcatattggaatgttgtgaactgcttgcttgttgcagtctatctctcttgccttaattggacatgggctgagagatgggtcataccaaaacgtgagtggtcatttccagtgtttgagagttaggcctcaaaagtgagctaggcctcaaaggtgtttggtgagtttgggttgagaacactgaagaactgagtgatctaggaacgctttctgcattttgttctgctggtttgtacttacaggagatgtgaagatttttatcctgtgttgcagttcatctttgctccttcttctctcaccaggaagttgggtgagatggcagggtttgtaaaggggagaatgggaagaaggctgtaggcaaagatgactgcttgggacagtcagaagctttgttatatgggagctacattttatgacatactcctggagaggagggtttggaggccttggaggtagctggcaacagctgggtgctgttgtgtgtccaatttgggacccatcaggtagcatgccctgcccccctaattgctaaccctctgtctgctgctttatcagactacgcgtttgttcacatggagaaggaagcagatgccaaagccgcaatcgcgcagctcaacggcaaagaagtgaagggcaagcgcatcaacgtggaactctccaccaagggtcagaagaaggggcctggcctggctgtccagtctggggacaagaccaagaaaccaggggctggggatacggccttccctggaactggtggcttctctgccaccttcgactaccagcaggcttttggcaacagcactggtggctttgatgggcaagcccgtcagcccacaccacccttctttggtcgcgaccgcagccctctgcgccgttcacctccccgagcctcttatgtggctcctctgacggcccagccagctacctaccgggcccagccgtccgtgtcactgggagctgcctacagggcccagccttctgcctctttgggtgttggctatcggactcagcccatgacagcccaggcagcctcttaccgcgctcagccctctgtctcccttggggcaccatacaggggccagctggctagtcctagctcccagtctgctgcagcttcttcactcggcccatatggtggagcccagccctcagcctcggccctttcctcctatgggggtcaggcagctgcagcttcttcgctcaactcctatggggctcagggttcctcccttgcctcctatggtaaccagccatcctcttacggcgcccaggctgcctcttcctatggggttcgtgcagctgcttcttcctacaacacccagggagcagcttcctccttaggctcctacggggctcaggcagcctcctatggggcccagtctgcagcctcctcactagcttatggagcccaggcagcttcatataatgcccagccctcggcctcttacaatgcccagtctgccccatatgctgcacagcaggctgcttcctactcttcccaacctgctgcctatgtggcacagccagccacagctgctgcctatgccagccagccagcagcctacgccgcacaagccactaccccaatggctggctcctatggggcccagccggttgtgcagacccagctgaatagttacggggcccaagcatcaatgggcctttcaggctcctatggggctcagtcggctgctgcggccactggctcctatggtgccgcagcagcctacggggcccaaccttctgccaccctggcagctccttaccgcactcagtcatcagcctcattggctgcttcctatgctgcccagcagcatccccaggctgctgcctcctaccgcggccagccaggcaatgcctacgatggggcaggtcagccgtctgcagcctacctgtccatgtcccagggggccgttgccaacgccaacagcaccccgccgccctatgagcgtacccgcctctccccaccccgggccagctacgacgatccctacaaaaaggctgtcgccatgtcgaaaaggtactgtatgcccccccgcctctgcccccagctggggcttagggcaaggggctgaggttggcatgggagggaaactggaggcatcggcccctccctcggtcttctcttctctatttttgtgggatgtccagaggccgaggggagcagtgtctatgaactttcctggtcaccagggttcaggtggagcatagtgctcagcctggggtggtacctgctagtcaggccaggcacagtgtcacctgtctaggctagcccaagtgtcattggagctactgcctgcaggactgtggcccatatcctttcccactgtctcaaggatccttaagcctattacgtggttgtcctggctttggcagggatgtgggttaaagagtagtccctttggcattcactggctaaaggcaagtttacgaggtgcgtccactctgggaagttggggacctcgctttcatccgccgttctgttgataaacaaccaaggtctttctctgcagggcccaggggcggagatagtttgctgtggtgtgggaatgtagaccaaaatccaccttggctagttcagaggggaggacttcagtggagggtttgatttcccactgagttgaagccaggcttgatttttttggcctggatagggtgatgagccttctgacaaaaggagaccaatctcttggagaccactgtgatcacaccctccctgtccccattggcatctccccaatgcccacctggagtcctcccctcaattgtctcattcaccaactgtcttcttctctcgactaggtatggttccgaccggcgtttagccgagctctctgattaccgccgtttatcagagtcgcagctttcgttccgccgctcgccgacaaagtcctcgctggattaccgtcgcctgcccgatgcccattccgattacgcacgctattcgggctcctataatgattacctgcgggcggctcagatgcactctggctaccagcgccgcatgtagggccatcctgggatggggcaccacagggagggagggagaaaagaggtgggtagggttacagatccaggttataactactctggcccatacctttcctggttgtggtttttcatgccctctaccatgtgggccttccccaggagatgatcctgttaagtgttcggcagtaacctactttgttccttcgcctcagcagcaaatcttgctactggctctagatctgcggtttcccctctaccctgcctcccgtctccccagaatgggaatttcttttatgtttttatttttttcctggctcccttttatttttgtgcgcgatatttaaggtcgtctggatggggaagcaacctgcagctgaggtcgccggcgcctttttctttttagatgggaaggaggccaggaaagggtcagcttaaccatttcctatgtgccaagctgtgccagcagtccagggtaccctgactgtccctctgtagactgttgagactgagttcctgttgggacagtcagttggtatgtatccaagtccctgctgaccactaatgttctagctgatggtgagcggcacagtcccacttccccatctccccaagtaggtggtgttagaaaaccttaattttttttcccttttgtatggactacaaataaaacttggggcaatttgcagtttggaaacctggttgtcattgtcttgattgcattcagtgtcaaaggagccaatttgacatccaggaagacatgatagctaaagggaaggcagtcagagaacccaggactggtgaggaaaggggtttgaatgtcggaattagaaggattgccctgtggcccagaaggatttagctcatcgtcgtcctgctagcctgccatctttcagactttccagggcaggtggcctggtcctcagccctcaacttgagttagtcacaccaaaatgcagtaaatgatgcccattttcctctgcctgtgcttgaccattttcactgacttttctccagttcaggaataacctgtgttccaatgggatggttctggggtttggcctcttaggaagtggggaatgggctgctgtggtatttacaggctagtagatcctttaggcagtaggctggaatgagtgctggggctgggacccagaaaggaaccagtagtggagtgggggtaatggcgttgcctgatactgccctatggttggaataaggaagggcagagaaaacttgaagcaggtatggggcattctggccatagagctcgtattttgcctgttgagctgtaccatggagcatcctcctgtgtcctgccaacccctgccattatagtcaccggagactcctttacctatccctatctgttagggttttcagatgtcctctcgctgggtttatatttgaaggtatagaatctgggaaagggtggggtgcaagctaaccaaatagggatgctagggttgggtggggaattgaggactcttctgtgcttttattgtagggctggggatcgaggatctgggcaaaaaatatgacatttccaaccagggacaaaatggaggcttgggcttagtgatgggtaaatggaagactggttgagtgggatgataatgggagaacttactgatgctcttttgggaaaaggtgctttaaagactcgatttgggagcctactggggcaaggcgactggggaggtgtacgtgttagtcaagtggaggtcaggtgggttatcttctgcctccttcactggcttcatgtgaacttgcctgtgacagaatatcttgccctagatgtcctcttccctcttgccatcgtgcaaaagcattcgatcttatgaccgtgagttcttatttgtggatgctaactggggtaatctcagggagtactggggccatggctctttcccttgcttctctttctgctcactgctttgctttcaggtgcttagctgctcctttttatttctttgcaggactgggaaagcatgggaggaggattttgataagtttcttgttctctgcgtggtgatggggtggtctgagggccaagttaataagcctacctttggttattaccctggaaaattgagggttgatggtagggttatgattgtggcctgtgtatttgcaatttttctttgtcagtgtggctttctgtcatcttcctttttctccagtgagggttctgccactgtctcaatcccttggttcctgcaaaaaacagctaaatgtgctctcagggccagtggtgatgttctgtgttgcagccccagctct

SEQ ID NO: 2732 - DNA, 6000 bp, Homo sapiens
tgtggctccactgtgagagctggaaggggttactcatgaggaagtgcctacctggacaggaccaagcctgttccaaaagcgaagcctccttgggacactcggcgccaggttctctggcatgttttgggtcccaagaatcaccttcctcctgctacaaagcaaagggcctgactttccaagccaggctattgcggcctgggaagaaggacccttggtgacacttcccctcctgcccaggggttccttctgctcaactttagtgtccaagaagagttagtcattccatctttttttttctttttttgagacagagtctggttctgttgcccaggctggagtgcagcggcacgatcatgcctcagtgcagccttgaattcccaggctgaagagaccctctcacttcagcctcctgagtagctgggaccacaggcacacctagctaagtggttgtatctttgtcacttcctttttttttttgagacagggtcttgctctgtcacccagaatagagtgcagtgatatgatcttggctttctacagcctcaacctcccgggctcaagggatcctcctgcctcagcccctgagtagttgggactacctacatgtgccatcatgcctagctaatttttatcttttattttttgtggagacggggttttaccatgttgcccaggctggtctcgaactcctgggctcaagcgatctgcatatctcgacctctcaaagtgttgggattacaggcgtgagccactgcgcctggcccatctttgtcacttctatccctcttcccaagattatgtatgctctctgctctatgatacattaccctggtttggggaaggggccggattcaactccttccctcaaagcagtccttagagatgggagctggcaccaagcattctcagtgactgagacttcacgcccagttttaagaatgaatctctcacccaggccctggtgggactcctagcactgctctaaccctgaagtgcgcagtggcaggagacttggatttagccccagcttcaccacttatgaattactttgctttgagtctctgtttctttctgtaaaataaagggattagacctggaaatccccaagtacccctcttcactttgatgcattttatattatttattatttatttattattgagtacagtggggtgatctcagctcactgcaacctctgcctcccaggctcaagacatcctgcctcagcctcctgagtagctgggactacagggccaccacgcctggctacactttgatacattttaacaatacatgctatctagacattgctagattagcctctacctcccttccagaagaggaatccttggcacctatctgggtggtatgcctaagggtcacaagatgtggggtacatgcaagctagttctgattcttgatccatcctgctgagcaaacactgggggctaccccccactctgtggccaactaggagtcctacccaggctgccctttcagtattcctggcctagggctgcagatgggtggggtggtggtgagagtgtcggggtaagccaaggccaggccctgcccctcctgcagcctgtgcatctcagaaggcaggtccaatcaggaactcagagctgtggggctcactagaatccactagaatccaggaggattctaagaagtaagaagtcagcaaacagggaaatgaagactggaggggaaaccgcatcaaaaatacagacaagagggtgccgggtgtggtggctcatgcctgtaatcccagcactttgggaggctgaggcaggcggattgcttgagcccaggagttcgagaccagcctgagcaacatggtgaaaccccatctctacaaaacaaaacaaaactacaaacaattaggaaccctattggctgggtgcagtggctcacgcctgtagttccaatactttgggaggctaaggtggttggatcacctgaggtcaggagttcgagaccagcctggccaatgtggcaaaacactgtctctactaaaaatacaaaaattagctgggtgtggtggcgtgcacttgtaatcccagctatttgggagcctgaggcaggagaattgctcgaacctgggaggctgaggtcgcaatgagccaagattgcgccattgcactccagcttgggtgacagagtgagactccgtctccaaaaaaaaataaaaataaaaaaaaccctatgtatacacaaagctcacccaaattgctaaaggggcaaaaaataataagaaggatataaaatgaaaagtaaatctcactcctactctgtcctctagtccttcacatctactcaggcaatgacttgttaccagctgcctttgatgccctccaggtaccccatgcttatgtaatcaaatatattggtatgtgtattttttaaaaatacagacaatagcatgttaacatactattctacactttgaaaattggttcatatcagagttccacatcggtaccgtggtgttatatatacattggttttcatccaggctcctggctcataaccctcatagcccttgttcagtcttttgttctaatgttgagtgtgtcaggcctcaggagcaggccgcaggaaacaacctcttgacattctgccctcctctcccttgccccaaggcagggctctactgttcaccctcactttcagattgtgggttataagaccctccccagagagaccctcctcctcactctataccctggtgtaaggaatgctgatgtcatgaagcttccattaaaaacccaagaggactggcttcttggagctctgggtagctgaccatgtgcaggttcctccccggtggtgcacctagggagggtgtgcacactccgcaccctcccccgtgcacatcttttcacctttatcctttgtagtatcctttataataagccactaaacgtaagtgtttctttgagttctgtgagctgctccagcaaattaatcaaaccgaaagaggggatcgtgggaaccccaacttgaagctggtcaggcagaagttctggaggcctggacttttgactgggatctgaggggagggagatgcagtcttgggggctgagcctcaacctgtgcgatccgacactatctcccggtagacagagttggaattgaattggaggccacccagctggtctgttgcttggtgtgtggggagaaaaaccccacaccttttttttttttttttgagatggattctcactcttgtccacccaggctagagtgcaatggcgcaatcttggctcactgcaaccaccaccttccaggttgaagcgattctcctgccgcagcctcccgagtagctaggattacaggtgcccaccaccatgcctggctaattttttttggtatttttagtagagatgggggtttcaccatgctggcgaggctggtctcgaactcctgacctcaggtgatccacccgtttcggcctcccaaaacgctaggattacaggcgtgagccattgcgcctggccaacccaatatctttggtcaccaaagtcttacgtgttgataattgtgatggtgtgagagcagaggaaaaacgccatttgagttttccccccaaatagtacataaaagatttgcctcatttaaaaaataaccacacatgttctattttatggaatccatcagttaagtggtcatttattgatgaacatttaggttgtctgagggctcccccccgcccccattccaggtaatgctttataaagcacttttgtggccgggcggggtggctcacgcctgtaatcccagcacttcgggaggccaaggcgggtggataacgaggtcaggagatcgagaccatcctggctaacacggtgaaaccccgtttctactaaaaatacaaaaaaattagccgggcatggtggcgggcgcctgtagtcccagctactcgggagaatggcgtgaacccgggaggcggagcttgcagtgagccgagatagtgccactgcactccagcctgggcgacagagagagactccatctccaaaaaaaaaaatcttttctttttttttttttgtgccacgacgctggctaattttcatatttttagtagaagagggggtctcgccatgttgcccaggctggtctctaactcctgacctcaggtgatccaccccctccgtctcccaaagtcctgggattacagacgtgagccaccgcgcctgccccaataccatcgttttctagaaatgaggaaactgaggctcagagaagtaactactaatctctaacagagccggaatcagatcctaggtttctagattctcattccaagagactaacgcgggagcggggaaggtggctcctgggcagtcaactgactgcacatttccgcccaaggcgggacctggatccagaagtgcttggagctcgcgggtgggaggatcaggatgactgctgctcccggagcccgacttcaactcccaccgggcataggagcctctcagcagcgcgaggggtcgcccagcctggacctggaacgcttgcagcacgaccgtcgcgcgcttccctccggaaccagctcccaccgtcacagccccctccctcggccgctcccggctcagcccaggctggggcggggcctcggaagcaactgccctcgccctagccagggctgccgcttgttaggccaagttttcaaacggcaaaatcaaccgcgctgaagagactgtgcctccttctcttcactccgcatcccagacgcctcagagaaactacctttcagaccttcgcggcctctcctgcgcccgcagcgcccggcagctggggacccgggcttagccacatcgaccgcaacgttcgcgcgccaccttgtgtccattcccttagcctccagggacaacccggaaaccacatttcccagcgtgccgagcgcctctgcgcaggcgcaaagagtttccctcgttgccatgggaacctcgccccttctagagtcctggccgcttgactcagctaagcgcgaaggtgttgtttcttcctgaggtgcgctggggctgggacccggtctgcagaaggtccaggggatggcgtcgggggattgaggagaggagaccaagccggccttgcctccgggaccagcgcttccaaattctctggggcgtcccggcgcgcacacgctcctgaggcctcggcgttctgaggaaaggggctggcgtggcgacccgggtcctcgaggccgagatctggctgtggcccgcgaagccccgcttgcccgcgccagcgtcttgtcaccccgagccgagggcctgcgcgcggccgacaggtactcccgggcgctggcagcccacggggagggttcgcggcgcaggtgaacgcggaggtagaatcagacagggcagtgagtgcgcccggggctggatctggctcagccgctggtggattcggaacccgggaggcccccaggcccggtgggcttcagttcccacgctctgtaaaatggggcttggactggaattctagtgtccattgagattctgttgcagagcagccccctggctctgtgtgacctacgagttccttcctctgtaaaatacggaggctgagaccgatgatcctaacgtctcttcctacggtgcagtatgttacacactgctggccccattgccccttattgcaccccaagtgcaagaagaaagaaggggacctgggatgatctgagcaagactctcagcttgggatctagagtcagagaaacttgggtttgtgactttgggcaaagttaggacatctcttgagactcagcttcttcatttgcaagattggggataatgttaatactacctcaggtttttgaggattaaatgagatgacgcatgtaagtttttagcccagggactgcatagaggaactgctatcccaggtcccaactatcgtttctgataatttctacaatagtccctagccaccataagaccttttcttaatttttgaattcactttatttctgggcaagttcattctcct

SEQ ID NO: 2733 - DNA, 6000 bp, Homo sapiens
aggggccagagggtcgggggaggcaggacagcttctcccccaagctggggtggatgaggggcataggggagcctcggggccccttcaggatcacagcatgtcaaggttggaagggacctcagtgagtacctcctactctccccagcccccaccatcacatcatacagatgaggaagcagccgagacagggagggatttgcacaaatcacacgggggcagggacgtatcctaccacagctcccgacttcccgctctaggcttcttgctgttctaagcccttcagaaagttccaacgagttctgacttttggcaagggggtgggagggtgactgaaaactactcaatacgagtcgaaagagtgtatgtcagctgggggcagtggctcacacctgcccctggctgatataaaaggcagacatggttcctggccttgtgaggtagacacactagtggagaagacagatatgaaacatatgaaaaaaagcttatgtgtcccttctcttctgcctagggtcctcaaggtcatagaaccccataaccccattaggtgtcaggggcagaaacaggactgtgtgaagattcacagcctccacctcccttgccttcacggagcttcggcatctacccttattccaggcggctgctcaggtaatgagtatgaggcagaggtgggaaggctgtcctggtttacacgtggtgggggaggggtccagagcgcaggatgaggctgagagcatggggacaactgtcaagcagggacagatgggactgtgggtggagggctggaagttggatgtttctctcagcactgtgctaagagtgacttagagacatctcagctgcatttggctcacgctgatttatttatttgtttgtttgcttatttttccatgccctttgtcaacaggaatggtttacagatatttattcattcattcattttttgagacagaatctcactctgttgcccaggctggagtgcagtggcgcgatcttggctcactgcaacctccacctcccaggttctagcgattctcctgcctcagcctcctgagtagctgggattacaggcacgtgccaccatgcctggctaatttttgtattattagtagagatggggtttcaccatgtcggccaggctggtcttaaactcctggcctcaggtgatccacttgccccggcctcccaaagtgctgggattacaggcgtgagccatagcgctcggcctactttttttttttttttttttttttgagaaagggtctggctctcttacccaggctgcagtgcagtggcgctatctcagctcactgcaatctccacctcctgggctcaagtgatccaccagccttggtctcccacagtgctgggattaagcatgagccgccgcgcccggctggtttacacatttttaaatgtaacacctatttattcattatttactgagtgccagaccctgtgtgaggtacatacagcaacaaacaaaacagacatggatgctgggtgtggtggctcacgcctgtaatcctagcactttgggaggctaaggcaggaggatcgcctgagcccaggagttcaactccagcctgggcaacagaaggagaccttgtctctaacaaacatttaaaaaattagctggctgtagtggcatgcgccagtagccctagttactcgggaggttgaggtggaaggatcgcttgagcctgggaagttgaggctgcagtgatctatgatcgtgccactacactccagcctgggtgacaaagcaagaacccatcttaacaaacaaaacaaaacagaacaaacaaaacaaagccaaggccgggtgcagtggctcacgcctgtaatcccagcactttggaaggctgagacgggcagatcagttgaggtcaggagtttgagaccagcctggccaacatggcaaaaccccatctctaataaaaatacaagaattagccgggcgtggtggcacacacctgtattcccaggtacttgggaggctgaggcacaagaattgcttgaaccccagaggcggaggttacagtgagccgagatcgcgccactgccctccagcctgggcgacagagcaagactctgtcttcagaaaaaacaaaaaaccaaaaaccagacatggttcctgcccttgtgaggcagacacactagtgaggaagacagatgttaaacaggcaaacacacgcatgaaataacgtgataagtgctgtggctaaaacagggtctagctagagtgtaatgggatgctggtgggggcagaaaagacggcactgagcctggaggaagagaagcaccgccacgttagaaggggtaagacgatgccaagtggtggggacagctaaggatgtgctaaaatccccaggtggaaaaggaagtggagggttcagggagcccacagggttggcatggctgtgcaggtgatcaaggggaggccacaggtggagaaatgggtggcggcggctcctgcaggttcagggcagagtttggattttatggcaaccactggagtgtgcaaacacgggagaggcatgacacaatggacattttaggagggtcactttgctgctgtatggagagtggcctggagggggcagggtggaggcaggagaccactgagagctgttacagtcatccaggtgagaggatggtggcctaggccttggagatggaagaggagggcaaagttgccacctgttaagttgccacctgtttgggaagcagagtggtcaggacttaactgaaagactgtgtaggggtgagggcgagcatgaggtcaaggatgactccagcatactgagccggatgcccagggacaggggcactatttccatggatcccccgggaaggggaagggaagagtaacctcctcccccaaggctccacggaaggggcaagggctggtgacgaggggagcagaagggaaggagagggagaaacaaagtgtatgcatgtatccaaatgtgtacaattattatgtatcaattcaactcatttgaaagtgggtctggagagcaagggtggcagagataaatatatcttctgcactaccacaggacctgaggggcaaggcacgggcaggccctgcaggaatacagggatgccctgggcccttccaagaactaccagagccttggtactgtggggagagtaggggtcagtgagtttctccaggactcccttacattttacacacgtggacccggaagcccaggggaaggggaataccttccagctgatgcatccccacctggcacacagtctggtttttttttttgagatggagtctcactctgttgccaggctagagtgcagtggcgcgatctcggctcactgcaacctccgcctccgggttcaagcaattctcctgcctcagcctccagagtagctgggactacaggcgcgtgacaacatgcccggctactttttgtacttttagtagagacggggtttcaccatgttggccagaatggtctggatctcttgacctcgtgatccgcccgcctcggcctcccaaagtggtaggattacaggcgtaagccaccgtacccggccagtctggggtcttttaaaaatacagacccggggctgggcgcggtggcccatgcctgtaatcccagcactttgggagaccgaggcgggcggatcacttgaggtcaggagttcgagaccagcctggccaacatggtgaaacccgtctctactaaaagtacaaaaattagccaggcgttgtggcaggcgcctgtaatcccagctacttgggaggctgaagcaggagaatcgcttgaacctgggaggcgtgatcgtgccactgtactccagcctgggcgacagagcgaggctctatctcaaaacaaacaaacaaaaaaaccccacacacacacacaaaaaacaaaaaacaggccggtgcagtagctcactccactttgagaggccaaggcggaaagacagcttgaaccccacagttgagaccggcctgggcaacatggcaagactccgtctctacccaaaaaaaaaaaaaaaaaaaaagggccgggcgtggtgggtgtgcctgtggtcccagatactcaggagactgagatgggaggatcccttgagcccaggagttccaggcggcagtgagccgtgttcgcgccactgcactccagcctgggtgacagagcaagaatatgtctcaaaaaacaaacaaacaaaaaaaggcacataaccacgatctaccctcgtaaaacgtttccagagcgtcccagcggtgcccctcatcatctggcggcccctacgcctctctgagactcacagacctactcccctctccagggggcggagcccacaccgctgagcatttactcttgttcttccctctgccaggggcaccgttctacccctttctgcctggagaaactgccgtttttccttaaaggatcctcgaagccggaaggagcagccacctcccactcccggctgctgcaagcaagctgctttgacttctttctagagttggggattgctgctggagtccgagtctcaggcccagagtgggtgcgatggtcttgcttgcaccctgtatcccccggcagacgcccgggaactctactaagtgggtgaccccagagagctcgcccccacactccgactccgagtccagcactcggtccactgcacagggacctcgcgccccacagctgcgtcctctctgaccttcgcaatccggtgcgcggcccgcggaacgccccgatctccaggggcacggaaggccgaggcgtgccgggggagccaggagcagctggctggcgggcgccgcgggcctccccggtcacgtgacaccccggacaacgtgcgccgtcacgtgacggcagagcctgtgagcgtttttctcacgtgacggaggcgcctgcacgtggaccaatggggaggcgggggcggggccggcaggggcggtgcgcgggaagggaccccggacccggaggtcgcggagagctgggcagtgttggccgctggcggagcgctggggcagcatgaagtgcctggtcacgggcggcaacgtgaagggtgagtgcaggtcggcctggcagcggcggtgcagcagccgcggagccgccagcctaacccccttccgctcttctccccgcagtgctcggcaaggccgtccactccctgtcccgcatcggggacgagctctacctggaacccttggaggacggggtgaggggctagggtgtggggggcgggtgggactccagccgggagcgggtaacccggactagagtctcgcccccactaggcgggatgaccgctggcagatttgtcggcaaagtttcagtttcttagtctggcggctgtcatcttcccaggccggtgtgtgaattgaggaaagctgtcctgcgagctcccagggggtgacgtgcacttagagaaactcggggaaggcctgggtgtgcgacccctcctctgcggcagcagcgccggggccgactctgaaggcttccatggggaaaggagggtttttcagcaggtggtggcggagcgggaggacgatagggcaagtgtgtgagcagaagcagccagagggctgggtctgtggctgccccctgaccacgtccctctccctgctcttcgtggcccagctctccctccggacggtgaactcctcccgctctgcctatgcctgctttctctttgccccgctcttcttccagcaataccaggcagccacccctggtcaggacctgctgcgctgtaagatcctgatgaaggtgaggcccttccctcagcagtggcactactccaccccaggaatctccaccagctgtgcctctgccctggggtactcagtagatgctaagtggggagagagacacgtgcaagcccaatccatgcaaaacacagggagggccatggtaaaagcatcacagcggggacctgagagggtggtgacgctcaagttcgtcaagaaaggtaagcacgtcttttggccgggcgcggtggctcacgcct

SEQ ID NO: 2734 - DNA, 6000 bp, Homo sapiens
gagtacaaggaggacggtccagttcatgcaaggccctccgagacactcctacaaagatgttcagggagacttcttctagtcatactttctcaaactcttattaaaacggcccaaggtcacactgttctctatactttcagtagtgatttcaaccaaaaaagaaaactcagaagttcttacgtatttcactggcaggactgggagcagatctgccaaagagcacttctatgagtgaggaggctgggccagaatgatacttctttagagcaatcagggctctgccaagggagaaaactaaaattagaacacctgcaattcagtgcccgagcctctgccccaatgctgccaccaactcccatgagggccacacccacaccatgacttgttgctctcttttgtgcgacaggcatgtaagaatggattagctgtgttgaaggaagatggtacttaggatttccagtcccatccacttactttttcagtcgcctgtaagtgacatcattggcaagttttaacagtctgtaggaattctctcggtccaagctcaactggaaatcgtgggactcatcaaaggccaccgtgaccgacttctgggtgacccgggtcaagatcccagtggccagctgactgccctcattagcagcatcgtacaggcccacgatatcacctgcaaaaacaaagactcagtgacacaagacactggggaaagcttcaatatcattttctgtaataaaatccactatacttcaaatattttatctttgttactttctttagtaaatgcaatcagtaacagttaaaaaaaaaaaaagaaagtaagttaggccgggcacggtggctcacgcctgtaatcccagtactttgggaggcagaggtgggcagatcacgaggtcaggagattgagaccatcctggctaacacagtgaaagcccgtctctactaaaaatacaaaaaattagccaggcgtggtggcgggcacctgtggtcccagctactcgggaggctgaggctgcagtgagccaagattgcaccactgcactccggcctgagcgacagagtgagactccatctcagaaaaaaaaaatctcaaactctgctcaggtctgactccaacctacaggttcccctcctggccctctcctctctcaataccctcatctcatcttctccaaatccagccagtattccagtaattgttgggctaaagtctacgaaatcaaaatatgaaatttaaaactccgtcaccaccaaaacaaggcagagacacttccatagtaaaaagtacagccctggcaacgctgcttcctccaggcttccaaggctgtggttgtctaacacaagcatcccaggcgtgtggttaagaagcttcttctaactgtccctcctttccaaccaggctggcacaagtttagccaaagcatgcttggcacaagaaagggttgggaatacagaagtacacatcctgcatgtttaccagctggaccaaggctgcccattacatagaaacataaagagagtcacatgtagtttttcttttgtttttgtctgttttgagagagggtctcactttgcccccaagctagagtgcagtggcgtgatttcagctcactgcagcctcaacctcccaggttcaagcgatcctcctgcctcagcccatcaagtagcaggaactacaggcacacaccaccacatctggctaatttttctatttttttgcagagatggggttttgccacgttgcccaggctggtctcgaactcctgagatcaagtgatccacccacctcggcctcccaaagtgctaggattacaggcacccagtcacgtgtagttttaagttttctagtagccatattaagaaatttaaaagaggctgggtgcactggctcacacctgtaatcccagcactttgggaggccaaagcaggcggatcacctgaagttgggagttcgagaccagcctgaacaacatggagaaaccccgtctctactaaaaatacaaaattagccaggcacggtggcgcatgcctctaatcccagctactcgggaggctgaggcaggagaatcacttgaaccccggaggcggaggttgcagtgagccgagatcatgccactgcactccagactgggcaataagagcgaaactctgtctcaaaaaaaaaaaaaaaaaaagaaaagaaatgggtaaattattttaataagatattttttatttaacccaatatatgaaaaatattatttcaacatgtaatcagtattcagaaaaattactcaagatattcccaattgtttttttaacataatcttccaaatttggtgtgtattctgtatctgcggcaattacaagccacacttcaaacatttgatgaccacgcatggctaatggctaccattttggacaacgctgatctagacaactaaaacccacatcaattgttggacttctgattaagagttcttcattgcaacgctttattctccaactggtcattttaatccagtctttacgagggtacaagtcacggtctgaatgccagtaaatttcaatgtctgtctaggtcaatacgcacacaccagaagtaaagctgttactgggaagagctgccgcggacccgtatcgcctgggctcaaaggtgaccagcagccgtccgtacagcccagtgcgctggctggatacctgcagcttcagcaaacacacgcctcggctctggagctctttcagagagatgttctcctgccaggacctggaagacacccggtattgatgcttcaggatttttactagtttctacttccacccacccaggaaaagtaaaagagaaagaaacatagataaagatctactcacaggcactaaatatgtcccaatggaactccgaattggctccactcccaatcccgctcctcctacatccccctagggcagttaatgccacaacccttctctcagttacctgagacagatctttcaatcagcattcccctctctcctcccatctgtcactaagtcctatcaggcccctcccatttctacctggacttctctgcctctcatcctggctgccacagccccggttcaaatccacatcactgctcacctggactaaacagagcctctcaactaccttacctctggcctctccacgtccaatcaaaagcaggagacccaagaaatcctcctaaaatgcaaagctattcgcctccctcacctgcttaaccccgctgatggcccatccttcatacacagaacagaagactagctccttagccaggcccttcccaggctcgccctgccagtctgctcagcatcctcagaaagagccactgccatgggggctgactctgtccttggcaccacgctgagcacctgactgacaggggatcgtttcattctcagagcaagcctgtgaggtgggaatcatcccagttttacagatgaagtaagtaaggctcagagacagaacctgcaaagtcacacagccataaatgaaacagctgggattctaagaaactcaacataactgcaaaagctctccattgccatgatcaaaagcatctcagacaaatcctacccacatatggctgactgcaaactctggaagcagactgcctgacagcaaatcgggctacactgtgtcaccccggggcaagttacttaacccctctctgtctccatctccttagacggaaaatgacagtaacagaaacctacactgcggccgggcacggtggctcacgcctgtaatcccaacactttgggaggccaaggcgggcagaccacgaggtcaggagatcgagaccatcctggccaacatggtgaaaccctgtctctactaaaaatacaaaaaattagcaggacgtggtggcgcgcctgtagtcccagccactcaggaggctgaggcaggagaatcgcttgaacccgggagatggaagctgcagtaagccgagatcgtgccactgcactccagcctgggcgacagagagagactctgtctaaaaaaaaaaaaaagaaaaagaaaaaaaagaaacttacactgtagggttggcatgggatgaggtgtaaaagaattaacgcatggaaagtacgtaagtgttagctctgattgttttggacaagtaaatagtcccattcggaaacaagcccggctctcacatggctccccacacctctcaggacggctccccaccctactccgcacccaccagcttaactccaattttccttcaggcaccactccctccttgaagccaccatgaccctccccagggaagggccttcctcctccaggctctttccccgcgacacgcacgcagccggccctggacgcactggaggggaagggactctctgcttatgcccagcccgccgctggccggatcgggggcagccagtgcacctgactcatgctgccggggcctgactgagaatgggcgcaaaccatgtttactgaatgaataagggaaagggctgctaactcgctgcgggtggaactggggtcggggccagggcccaggagtgtaagcttagtggggggtctcgggtcgggaaatcaaagtgcttcttaagggtccccaaacggaacgcgctgcccaggaagtgatgagactgacaactcgggaggtggccaagcaggggacggacgatccctgcccctgactcgaagggtcggagacgaaattcccgccccagactatgaggccgagcccctcggagactctgcccgggacacggcgggaccgaccgcgagggagcggcgccggcggcctcccgtacctgcgctcctccacctccgcgtctctctcaagctccagcaggtccagttgcttggtcacgaagctctccacagctgccgaggccatcgccgccgccggcctgggcccctagaagccgacgtcccgcttctgcgccgggccggtgttacagcggaccggtgttccccgccgggcccgtgcgttacgcacgcggttcgcgtcgtttccgtttccggccgaggctgcggccatggcagcatcttccctgacggtcaccttagggcggctggcgtccgcgtgcagccacagcatcctgagaccttcggggcccggagcaggtgagacctgggatatgggaggaagggaggacgcagagcgagcgctgctccctgcggtctcgccacgtatgtgcctgggtccgacctggtgccttgtgtgttgatcgcatttgtggtgaatatagcacgggttttggagtcgggggaacccaggttcagattttgattccttcagttagtagcctgaatactgacaatagcccttgaactttggtataggccctatgttatgggggagaagagtgaggctcagaggagctaggtaacgtgcccagggtcacacagcggggaagtggaagaagagtacttcaggcgcagtcatttcggctccaaagcctgtgcttgaaccactgcccccaggctgcgagctggtctgaaaaatggtgatggatatcctcgcctaatctgaactcattctgcaaaagaaacagccgtatttaaggcgctgggctgatacgaggctccaaaaaggttatgtccgttaaaaactctataaatctctgcttgaaaatggttggagtgtgtatttgtgtgcatgagtgtttatgtatgttttaaacctgggtttcatgtctcaccatgacccccaaaaatggaaaactggatctaactctatattggacgatattaaaagaatagtaccataattcccaaaacttggaagcaacccagatgtccttcaggagatgaatggttacataaactgtaggacatccatacagtagaatattatgcagcaataaaaagaaatgagtcatgaagagacatggaggaaacttacatacatgttactaagtaaaagaagccaacctgaaaaggggacatcttgtatgtttcccactatgacattctggaaaaggcaaatctaaggagacagtaaaaagttacatggggggtaagaggattggggg

SEQ ID NO: 2735 - DNA, 6000 bp, Homo sapiens
ccaccacatctggctaatttttgtatttttagtagagatggggtttcgccacattggccaggctggtctcgaactcctggcctcaagtgatccgcccacctcggcctcccaaaattctgggattacaggcatgagccaccgtgcccagcccaagatcttcttcatttcctaactctcccctgcctgctcagcctcaggtaggtggaggggagaggaagggaggaaagaaagaggggggcctagattcaaaaggaggtggggtctttctttctgtagtctacaaagagggagggtaggtagatcccaaaccgaattattcagaaccgtttttaagcttttattgctgctgccactgcaaagtaaaatttcagtctttctactccagggttgcattaggaggaagaaaacgacttgctccatatgcaaaatgcaccggcctccacaccaaagaccaggcccacccgtcctgttggctggcgcgcaggaggggctccacaccaatctgggagaggaatgaatgctttcccagtggggtagggcttggagctcctagagacatgaactccgtgatctgtggttggtcaatgaccttgagagacaaggaggacaaggaaggtgctgctctctacaaaacgtctttgacctgtttgatgtctagtctccccatacgggttcagcagtgcccagtgtgagaagaacacgctggcaggaaggtgctaacctctcacacaggacacaggggtagtaggcacaacctacccacatgctcacttacaacttcttcctatgctcagaatgttttgccgcttctttgagaagcaagaaagactcccacatctccccactgcagaggatccctggagtcccagcagcagttccagcagccaatgttttgtgagtgctgactgtatgccaggcactgttctaagagctttaaatgtatacatttacttaatcctctccaacacccatgcagatagaaatgaacattacttccatcttgcagaagcctggcgtcccaggctgtgaggggcagccggaactgcaccccgggggggtccctacagtaactgctatccctgcactgctcctgtgtctcccaccagtgagtggaactttgtcgaatgttttctgcagtttatgatacctaaaaatgttttctcaagtataaaattttaacactgaatgtgctttttcaaataatgagtttctcttagagactctgatacaaacttcctcatcagaaatcttgagttaagacttcaagctcctccataataaaagagagcaaacacatacagaatttctctttggtctcttgcagttacgtcttcttttaagggtctcagaaaaataccgtcaaaaaagttaaagctgaaagtggtggtgcatgcctgtaatcccagctactcaggaggctgaggcgggaggaccactttaggccaggagttcaaaaccagtctgggaaacatagtgaaactctgtctcttaaaaacaaaagaggaaatttaaatattattgagaaccaaaaggtaggaagttttgactttagaaagatggttctacaaatgaaaggaaaagaggcaccaaaacccacattttgatattaccctggtagatatgaagtgctctgtgaattgaaccttcgagaagcagaccaaagggaggctgagggaagaagagaaacacagatcattaccattaatactacaaatgcaaactgccctttatgatgctaaatgcacagctgctgctcctggtacatggtatgaaccactgcatgacagcctgcccacagaaacacctaggtgagcaaaactacaagaacgtcacttacagctactggttatatgtgttgagatcagttagccacatcatctacaagcgcctgagaccagaaccacccgtccactaactcatgccttgactaagtgcctggtaggttcagactctgatctgtgcccaagcgtgggagcagcctccaagatggccctgctgggccccgcctcctgctattcttacccctgttagccccctgggagtggcctgtgtgtccaacagctagtgacagacatgctagcacgtggcttctgggatgaggtgataaccaactgggacttccatcttggatgcctgtgctcaccctttctgatctctggccttagggctgccctgctgtgagcagccctacctagaggtccacatggcggggaactaggcctatcgccaacacccatgggaacgaccttgcaggtagattctccagccgctggcgcagtggagtcttgagataactacagcccctgcagacttgcttgctgcaagctaagaccctgagccagaaccagccacttaagctgcttctgtgttcctggctctcagaactggtgtgagttaataaatgttttaagctgctaagttttggggtaatttctgatgtaaccgtagataacgcatacaccaggaatacaccaggaaacaaagacattcaatctactgagaagacaggggatcaaaataagtgcttaggtgtaaaaagcagagaacagtttctcaataaccacttttaaagaaactcagctataatttacacaccataaaaaccacctttttaaagttcacccattagcaccagctccccatttgcatctcctcggctgctttctcctctcctctcccatttgggcatccggggctcaacccttggccttgacctcctctccgcccatggccattcctctggtgactgcatccagtccgatggatttaaacacccccaatgtgctggtgactcccaagtttacacctccagccagggcttctctcctggttttgcatacccacctatctatctgccttagccactcgtgtctgacgagcacctcacacctccagaggctcctcatttcttcccatgcctgcttctcccacactcctccctctcacatgagggcaacttcatcctcccagttgctcaggccccaaacctccatcagttttgactcttctctcgcacactactcagtcaacccattggcaaatccatcccactattaaaaacttagcaggcttctgtacctaatttgcttctagctttgtttttgggtccccagggaacaaacagtctccttcctctcccacaggatttcctttaggtagtcctagagactgtgactgtgtacttccatcacgtctcctttgctcactcttcaaggccccagctgctcactgttttggtcaccttgtctctactcgcttcactgtgtgtctttctctcctaatgcgtgagtctgtacttgaacatagcattggaggggtggtttcatgtaggtaggtagaatggagtaagtcccactgcttttgtaaaaactttcctgcctacttaaacctaagttttattatggaaaatgtcaagcatacaaaagtaaagagaacagaatagtgaactctctcaattatccctttccaggttcaacagttaccaactcatggccaattttggcatctacattgcctctggcccaactctgtgattattattaatttcttaatagactttattttttagcacagttttagtttcacaccaaaattgagtggaaggtacagagagttcccatatgtcccctgtccatgtgcccacagcttcctatcaacatccctcaccagagtggtacaatctttacaattgatgaacctacattgacacatcattgttatccaaagtccatagtctacattaggggttcacccttggtagtgtacattctatggatttggacaaacttataatgacatgtatctaccattatatcatacagaatagtttcactgccctaaaaatcctctgagctccacctatttatccttttctcccccaatcctcttaccccccatgtaactttttactgtctccttagatttgccttttccagaatgtcatagtgggaaacatacaagatgtccccttttcaggttggcttcttttacttagtaacatgtatgtaagtttcctccatgtctcttcatgactcatttctttttattgctgcataatattctactgtatggatgtcctacagtttatgtaaccattcatctcctgaaggacatctgggttgcttccaagttttgggaattatggtactattcttttaatatcgtccaatatagagttagatccagttttccatttttgggggtcatggtgagacatgaaacccaggtttaaaacatacataaacactcatgcacacaaatacacactccaaccattttcaagcagagatttatagagtttttaacggacataacctttttggagcctcgtatcagcccagcgccttaaatacggctgtttcttttgcagaatgagttcagattaggcgaggatatccatcaccatttttcagaccagctcgcagcctgggggcagtggttcaagcacaggctttggagccgaaatgactgcgcctgaagtactcttcttccacttccccgctgtgtgaccctgggcacgttacctagctcctctgagcctcactcttctcccccataacatagggcctataccaaagttcaagggctattgtcagtattcaggctactaactgaaggaatcaaaatctgaacctgggttcccccgactccaaaacccgtgctatattcaccacaaatgcgatcaacacacaaggcaccaggtcggacccaggcacatacgtggcgagaccgcagggagcagcgctcgctctgcgtcctcccttcctcccatatcccaggtctcacctgctccgggccccgaaggtctcaggatgctgtggctgcacgcggacgccagccgccctaaggtgaccgtcagggaagatgctgccatggccgcagcctcggccggaaacggaaacgacgcgaaccgcgtgcgtaacgcacgggcccggcggggaacaccggtccgctgtaacaccggcccggcgcagaagcgggacgtcggcttctaggggcccaggccggcggcggcgatggcctcggcagctgtggagagcttcgtgaccaagcaactggacctgctggagcttgagagagacgcggaggtggaggagcgcaggtacgggaggccgccggcgccgctccctcgcggtcggtcccgccgtgtcccgggcagagtctccgaggggctcggcctcatagtctggggcgggaatttcgtctccgacccttcgagtcaggggcagggatcgtccgtcccctgcttggccacctcccgagttgtcagtctcatcacttcctgggcagcgcgttccgtttggggacccttaagaagcactttgatttcccgacccgagaccccccactaagcttacactcctgggccctggccccgaccccagttccacccgcagcgagttagcagccctttcccttattcattcagtaaacatggtttgcgcccattctcagtcaggccccggcagcatgagtcaggtgcactggctgcccccgatccggccagcggcgggctgggcataagcagagagtcccttcccctccagtgcgtccagggccggctgcgtgcgtgtcgcggggaaagagcctggaggaggaaggcccttccctggggagggtcatggtggcttcaaggagggagtggtgcctgaaggaaaattggagttaagctggtgggtgcggagtagggtggggagccgtcctgagaggtgtggggagccatgtgagagccgggcttgtttccgaatgggactatttacttgtccaaaacaatcagagctaacacttacgtactttccatgcgttaattcttttacacctcatcccatgccaaccctacagtgtaagtttcttttttttctttttcttttttttttttttagacagagtctctctctgtcgcccaggctggagtgcagtggcacgatctcggcttactgcagcttccatctcccgggttcaagcgattctcctgcctcagcctcctgagtggctgggact

SEQ ID NO: 2736 - DNA, 6000 bp, Homo sapiens
catttatctgtacatcgctggatattattatctctcttcttttaagatgataaaagaagttaaatgatttgcctaaagccacactgctagtaagtggtaaagctggaattcaggcccagatgtttgtttgtttgtttgtttgctttcttgcttctcacaagaaacattgtttccaaagcccatatgcttttcattcaattacgctccaaattggaaaaggaaaaatcaaactggataggccttagacacagaaacagaaaagctatctcttctcttccccctccagctctcctgcccttaacccaacccccagcctacccaatcctgtgcagagctgtagtcattcctttctagtcccattatcccaacccagacttggagatacctttcattatttatcttgatttgataatccaattactgccttgctttgcaccacttttgcccattatcccttcttcccagaatctcctttctattgtccaaggttaagattaaacccattctttctaatacctctacctattttctattttcctagtttgaaaagacttgacactgtagttaagattcctcaaataatttccttaaacttttgattcacgcaaacatccatatagaaaactatacatatcaaaagtatatacctcaaatcattttcacaaactcaacacaccatgcaaccagcaccaagatcaagaatattaccttcatctcaaaagcctcctcatactcccttccagtttctaccctcccaagggtaaccactaatccagctaagtcattcaaccctaatattggcaggtccattgggttgggctgggcactctaaacagtgtggttgatataggagttaagaagaaatcacttaggcagatagtaagggtatagaagtccatggtaaggcttttctttttcatgaaaagcagccccaaatcattttctaacaaagaccagcctgtaaagttgagcttcagacatagacaagcaagctgggagcttgcacgggtgaatgtgggcaggaactagggactagacatgttcaagatggcgactccatcatcccttctctgccagccacatgtacagtaaggagcagacaagatggtgccagccaaggagagttcatttgcatcataagatcagggtggggataccagccttcacccctgggctatgtaaatgtcacacctgatcgaaacaatctgtgagccctacataaatcagacaccgcctcctcaagctggactataaagtccagcgcatctgccaccatgatcactaggagacccctctctctatatataaagagaactgtttctctttctcttctgcctattaaacctccgctcctaaactcttcgtgtgtgttagtgtcctaaattttcctggtgccagactaccaaccccagggtatatagcccagacaatgtagccacctcattgtcatctgctccatttggcatagggataagtatcaagactcttccctagctaattatcttgacttacttcccactcctgtggagcactgacaagaggcctgagttctgatcccacagcaaccacctaataatcctggaaaaatctatttctctctgagccgcaacaatccagtctctaaaatatggacaatggccaggcacagtgggtcacacctgtaatcccagcagtttgggaggccgaagtgggcggatcacttgaggtcagaaatttaagaccagcctgaccaacaaggcgaaaccccctctctactaaaaatacagttgggtgtggtggtgcatacctgtgatcccagctactcaggaggtggaggcatgagaatcgcatgaacctgggaggcagaggttgcagtgagtggagatcatgccactgcactccaccctgggcgacagatcaagactccatctcaaaaaataaaacaaaataaataaacaggctgggcacggtggctcacacctataatcccagcactttgggaggctgaggtgggcggattgcctgaggtcgggagttcgaggccagcctgaccaacatggagaaaccctgtctctactaaaaatacaaaattagctgggcatggtggtgcatgcctgtaatcccagctactcgagaagctgaggcaggagaatcgcttgaacccgggaggcagaggttgcagtgagcagagattgcgccattgcactccagcctgggcaacaggagcaaaactccgtctcaaaataaataaataaataataaaataaaatatggacaatataatacatttgcagcattgctatgaggactaaatgaaatattgctcttaaagtacctggtatagtaggtctggtatataataacgtaatagtcaacgatcatagattttattgtgtgcaggtactgcatgagagttttatgtatattatctcatttgtaactggccaaatagaattatttgattttctcatctgcttccagtctttcacgtctcagtcaagggcatcaccatttacctaaagatttatgttccatatctaggtattttccttgattcctgttttttccacactccactcgtgtaattcatcagcaggttttgccgactctaaaacaaaactcaagtcactcagttctctcaatttccactaccactactctattttaaaaaatgtattggtttggcgttgtggcttacgcctgtaatcccagcactttgggaggccaaggcaggtggatcacctgaggtcaggagttcgagaccagcctggccaacatggcgaaaccccctctctactagaactacaacaaaattagccgggtgtggtggcgcatgccagtaatcccagcaacttgggaggcagaggcaggagaatcacttgaacccgggaggcagaggttacagtgagccgagatcgcgccattgcactccaacctggggaacaagagcaaaactctgtctcaaaaaaaaaaaaaattattattttttgagacagggtctcactctgtcacccaggctgtatgcagtggcatgatcaagtgctcactgcaacctctacctcctgggctcaatccatcctcccacttcagaactgggaccacagaccacagaccacaggctcgtgccaccatggctttttttttttttttttttagtagggacggagtttcagtatgttgctcaggctggtctcgaactcctggggctcaagtgatccacttgccttggcctcccaaagtgctgggattataggtgtgagctactgtgcctggcactgctaccctattttattttatttatttattttgaggggggtctcactctgtttcccaggctggagtgcagtggcaccatctcagctcaccgcaacctcggtctcccaggttcaagtgattctgctgcctcagcctcccgagtagctgggattacaggcgtgtaccaccacacctggttaatttttgtatttttagtagagacggggtttcgccatgtttgccaggctggtctcgaactcctgacctcaggtgatctgcctgcctcggcctcccaaagtgtgggattacaggtgtgagccactgcgccgagccattttattttatttttagacggagtctctctctgtttcccaagctgaagtgcagtggcatgatctcggctcactgcaacctccacctcctggattcaagacattctcatgcctcagccctgggagtaactgggactataggcacgtgccaccacgcccggctaatttttatatttttagtagagacagggtttcaccatgtgggcctggcaggcctcgaactcctgacctcaggtgattcatccccctaggcctcccaaagtgctgggattacaggcgttagccaccgcgcccggtctgctaccctattttaaaccaccactatctttcacttaaaaatctcagaatgtaagttacatgtgaacaggctcggtttattattgctcatagctgcagccccagcacctcaacactcagaatagtatctggcctttctcaggattttgctatgctttgaatgaatgcatgtcgcgacaagcctttgaagtaggtactgttattattcccattttatagataaggaaataggctcctagtggctaaagaattacctaagtttacacaacaaacagcaaaaccaggattcaaacccagtaagtctgactctagagcccactctcttacgcactacacctgcgatactgaactgcaccggcttatgctgaagtcaattattaaagatttttgcgggggtgatactaggagaaatttgagttgaaattccccaacctgataacttttctccaagttttcctgagaacacagctcaagcgcctcttcacagtctcctaggcacaacgatttggtttctcccaagtctctctcatccgcctcttctcctaacaatccagagataatgaactcttttccagcaaattctcctgcttctatccgaaacactcagcctctcctcaacccctctggaaaaaccttccctaatttctcaactctgagggattataacaggcagtacttttccccagttggcagcactactaaaattacttgttttcaatagtctcccctttatcctggctttcccgggtttcatcacgcgcagccaacctcggtagggaaatattatacccaatgacatctgttgagagaccatattcactaatgtttattacagtataataataattgttctattttatcgttagttatttttgttaatctcttactgtgcctaatttataaattaaactttatcataggtacgtaggtataggaaaaaaccagccaggaggccccgcacttcggtgttttctactagctctgcctacctccgtctgcgccgtctccctgactagtttgacccttcgagggccgccgtagtgcgtcgcctccgttgccggggaaacgacccgggacctgggagggagcaaagacgtttcccgccggcgggagctgtggctgtgattgagagaggggttagaggcgggtcccagcgctgccgcaccatggcggaccagctttatctggaaaatatagacgagttcgtcacggaccaaaacaagatcgtgagcagctactactggggaacgcgggcgtgcgaccggggtcctgggcccggctagggcggcgggagccttgaccctctgtctgcttgtggcttcgtggggaccaggggagacaggtccccacgaggggacctgggcgagctctgtgccccagagcgagcgaggactcgtcgggaaggtcctccagcacacacggaagtccgcgtcccttgggtgggcgtgctgggaacagagcctggggctggagccgcggagaccgggcgcggagggagggccgttggctgagagttctaaggcgtccctacacctttcttttaaggtggttggcgtttaaagttttaagtttacagttgaggaaatcgtgtcttaactgtgttaagttacaagttgcgtaacctccagatactgtttcctcttcctggaaatttaagcattgatagaggtttgatccgcttcacacgggtgaggaaaagatcgagcgaattgatggatgtgagtgcactttgcaaaccgtgatgattgagtgcctgctgtgtgccaaggcactttaatctttacagtgacctccccgcaccccatcccaggtcggtggtggtatcccgagatgaggaaattgaagctgaggggccaaataacttgtttatttgcgtttggtaagggataggcagtttttcaacctaggtctgtcctcttactaatgctttcttctacatcacactgcctttgcctaacctgtgcaagtcttctaactattggaagcttgacatttggaattggaagagactttgagagaagagagtgcaggcatcctgggtctaggagggatgaaggcttgatgctggtagttcccaatctaatctcttataaaaatatttacccacttttttcgtttcctgacccctgcaccacct

SEQ ID NO: 2737 - DNA, 6000 bp, Homo sapiens
gccctcactagcctcctttgtccagttaactcctactcatctttcagacctcactgcaaacatcagttcccaaggaaagttttctctggacaactctcggtatatcagctccctgggttagatgtgcttatttcccatacgtgttaccctcactggcctgcacattcacaagctcctgtgttcacactggcacctttacagtcagtggcagtgggaaaaccactggaactgaggaaagagcattggtcttggggacaaaaggcccaactctttgtcttagctttgctacaaactttgtgtgaccttagcaagctcatttcccctctctgggggctgtgtctagtcgggaggaatggaggcccccatgtgatccaaacattcacttactcaagtatttgtccattcattcattgacttcattcattcagccatttgctcaatgacgctatggagcctgtcttctgtgttgggatgctggggactcagagaaatcaaaagcagaggttcacagcagagtgggagggacaaatgtagactgctcaatatatgactaggcacacagttacacatactgaagagaggtcagacagctgctgtaggagcccagaggaagtagcagttcgttcagacctgggaagccttttttgagaaaatgaccttgccgagttgggaaaggagaagggaaaatgctgtctaggcacctgcctttcagggttcttgggtatgtgcagtttctttggggaatggcctttttcttttacaattctcacctgctttctgcaagcgtctcactcttctagtcctgccccttcaaagctacccctcccccaaggctgcctgagccatctttctaagtgctttctgttgcccacgatgaaactcatgttcttcggcctggtagtcaggttcttctcacccggccctagcttcctcttccaatctttttgcctgttgctctcccatgcagcctttgtttcagccatgttagactctgctgctgtcacttcctctacccctgtgcctttgctcatgctgttcctcctgcatagaatactctcctctcctaggaagccttcctggacaacacgtgacagttagcacctttctcttagtgcttccactgtactttatacatcatctcgattattgtacttaccactttgtaccaaatgagctgcgatctcctttcagttagggattctatgtgcatcattttctgaaacgtagtgcccaggctggacacctggcaaaggtctgatgggtgtttgactagacaggtaagtgaatggaagaaagagggctctgttgaaaggaaggggatagatttaactcaatacagtttgagacactgaaagacccatctgccctatcttgctcttgtttacccaatgcatcaggcccatgaggtgggaggaggaagtggaggcaaatggattggggtaggcttagctttttggccctggaaactgaatgtttgatttaaatacccaacatggtactaattagctgttaaaacactagctattcccgagccaaacagatctaaacacctattgttcatctactaaactcccaatcatcctttataactttggtgaagcctgctctgaccttgcccaccagctcctgaagagttggtcactcttaccacttgaccttggaccccttctatcattgcatatacattgcatttggccaccttataatctatgttctctaaacttggatatatgtttctctgggggatatatagcactatgtaaatattataataatttaattctgtgatttaaaatatttttatgttgaaacaatcagccatattatgaaataggatcccaataataaaagagtttttagggccgggcgcggtggctcatgcctgtaatcccagcactttgggaggctgaggtgggtggatcatttgaggtcaggagttcaagaccaccctgaccaacatggtgaaatcctgtctctactaaaaatacaaaaaaacttagctgggtgtggtggtgcatgcctgtagtcccagctacttgggaggctgaggcaggagaatcacttgaacctgggaggcagaggtagcagtgagctgagatcgcaccactgcactccagcctgagtcacagagagagactctgtctcaaaaacaagaaagaaaagtttttagaatgaaataggacatatgaaaataatgacagctagtatttattaaaaatgtactatctcccagacagtgtgttaaatgctttacatcatcttgaatactttgcaagcagcaggcttttgagttcttcccaatgcccctagggatgagagtcctagttctcctaatgttttcggcatttgggaaaagtgggagaagggttgtttacttgagctctgcatttccagaacccagtagctagcctgtgcaaaggtgaacctcagtaaaggcttgtggaaagaatagatcctgctctctgctggaatgtcctttcctccctctctcctgacttggtgaactcttattggcccttcaataccctgtttcaatgtcacctccactgtgaaatctgactctcaactattttctctggctcccactgcctttgggcttccctcagacccagcagtgagtaactggatgatcactcttcgtttgtttttgatatggggtctcagtctgttgcccaagctggagtacagtggcatgatcttgactcactgcagcctcaacctccccaggctcaggtaatcctcccacctcagcctcctcagtagctgggactataggtgaaaacgacatgctgggctaatttttgtatttttgtagagacaaggttttgccatgttgcccaggctggtcccaaattcttgggctcaagcaagaattgtgataatgtgttatggcagcctcagaaaactaatacagcttagaaacagaaatgtgttttctgtgaaattcccccagatcttggcaccacatgagttcaatcagataatatttgggatttcccagtgactcctttctcaacaaacacctgatcaagcgactcctttctcaacaaacacctgaccacacgccccaggctccagccatgaggaaccactcagtgtgtcagaacaggagacagtgtgacatctttgtgatccagctctgagaaaagatccaaggtgtttttcaggcttctgaacaccctggaaagatagtatgcttacattttgtttaaaaaatttaaaatgcaactactatatgccaggtcctgtgtgggcactttacatatgttgatttactttaatccctacagcaatcctattactattttaaagctgagagaggggaagtgacttgccttgggatacatagctcaaaggtggtagagccaagattccaaagtgcctgattcctattgtgtctgactctaaaacactatgttctttctgctatgttcatccaggtggtggaaaaattcagtctaggagtaaaaaaaggaagatcaacatcctgcagaatgactcatgctattcattatagaagcaattgctggagatgctatcattgtggatcacggaagtcttcatggaagaggtggcatttgagctgggccttcactgcaaaaaaaaaaaaaaaaaatttcctgattctctgtcaggcactggggatccagagatgaatcagacaaagtccttttgcttgaagaattcacagtattttgtgtgtgtgtgggaaggagggtggctgcttacatgtgttaaaagacaatgtggccaggcctggtggctcatgcctgtaatcccaacactttgggagcccgagactggaggatcgcttgagcctgggagtttgagactagtctgggaaatatggccagaaccccatctttacaaaaaaattttaaaattagctgggcctggtggcatgtgcctgtattcccagctacttaggagggtgaggtgggaggatcacttgagcccaggaggtcgaggctgcaatgagccgtgattttgccactgcactccagcccgggcgaaagaatgaggcactgttaaaaaaaattaatagaataatccagacccacggtagggtcaaaattcctaactcaaggtcccagagaggctcagagaagccttttggaagaagggactcctgccccagctaagactgatggataagtagcaaaggctttctggggacacagcacaaacagcccacctgaagcggtgaatcggcgtcctgggtgcctggcacaccttgtagctcagcttactagctagtggagtgcgaaggggcgtgtacttgtcggttggagctggtcatgaaagagctcgtgggactgcccgacggttctcaggtcccagtgcatcctgcgtggtggctctctgctgaaccataaagcattccttttcaatccctgcacgctcacgccgggaaaagactgcacaaggggcctgccaaggcagacaagcgatcgccacccagctggcttccgagggtccccgccctccaccggaggcctgttaccacggcaaccagtgagggcggaagtggctcagaagaccggttctccctaatcaggtgactctcccgcctcctgcacgtgacaccggagcccagaagcgcgctctacctaatcaagaccccacccctctttccctttactgacaattgacagcgacctcttgcaatggcccttccgcctccaccaggagactctgcccgttggtagtaaaagaaccaattagactgggaaaaaaagaagcaacgccccaggtttcaccccggcttgacagacgcaattgaggccatccttgagtccctccgcccccaagtccagtaatgccagcgatggacagaccttctacccaatagcacgccccttttctgccgttgggtcccgcccccttgagggctaagccaatgagcgctccgggtctcagcggggtggaggggttgcactgcggtaatatggctcttccttagccagcggcggcaacggcggcagcggcggcagcggcggcggctactgtctgggctgagcagtagtgcctctcgggtggcgggtttctaggctgcaggggcttggtaggtggtggcaagggggcggcggcggatgccggaagagtgcccgccccgccgcttggcggcccctggatcgagatgagcgcctccgcgtcggtcgggggccccgtcccccagccacccccgggcccggccgctgctctgcctcccggttctgccgcgcgggccctgcatgtggagctgccgtctcagcaggtaagcccgcgcggctcgcagcactcgggagggacccgggcaggcccgcgtggagagcttgctggctccgggctgaccccgcgagccgggacacccagagcagggacccggagggctcgcgggactgaggaagactgtcaggaggtttgtgcggggaggggtccagtgatggccgaacctccgggagatcccggagtcctaggagaatcccgttacaggagatgggcttgttaagggacaagcagccagccagctcaagtccctggggccccggcccgaggccgcctcccccaacgcagggagccggggattgccccgcgcagaccctctccctcgttccgcccaggaagggacccggggaaccccctgtgtcccacgggccatagtgaaagcacttttcctttctttccccacctggccatccccgcttacggagaaaccagtttgtactcttcgtgcaagagccctggaggagactttagggtgtctaccatttgctttaatctcccctgattattaagtattcggcctctttagagaaatgtattcaagacttgggggtttccttcctaattctccgagtcccaaggaacgcatcttaataattaggaggactttttccttcttcattcccttcagtgagtctctgtggaaggaggatttgatgtatatattcatgtgttcctccatcctttaggaagggctttgaggacttcttggctctgcgttgtaggaagataaga

SEQ ID NO: 2738 - DNA, 6000 bp, Homo sapiens
ccggctaattttttgtatttttagtagagatggggtttcaccttgttagccaggatggtctcgatctcctgacctcacgatccacccgcctcggcctcccaaagtgctgggattacaggcgtgagccaccgcgcccggccaaatgtcttcttttgagaagtgtctgttcatactctttgcccactttttgatggggttgtttgattttttcttgtaaatttgtttaagatctttgtagattctggatattagccctttgtcagatgagtagattgcaaaaattttctcccattctgtaggttgcctgttcactctgatggtagtttcttttgctgcgtagaagctctttagtttaattagatcccatttgtcaattttggcttttgttgctgttgcttttggtgttttagacatgaagtccttgcccatgcctttgtcctgaatggtattgcctaggttttctcctaggggtttttatggttttaggtctgatgtttaagtctttaatccgtcttgaattaatttttgtataaggtgtaaggaagggatccagtttcagcttttgacatatggctagccagttttcccagcaccatttattaaataggatttcttgtttttgtcaggtttgtcaaagatcagatggttgtagatgtgtggtattatttctgagggctctgttctgttccattgatctatatctctgttttggtaccagtaccatgctgttttggttactgtagccttgtagtatagtttgaagtcaggtattgtgatgcctctagttttgttcttttggcttaggattgtcttggcaatgcgggctcttttttggttccatatgaactttaaagtagttttttccaattctgtgaagaaagtcattggtagcttgatggggatggcactgaatctataaattaccttgggcagtgtggccattttcacgatattgattcttcctatccatgagcatggaatgttcttccatttgtttgtgtcctcttttattttgttgagcagtggtttgtaattctccttaaagaggtccttcacatcccttgtaagttggattcctaggtattttattctctttgaagcagttgtgaatgggagttcactcatgatttggctctctgtttttctgttattggtgtataggaatgcttgtgatatttgcacattgattttgtatcctgagactttgctgcagttgcttatcagcttaaggagattttgggctgagatgatggggttttctaaatatacaatcatgtcatctgcaaacagggacaatttgacttcctcttttcctaattgaataccctttgtttctttctcctgcctaattgccctggccagaacttccaacactgtgttgaataggagtggtgaaagagggcatccctgtcttgtgccagttttcaaagggaatggttccagtttttgtccattcagtatgatattggctgtgggtttgtcataaatagctcttattattttgagatatgtcccatcaatacctaatttattgagagtttttagcatgaagggctgttgaattttgtcaaaggctttttctgcatctattgagataatcatgtggtttttgtctttggttctgtttatatgctggattacgtttattgatttgcatatgttgaaccagccttgcatcccagggatgaagcccacttgatcatggtggataagctctttgatgtgctgctggattcagtttgccagtgttttactgaggatttttacatcaatgttcatcagggatattgatctaaaattctcttttttcattgtgtctctgccaggctttggtatcaggatgatgctggcctcataaaatgagttagggaggattccctctttttcttttgattggagtagtttcataaggaatggtaccagctcctctttgtgcctctggtagaatttggctgtgaatctgtctggtcctggactttttttggttggtaggctcttaattattgcctcaatttcagagcctgttattgctctattcagcgattcagcttcttcctggtttagtcttgggatggtgtatgtgtccaggaatgtatctatttcttctagattttctagtttatttacatagaggtgtttatagtattatctgatggtagtttgtatctctgtgggatcggtggtgatatcccctttatcatttgttattgcgtctatttgattcttccttcttttcttctttattagtcttgctagcggtctgtcaattttgttgatcttttcaaaaaaccagctcctggattcattgatttttttgaaggtttttttgtgtctctatttccttcagttctgctctcatcttagttatttcttgccttctgctagcttttgaatgtgtttgctcttgcttctccagttcttttaattgtgatgttagggtgtcaattttagatctttcctgctttctcttgtgggcatttagtgctataaattcccctctaaacagtgctttaaatgtgtcccagagattctggtatgttgtgtctttgttctcattggtttcaaagaacatctttatttctgccttcatttcattatgtacccagtagtcattcaggagcaggttgttcagtttccatgtagttgagcggttttgagtgagtttcttaatcctgagttctagtttgattgcactgtggtctgagagacagtttgttataatttctgttcttttacatttgccgaggagggctttacttccaactatgtggtcaattttggagtaagtgcgatgtggtgctgagaagggtgtatattctgttgatttggggtggagagttctgtagatgtctattaggtctgcttggtgcagagagctgagttcaattcctggatatccttgttaactttctgtctcgttgatctgtctaatgttgacagtggggtgttaaagtctcccattattattgtgtgggactctaagtctctttgtaggtctctaaggacttgctttattaatctgggtgctcctgtattgggtgcatatatatttaggatagttagctcttctagttgaattgatctctttaccattatgtaatggccttctttgtctcttctgatctttgttggtttaaagtctgttttatcagagactaggattgcaacccctgcttttttgtgttttccatttgcttggtagatgttcctccatccctttattttgagcctatgtgtgtctctgcacgtgagatgggtttcctgaatacagcacacttatgggtcttgactccatcctatttgccagtctgtgtcttttaattggagcatttagcccatttacacttaaggttaatattgttacgtgtgaatttgatcctgtcattatgatgttagctgattattttgctcgttagttgatgcagtttcttcctagcatcgatgatctttacaatttggcatgtttttgcagtggctggtaccggttgttctttccatgtttagcgcttccttcaggagctcttgtagggcaggcctggtggtgacaaaatctctcagcatttgcttgtctgtaaaggattttatttctccttcacttatgaagcttagtttggctggatatgaaattccgggtcgaaaattcttttctttcagaatgttgaatattgcctccactcttttgtggcttgtagagtttctgccaagagatccgctgttagtctgatgggcttccctttgtgggtaacctgacctttctctctggctgcccttaacattttttccttcatttcaactttggtgaatctgacaattatgtgtcttggagttgctcttctcgaggagtatctttgtggtgttctctgtatttcctgaatttgaatgctggcctgccttgctaggttagggaagttctcctggataatatcctgcagagtgttttccaacttggttccatcctccccatcactttcaggtacaccaatcagacatagatttggtcttttcacatagtcccatatttgttggaggctttgttcatttctttttactcttttttctctaaacttctcttctagcttcatttcattcatttgatcttctatcactgataccctttcttccagttgatcgaatcggctactgaagcttgtgcatgcatcacatagttcttatgtcatggtttacagctccatcaggtcatttaaggtcttctctacgctgtttattctagttagccattcatccaatatttttcaaagtttttagcttctttgagatgggttcgaacatcctcctttagcttggagaattttgttattaccgatcttctgaatccttcttctctctgctcgtcaaagtctttctccgtctagctttgtttagttgctggcaaggagctgcattcctttggaggagaagaggtgctctgatttttagaattttcagcttttctgctctggtttctccccatctttgtggttttatctacctttggtcttcgatgatggtgacgtacagatggggttttggtgtggatatcctttctgtttgttagttttccttctaacactcaggaccctcagctgcaggtctgttggagtttgctggaggtccactccaggccccgtttgcctgggtatcaccagtggaggctgcagaactgcaaatattgcagaacggcaaatgttgctgcctgatcattcctctggaagcttcgtgtcagaggggcacctggccgtatgaggtgtcagtcggcccctgctgggaggtgcctcccagttaggctacttgggggtcagggacccacttgaggaggcagtctgtccgttcccatatctcaaactctgtgctgggagaaccactactctcttcaaagctgacagacagggatgtttaagtctgcagaagttttctgctgccttttgttcagctatgccctgcccccagaggtggagtctacagaggcaggcaggcctccttgagctgcggtgggctccacccagttcgagcttctgggcagctttgtttacctgctcaagcctcagcattggtgggcgcccctcccccagcctcgctgccgccttgcagtttgatctcagactgctgtgctagcagtgagcaaggctccgtgggcgtgggaccctctgagccaggcgcgggatataatcttctggtatgctgtttgctaagacctttggaaaagcacagtattagggtgggagtgacctgattttccgggtgcgattttccaggtgccgtctgtcgtggcttcccttggctgggaaagggagttccccgaccccttgtgcttccctggtgaggcgatgccttgccctgctttggctcacggtccgtgggctgcacccactgtcctacaagccccagtgagatgaacccggcacctcaattggaaatgcagaaatcatccatcttctgcgtcgctcacgctggaagctgtagactggagctattcctattcggccatcttggaacctccctgcctcttttttctggtattgtttcttacttaaacatttagtagaattcactgtgaaaccaactagaccttttttttttctcccctgtttctgaaggttagtaattgttaatttaatttctctctctctctctgttttgtttgtttgtttgttttttgagacagggtcttgctctgttgcctagactgagtatagtggcaggatcatggctcgctctagccttgaactcctgatctcaagtgatcctttcacctcagccttctgagtagctaggactataggtgcatgccaccgcatccagccaattttgttattttttatttttatggatggggtttcactgtattgcctaggctagtctccaacttctgggctcaagcaatcctcccacctgggcttcctaaagtgctgagattacagccatgtgccaatgtccagcctaattgctttattatctctttttcctactgtgagttttggtagattgtctttcaaagaattg

SEQ ID NO: 2739 - DNA, 6000 bp, Homo sapiens
acagaaggcagtcagattttgcagcctgcaaaatgtttaggagaatggcaatgccataaaaagaaatgaagaggtcaaagtgagggaatagtttgagaaaaatgaaaaagaagttgacacttgtgacctgtggaatttatgatgatcaagacattacttcagagaaaataaaattaactaaagaaatacaacaaatatttctgacatttcaagtctaagaagtcatgtacaaaatcaagagatggcaacctcacacacacaaaactgggactctgaacacagttaccacagctatagaatccacatcacttcctcctcttcacaagaaattcactcattgtaaagaaccctattagcttcccaacctccttcacatttgttgatgtccattttgatgggtatccttagatcttcacatacctcaaatttagttgaatttctggtattatttttcaagcaattctatcacagtgttaatacaaaagtagaataaaataacaaacacatatgaacattccaaaaacgaaagatttgccaaaccatttatataaagccctcaatttggtccattaaatcagccattcaaatacactatagtccataaagccccgtgttggagctacagctcaggaatgatcacaaaaatagggaaggggagaggcaagacagagagaaggaagcatttatctagcactgacacattcagtatatataaagaaattctctatcccaatttctttatatgtatgtaaaatctaagtatttaacatcttatattaaaatgatttataactattttttaaaggatacagctaatttttaaaaactgtatgtaccttttctaaactttggacctagagttagcatgtgaagacaattcaaaggtttcattgttatgataataagccaacgggtggggaggaagtctttggcaaatcactatcaaagctcacctcccaatatgaggggtcaatgaagatgatattaccatacgagatgactgttttcttttatatagaagcactctgcagcaacattacccacacagctctgattaaattaggaataaatttagacttaaaggttaccatttttatatttaaacataatctctcaattcaaaggcccccaagcccagaaaccccaattcaatctactgtctttgtgatatgttctgcaatttcagctatcaaataaatatgagtccaactttataatcggcaactaacaagttatattaattgtatgcaagtgtagaaaactatcttcagattaggactaaaagtttggttaaaaaaaaaaaagattgacatcccccacaccctctccaaaaacaactctcttagacttgctttaaaagatgctgctaaaaagtgatttgaaatcctcatagtggccttgggtggaataaaaaggacaggcagggccagagcagctatgattctatctgatttacaaagaaaaattcccaacaaagatttactatgacgggccctttatgtatactgttaacacacgtaacaaactaatgaggcagagagtgttatcctctttttttttgttttaacaaaactatcaacaaatttaggaagaataaataacttgtccttggtcacatgggtcatttgtaataataccaagaccccaggtctgtctaaattcaagacctatacttttcctttaaaatcacagatatctaaataatgcatatccactgccaaaacatttaatcttctttttcaaattatttttttcaattatttcatttattgtgctagccagagactacagtggtaaataagacaaggtcctcatagtctaaggcagcatttctcaaccaaagatcctcatttgaactacagaacacaaaatgatttgagtaataactctttttctcaattttcccaaggaaagtaataactaatagcactctagatgcacagggcgaagttagttctttacatacaatggataccttagcattagggtttaattctttccctcaatgctggttgagaaaggctgctgtaagggaaaagaaacactaaataataaattacaagcataaaatgtgttttattattgatagtaaaatataatttgaaaaagtgagcatggcttacatcaacttagaattcagaaatagtatgtaattgacacatacaatcatgaaggttaagagtatgttaaagtgagactgaaagcatactccctggttcaaatactgactccatgtctatcaccattaccttggcttctaagcttcatctgtaaaatggagacgagacaaaacaaacaaacaaaaaacacctaccttttaggctttcaaaggacaaagctaattcttaaaatatttaaattagatgttgtataaaaaagactcagaatagccaagtagccctcaataaatcttagctactagtattattacaattcacacacctactatttacaaagcactatgttaggcactgagggaaacaacaatgagtaagatgggaactgtatctccaaagaatttctgatgtagcgtgagatatgacatccatgcaaacagctatgacctaggcagaaagggaaaaaaggtatcagagagaggtaaaaaacaaacaatgaacgtcatacccaattttcgaagaattcttttgcattcatccctgctgagatccagaagggttggccacacaacaggcattgctgcttctgtttggtagccccaaagagcttgtcctccctaccagaacaaaaaaaaaaagtcaaattaccaaagtaccaaagtacattcaaggggccactcacctggagatccagtcacaggctaagaagtaaaccaaaaagatattactattttacaatcctttctcaccaccacactttccaacttttgagaaatcaagaattaagtcatttgaactatcacagtggaaagaacacaggctttagagccagacacctctaggtttctagtcccaacttttcaacttactggttaagcctaagctttacacatctataaaacagaggtaataccacccagtttgttacgcgtattaaagaacactatatataaagttctttcatagtggctggcatttcatttaataaacaggtggtactaccaacctggggcaagttgactcctgtcagcttcctcatttatgaattacatgagataaaatttgtaaagctcctagcaagttaaagaaacttaataaataactcctcgtgctcgcttcagcaacacatatactaaaattggaacgatacatacatatatatatatacacatatatatatacatatatatatacacacacacacatatatatatactctctcaagtcttaatggaatatgaattttgatcctgtagttattaaacagccatttaccaacagttgagctgccaggaacttacttagaactgggaatttcctagtgtaaaagacaaaaagacacggctctgggggcacgcgcaatacctgcttagcacagagtagagccgctctaagtatttgttaaatgggtaagtgaatggttgacgcgactgagcaaaacgaatggatgaatgaatgaatgaacgagctcactgtctagcctagaagtcagacaccgaaccgaaataactgctatatcccgttccaggcgctggggctgctaactccaactctgtgtcccgaggtgagcccccctccccctacttcccatagtcctctcagctcagaacaaacccaaggcaagaagaactggactgcgcgccccagccggcagtatgacataaagaaaaggggtggggaggaggaagaaggggcagagccaaaggaatcctctccctccacaagccagtccccgcctcccgacaggatcttggaggcggccggcgactgctcgaaccgagcaccacgtcacggcatcccggcgcgtcctagccaggggaccccagagcggggccgcaacgcatcggaaacccgggcagtagtttccggagcccgctcggggaaccaggatcttgtaggatccttccccactcaagtgtcaaggagacaagcccgccccgccccctctccaaacacgcactccctagcagcaccacaacaagagcagccagcccaggctcctcacccggacctctcggcgccggtcccaatgtcaagtccacgacccaagcccctctgggccagtagctgttgtcaggggtcccggccggcacccgcgcctcactccctccccagcggagaggacaaccgagagagagtaagccagcggatacccagccagacgacctggactcaccgggagtctcccagagctaaacccccagagtcccagcaccaggccagccagagtccccctgagtccaccccggggagccccacgatcccgttaggaaacaacggaggatggggctgggagccccaagccgggctccgaatgcttggcccggcgctcctctagcctggctggcctgccagctcttcccaggaccctgcctgagagtcacccacctgcccggcctttcggggctcatctaaaaggctcctccgccaagactaggggacaccaggaattgggtttgtttgcggtgcctctgaaggggcaagatggcgacaggtaacagggcgcaggcgcagccgcgcgcggccagtcgggaggtgtagttcgcttttcccgcctttcggagaacaaacaccaaaaggcctccattcatcttgtccttcttttcctccgcgttatgaaagaaaaggacagacatcgcggagggtgctgggagttgtggtccgaatccaaactccaacctctttcgctccaggtttgctgtcgtacgcgcaaggaaggccgggattgtagttcccttggtttctcctgcataccctcctgtctctggcttcgcgcgcctctcctgggctgccgtctcccagccaatcggctgcgctctctgctacgtgtggcgtcacacgtagcggccaagatggcgctagcggttggagcaggggctctgctgcgacctttacggtagtgaggttagggacgatgggagagcagctttgttcctgaagtgccgtcgaggattaggatcgagtttcttcgatcgtgagggcaattattagtggcctctagccccccagatggcatcttgaggagagagaatccacgctacgagaactaacatagtggacatcgcagttgtccgtagccgatttgcgggttacggagttgttgcaagtaaagaaggggaaatccgagcgttctcgcgttggatttcctccacgtgtgaagtgggaatggtagtgatatctcgtgctatctctgtcaagggcaagaaggagaaggaatttatttgaggccctacgacgtggtaggttcaccctcagcctttgttcttatttcatcttatttgtggagaaggtcttttcgttcctattttacaggtgagaaaaggggcccaatatatagttatttgcggccataaaatagaagccagttgcctgatactgaagattcaatgaaatcttgtgattgacttccctctttaaattttgtactttgggtaacatcggatccggtagaaacgctcgtcagaaagagtttttaatgtgcattctacaatttccagacatagtttccttcttgaaaaattgggttaatactaccctatagggatcttgtgatgcaccacgtaaacgttgtaagttgtgaaccactatacaaacgtatgagactcttcatgttcttgagtggaactgtaggttaggaagagaaggtaaataacagcatttaagtttcctactactatttgcccattagctaaaaataccctccgaggtctaggaaagtcactgttgttgaaacccaacctacaccttcagaaaatcgtaaagtggaacatattaatcaccaggccctccctccgctgtctccctgaccttcctatgcatccagttgcttaagaactcttggaaagatagtaagtgaaatcttcatagaggatttttgtacttt

SEQ ID NO: 2740 - DNA, 6000 bp, Homo sapiens
aatgagtccatttgcatgtgggaggaatatgaactgttgtggacagaagatagactatggcagttgatatttctaaaaatgagcacagtaatattctggtgttccaggatgctactatgcttctatcaagagataaaatctatttcccctttccttgaacctgggtgggtctgtgactgattccagacaacagccaatgtcaactgctggtcttatgaatgaacgagccctcataagattccagacctcagtcttcaaatttcccttgctgatgtcaagaggagtagagattaactgtccccactaagtcccacccaaattggagattcatgagtaaaacagataatttaggccacagcaatggttatggaatcacagataaccagacctccttaacacctgtgtgtttgggggaagagtcttctggtgatatttgaatttggacaaatgagttttctctagggcttggtttcctcaactgtaaaatggaacaataattaccaagtcataggaatgttgtaaggtttaaataagataagcaaggtgttcttttcataatgggtctgtaataaacgctacgcagtattatttcaacttattcccaccagttgttctagctttactgctttgtacaaattcaccttcagagtacgtgagttttatatacatttatacaaacatatataaaatctgattttatatctaaatctctctgtatacatattgcaacattatagcttctgtaacactcttggatcacttgctctggggcaatccagttactatatcccaaagatgctcaagcagccttatagggaggtctacatagtgagaaattgaggcctctttccttgctgactttccaaccaatgtgagtgaggtaccttggaagctgatcctccagccccagtcagccttcagatagctgcaactgcttgggagaccccaagccagaaccacccagctaagccactcttgattccaatagaaaatgcaaaaactgtataaaaatttaaaaaattattcttgttttaagtcactaaagtttgggataatttttcttatgcactaagagttaactaacagctatatcaaacatgaggaaagatgggaaactgatcacaggttgaggactatttcggggtcgatggaaggacagagatggttgaataaacttgaaagtactgattgagactgaatttgaaataaataaccatggggtccaggacagaaaggaaaaaaagtaaatccagcaaaggggaacagatttcttttttaaaaaaatttttatttatttttttgagatggagtttcgctcgttgcccaggctgtgcaatggcgcgatctcggctcaccacaacctccgcctcctgggctcaagctactctcctgcctcagcctcccgagtagctgggattacgggcatgtgccaccatgcctggctaattttgtacttttagtagagacggggtttctccatgttggtcaagctggtctcgaactctcgatctcagatgatccgcctgcctcggcctcccaaagtgttgggattacaggcgtgagccaccgcacctggccaggggaacagatttctgtgtattttcccagactagaggtagttataatcatgtctaataggatagtaagtctcagttttccttctttggttgagtgtagagtggctctcatttaattcaccacacatttcctggagccaaagtgcttttatttaaaatcatggctctgttacttacaagcttgttaccttgggccagctatttaacctctctatgccttagtttcttcattcataaaatggggataaaagtgtatctgtaaggttatagtagagattaaacaagttaatgtgtataacgtgatctggaatacagaaagtcctatgtaagtattagctattattcttattatatgctaggctctacagtacacagacctgattggttcctctcctcaaagagctcgttgtccagtcaggaagattttcttttctttttttttgagacagagtcttgctctgtcgcccaggctgaagtgcagttgcgcaatctcagctcactgcaacctccacctcctgggttcaagagattctcctgcctcagcctctcgagtagagtacctaggactacagatgcacaacaccatgaccggctaatttttctatctttagtatagacgggatttcaccatgttggccaagctggtcttgaactcctgacctcaagtgatcagcccacctcggcctcccaaagtactgggaatacaggcatgagccaccatgcccggccaggaagattttcaaataaatggccataattcagtgttctgagctctgtaacaaggtgtacactgagtggtaggggagcagaggcagggatgtctgtcttatcctagagggaaagacaggggcaggataagctttttgaggaaaaagtttgagtctaatccttaaggaagagcatgttgggaacatttgagactataaagcagtcacaggcagcatgggaaaggtagtttctgactgcaaaataaatacggttaggagaaaagggaagatgtgaactgtagtatgtaatgaccagcaccatcaacatcacctgggggcctgttaagactataggatccaggccttacctgatatctatactaccaatatttgcgttttaacaagatcctcaagcggttcctattgaccattaaagtttagaaccactggtctagagcataggctctggagccaacataatcaggtttaaatcccagctttagcttttttttttttttttttttttaagatggagtcttgctctgttgcccacgctggaatgcagtagagcgatcttggctcactgcaacctccacctccctggttcaagcaattctcctgtctcagcctcccgagtagctgggattacaggcacatgccaccatgcccagctaatttttgtatttttagtagaggtgggctttcaccatgttggccaggctggtcttgaactcctgacctcaaatgatccacttgcctcagcctcccaaagtgctgggtttacaggcgtgagccaccatttacttatgtgtgactttaggcaagctattttgcttctttcctagactttagttgcctcctttgtaattagagataataaaagtttccacctcataaagttgttctaaggactgaattactatgtaaaatgcttagaccagtatgtggcacttagtaagcacaaggattgactataataattcatcactcatatgctacttcttaaggtcagagtcagttttataagccccttgtctttcgatttgtactccattgtagaggagtagacattcattgtcattttgacattcactgtagaggaaaggacatttggaggtcagaagacctgggattacaaagcctagctctcttccaattcctagctccgtgaaatttggtgagtccttggtacatctatgtttttctcattcatagtatgaaagaccttaatcgtacctgtcacactgaaatgttgcgaggctcaaatcaaataatatatgttaaagtacaaaaatcctctatgaagatttcacttactatctttccaagagttcttaagcaactggatgcataggaaggtcagggagacagcggagggagggcctggtgattaatatgttccactttacgattttctgaaggtgtaggttgggtttcaacaacagtgactttcctagacctcggagggtatttttagctaatgggcaaatagtagtaggaaacttaaatgctgttatttaccttctcttcctaacctacagttccactcaagaacatgaagagtctcatacgtttgtatagtggttcacaacttacaacgtttacgtggtgcatcacaagatccctatagggtagtattaacccaatttttcaagaaggaaactatgtctggaaattgtagaatgcacattaaaaactctttctgacgagcgtttctaccggatccgatgttacccaaagtacaaaatttaaagagggaagtcaatcacaagatttcattgaatcttcagtatcaggcaactggcttctattttatggccgcaaataactatatattgggccccttttctcacctgtaaaataggaacgaaaagaccttctccacaaataagatgaaataagaacaaaggctgagggtgaacctaccacgtcgtagggcctcaaataaattccttctccttcttgcccttgacagagatagcacgagatatcactaccattcccacttcacacgtggaggaaatccaacgcgagaacgctcggatttccccttctttacttgcaacaactccgtaacccgcaaatcggctacggacaactgcgatgtccactatgttagttctcgtagcgtggattctctctcctcaagatgccatctggggggctagaggccactaataattgccctcacgatcgaagaaactcgatcctaatcctcgacggcacttcaggaacaaagctgctctcccatcgtccctaacctcactaccgtaaaggtcgcagcagagcccctgctccaaccgctagcgccatcttggccgctacgtgtgacgccacacgtagcagagagcgcagccgattggctgggagacggcagcccaggagaggcgcgcgaagccagagacaggagggtatgcaggagaaaccaagggaactacaatcccggccttccttgcgcgtacgacagcaaacctggagcgaaagaggttggagtttggattcggaccacaactcccagcaccctccgcgatgtctgtccttttctttcataacgcggaggaaaagaaggacaagatgaatggaggccttttggtgtttgttctccgaaaggcgggaaaagcgaactacacctcccgactggccgcgcgcggctgcgcctgcgccctgttacctgtcgccatcttgccccttcagaggcaccgcaaacaaacccaattcctggtgtcccctagtcttggcggaggagccttttagatgagccccgaaaggccgggcaggtgggtgactctcaggcagggtcctgggaagagctggcaggccagccaggctagaggagcgccgggccaagcattcggagcccggcttggggctcccagccccatcctccgttgtttcctaacgggatcgtggggctccccggggtggactcagggggactctggctggcctggtgctgggactctgggggtttagctctgggagactcccggtgagtccaggtcgtctggctgggtatccgctggcttactctctctcggttgtcctctccgctggggagggagtgaggcgcgggtgccggccgggacccctgacaacagctactggcccagaggggcttgggtcgtggacttgacattgggaccggcgccgagaggtccgggtgaggagcctgggctggctgctcttgttgtggtgctgctagggagtgcgtgtttggagagggggcggggcgggcttgtctccttgacacttgagtggggaaggatcctacaagatcctggttccccgagcgggctccggaaactactgcccgggtttccgatgcgttgcggccccgctctggggtcccctggctaggacgcgccgggatgccgtgacgtggtgctcggttcgagcagtcgccggccgcctccaagatcctgtcgggaggcggggactggcttgtggagggagaggattcctttggctctgccccttcttcctcctccccaccccttttctttatgtcatactgccggctggggcgcgcagtccagttcttcttgccttgggtttgttctgagctgagaggactatgggaagtagggggaggggggctcacctcgggacacagagttggagttagcagccccagcgcctggaacgggatatagcagttatttcggttcggtgtctgacttctaggctagacagtgagctcgttcattcattcattc

SEQ ID NO: 2741 - DNA, 6000 bp, Homo sapiens
gtatatgccccaagaaatgtaaatcattctattataaagatatatgcacatgtatgttcattgcagcactattcacaataacaaagacatggagtcaacccaaatgcccaacaatgatagactggataaaggaaatgtggtacatatacatcatgaaatactatgcagccataaaaaagaatgagatcatgtcctttgcagggacatggatgaatatggaagccattatcctcagcaaactcatacaggaacagaaagccaaacgtctcatgttctcatttataagtgggagctgaacaatgagaacacatggacacagggagggaaacaacactcactggggtctgtcgggagagggcaagggcaggggagagcatgaggaaaaatagttaatgcatgctgggcttaatacctaggtgatgtgttgataggtgatgcaaaccaccatggcacatgtttacccatgaaacaaacctgcacatcctgcacatgtaccctagaacttaaaataaattaaaaagaaataaacacagatatatacaacaacaacaacaaaaataatgaataaataaataaataaataactatccaaagaaatacatgttatttgctcatgactgttctggcacaatttattgtattactgtaaagcaaataaaagaattatgaaaacattagttatttaacctaagggtacagcttttaaaattctgcatcttttctaaattgcactgaaaatctcaagttatgatttaactctcttaataagtcttgattacacgttaaaggtaatacaagcacatacttaaaggaagaaatcccaatgtagcaagcaaatgtatttatttaacatagtttaattactgtatatgttacatagtgacatttatgtaggtattctattttttttcactaaaaagacaattattttgcttagtacagcaagagatagtagtttaaacatcaactgactatcataactgaaaccatcagttatgtggatttttttcttttttttttttgctacatttttagaaagaggcaaattacaaaaggtattgtggatttattaaaaaaataactttggggttatttacttggttagtatgaaatcagtaccatctcttctgttttctgggcatttaggccatacaattagaattgatttctgagtgatagcctggagactctgcaggaatctcacttatcaaaaaaaatttaattatattcttatattgtacttactaagggagaaaagtaagggagtatacttcacaaagaattcctcaagaaaagttttgataacctcagttacttagatttacatacctcaataattcagataacccatttctcaacagactacatgatagggatttacggtataacaacagtttatgtttaggggtgtgtgtgtgtgtgtgtgtgtgtgtaatatattttatatatatatatatttccaattacctccaagttcattatacagtcagaagaggttttcatttaaaattctgagttgggacaattatacatatggtatttgaatcacaaatcatgctgggtaaaatgaaagaatcaaatgatgtatacacagaagtactaaacacaggaggctgtgtttacctttacagattccaggctgttttgcaacagatataaggggtggatgggtggctggactatggaatccaagggatccctgccaaccctgacatcctgtgaccaatgaaatgatgacagctcattggccagaccttgaggctttttgctttccagtgtctgttctcagtaaaaggtaaaatgctgaaaaacaaataaatgtaaagtgccacccaaagtaaaaaaattacagtgagataataaaacacatcacatagaatttaaatatgttcagtatgaaggcaatggtatagaaaaaaagatgttagtttcttttcatgtgaactcacaatttttgctttatgaaaaacaaaaggaagcttattctacaaaaataatttcatttgctattaaaaaaaacaaaagccccagtataatcctcctcgctatggttttaagaacaaattgtacaaagctatttggggaaaaaagataaaggaaaactgaattaaagtcttactggtttctcaatctgttctttagcagagtagtttgcatgtgacatctcacatgataattgtttccaaactcaggggaaagcactagtaatctctgataaacttgtcagggtgcaaagaaccataacataatattattgagtcaaagggtcattcattcatctgtaaaaatggtgaaaattacaatgctagattttttttcttaaaattaaaaaataatccttatatgatgaaacactgtctttccagttgaaagctctaagtcaggtcatcttccttctcacctttgtgtctccactctggcgcaccctgcatggctgactccttgtcatctttctaaacccagttctttcaggatgtcttctctccccaacatccctcaccatcttcttcatctcttcttcagatattattaatttctcctgaataccactactgtggtattttttacccttcaatttgtgtgtgtgcatgtgctctaatttagactgtgagctcctttaagaatacagcctatatttaacattattcacgtctgtttccctagaacttagcacatgcttcacatacactgggcgttcagtcaacatttctaatataagcaaatatgagtatagaaacattatgataattagagcagtgagcgagacatagtcttccatctgagacaaatacatgagaaacaggagccaaaaaataattatttaggctgatgtgacttccttctctccataatggaataatggtgtaacagtgcaggccttctaacaacccttcaaagaagggggtgaaactaggcagaggatatcgactatcttggttcataagtaggtacacctgggagtaccaagccagggaaacatgagctctgcacagtgcaaaacactttttttttttttttgagatggagtctcgctctgtcacccaggctggagtgcactggcgcaatctcggcttactgcaagctccacctccaaggttcatgccattctcctgcctcagcctcccgagtagctgggactacaggcgcccaccacaacgcctggctaattttttgtatttttagtagagacagggtttcaccatgttagccaggatggtctcgatctcctgacctcttgatccgcccaccctggcctcccaaactgctgggattacaggcatgagccaccgcgccaggcagcaaaacactttattaaacatagagaaaaataactggcatgcaaggatttctacccaatcatcatttgccttgaaggacttttcaccatgacagccttgtatgtgtgtgtgtgtaagtgggggtgggggagagtagggagaaggtggctgtgcccaaatgtcagagagaggcatattggcctctagggtggcatccttaatgaattttcctacagaactgatgtcaaatgggtcacctcaaaggttcatctcactcattcattcattccccttcaaggcaatggcccatctaccctatatcccattttagagaccctctgtgttatccacacattccacttttttacactccccacctccaaggggtatgcacactctgtccattttactcaagaaacatgtttattctctactgctttggctttgggcctcctgactttccacactctagcaacagctccctctttgaaccactggaaaagcctcctgactggccctcctgccacattatgtcctccatgtgttgcaagaagcctcttccttaagtcaatttaaaaaaaaaaatcacaaacacctgcttcaaatcttttccctttcctttccttccttacttctttttctttttttttttttttttttttggaggaggaattcttgctaattgataatatttaatatttaaactccgtagattcacatatgacttcatcaattggctcaactaatttttttccagcttcatatcctggtattcaaagtcatgtacaatttttttattgcacaaaatgtctcatctttctctagaaataacagcccttgccataaattcctgcttttgtaacatgaaactgctttcctttggagtgagaccactttgcacctggaagatgctcatccttcaacatccagcttgtctcctccttaggaaaatatcctctgttctgttggtgatactaaaggcagtaccctgaacatgtctttgtaaaagattttgcctttagtattgtgattacccattcacctgtctatccctttccagaaatgtgagctcctcaagggcaggctccaaatctgactttcctactatgcacatagaatggtacttgccatgtaagaaacaaatccttactgtttggggaaaaaacaaaagtacaaagaatacaactctaaaatgaacaaaacaaatgataatatgctgtttagaaagtgttgaaaaactaggcatggtggctcacacctgtaattccagcactttgggaggccgaagtgtgggggattgcttgagcccaggagttggaggccagcccggacaacacagtgagaccccaaatctattaaaaaaaaatacaacaattagccgggcatggtagactgtgcctgtagttccagcttttcaggaggctgagagaggaggactgcttgagcctacgaggtcgaggctacagtgagctgtgattatgccactgtactccagcctgggtgacaggataagatcctgtctcaaaaaaaaatgtgttgaaatcatttctttcatatcatgtgttaaataggctttgaagggctggccttgaaacctgacagctttgagccatcgtgtatccatgggagtaggcattctaggttccaaacagcacacttagaaatggactttggaacacaacgtgctacctcaaggctccacctggccacacagcaggcactgaggctgggagacagcccccagacagatgagtgtccgcgcctctctgagaggtgaatgagcccggacggtccctacctaccaagtcctgaggagcagcggcaccaacgacgcaggcccgccccagcccgccagtgagccgcccatgccctctgctagcccggcccgcccgggcccccgccatgctgatcaccgtgtactgcgtgcggagggacctctccgaggtcaccttctctctccaggtcagccccgactttgagctccgaaacttcaaggtcctctgcgaagcggagtccagagtccccgtcgaagagatccagatcatccacatggagcgactcctcatcgaggaccactgttccctgggctcctacggcctcaaagatggcgatatcgtggttttactgcagaaggacaatgtgggacctcgggctccagggcgtgccccgaaccagcctcgtgtagacttcagtggcattgcggtgcctgggacgtccagctcccgtccacagcaccctggacagcagcagcagcgcacacccgctgcccagcggtcacagggcttggcgtcaggagagaaggtggccggcctgcaaggtctgggcagccccgccctgatccgcagcatgctgctctccaacccccacgatctgtccctgctcaaggaacgcaaccctcccttggcggaagccctgctcagcggaagccttgagaccttttctcaggtgctgatggagcagcaaagggaaaaggccttgagagagcaagagaggcttcgtctctacacagccgacccactggatcgggaagctcaggccaaaatagaagaggaaatccggcagcaaaacattgaagaaaacatgaatatagcgatagaagaggcccccgagagttttggacaagtgacgatgctctacattaactgcaaagtgaatgggcatcctttgaaggcttttgttgactcgggcgcccagatgaccattatgagccaggcttgtgccg

SEQ ID NO: 2742 - DNA, 6000 bp, Homo sapiens
tatatatcattttgcttaaagttgcagttttcaagaacctattgaacctattaaattaggccttactatatatatatgattagtatctgcctacaaaatgtttatttatcatcattaagtatctgactataaccaattctcagtcaggtaacaggaaattttaggcacaaattaattctaaatctctggtgttagatgaatgaaaatccaaatatgatgaaaatactggctgggcacagtggctcatggctataatcccagcactttgggaggccgaggcgcatggatcacttgaggtcaggagttccagaacagcctggccaatatggtgaaacccagtctctactaaaaatacaaaaattagccgggcgtggtggtgagcgcctgtaatcccagctacttcagaggctgaggcaggagaatcacttgaacctgggaggcagaggttgcagtaagccaagatctcactgctgcacccagcctggatgacaagagtgcaattctgtctcaagaaataaataaataaaatagaaaatacaaactaggcactaatcatctcttatcagtataatacaaatcgttattctacaactaatattagttattactgttttttccttttattcctaaaaacaacttaagaataaaagaagtgtatttttttgtgtaaacttactgacaaaggtccccgaataggtaagaaagtatgcctgagtttccttcttaacataatattatcttcagcctacttttattataagtggaggtggtaatgagtaactaaatgaattgaaggggaaacaaccgaaaaagagaagaaaggataagatcctaactatatgaagggtattttttcttcctacttgtagagagggaaagataaaaagagaggtttaaagcaagcaagagatagtaaagcacgctatgtgaaaacatctccttcacatattttattatttcctagaaagattagtaatttaatgttcgttaagcatgcaaataattcttaggaagccgtaccttatgttgtcttatattactagatccacaaataacagggacaaggtttctgtctataaagttacaatttacttggagatagaagatatatacacaaataactgtaatgcaaagcaaaaatggtaagaaaatagagctgactcacttcatgggaagggaggggctggagaaaccactactaagcttggaaattatgtgatgtttgaaggtgcagatgagtactgaaggatggttgggaatcccaaagaagctgacagaaagtatatatgcaatcatatttggggaacatgtccagtttggatgcagcacaaggtttatgaagggtaacagttggagatacaacagaaaagacaaaatgggtaaggatcatgaaaagttttagacagcaatgagtacatatattattaaataaacaaaggagtgtcataatcagagccatacttttgcaaatgttttattaaatatctatgttttggtgatataaaggtgaatagaaccagcagctcttgacctgttaggggtgtgtcagttttggtcctgtttgacctcaaacacgttcttgacccttctgtcgctctctactgtatgacataaagcttgactctatataggcaatgttccccaagctcttctgtcggcctgctactggctgggctcagtaaataggaagcactggtgggaggctggagggcaggaggaagcagccatatttttcccccattccctttctgcctcagtagagtctcctctaagactaccactccctcatcagacaagtcttccacgttccgcagtcaaaccagcctcttgattgcttcctctctccttatccttctcattagcatagtggcttcctactgttgctaaccactgagatgccttagttgtaagctgctgggcgtcttagcttttctctcaccagtgtaaacgaattctctcattaaatctttccatgttaaatactcagaatggtttctactttttttactgcatgctgtctcatacagaaggtaacaaatctattcaagaaaaccttcacagatgatagttttggggactcccagaactcttgaagcttgtccattcatccatgactaagactactaataaaacaaaaaaccaagtaagtttcaaattgggaagatgaaaaagttccagaaactgatggtagtgatggttgcagaaaaatgtcaatatagttaacactactgatctgtacattaaaaacaaacaacaacaacaacaacaacaacaacaaactcattgttttgggctttaagaactatacatttttaagtgttgaattttgttagtatattttatcaaaaaaaagtaaacacacatctacaatgagacatgataaggttgtaacagaagtacaatgctatggcaacatttaagaagtactgactgtacttgctgaatgaagtttcagagatcaggcatgacctgaaccttgaatagaagtgtactaggaagacaaagagaagtagaatacatacaagaattttcaaagaaacttcaattcgtttggcatgtctgcagcataaaacagatgttaggaagttgagatcaagttggagaggtaggtaggatcagttccacagagcaccttgaataaatagataaaaactgaactgatggcccagaggcaacaaacactttgatgtattctggcccacacaacattttgtaaaatcccagcaaggcaataagggctacttaagtggagtagtgagatgcaaaagtcagagtgcagtatcctgaaggataaaaggtaggtgaagaacagcaactaagtggaattcattgttctttgaataaatttgacttgtgaaagggtgacacagaacataagacagaatgttctgtttaatgggtgtctaatgtctagtggggtccagaaaagtgtttttttgtgtgtatgtttaagaatttaaaaaaaacctaattatctgaacactaaggggagaaaacttaacttctctatgttcagcaattggcacagtgtttggaacatactaggcacccaaagatttgctagaaaaaaaacattatgaagggaccaataacaagaggagctgaagatggcgagggggtactgataggaaaagaatcatgagtaaataataaacctcatatgagaaagatatacacgatatgtatctatttaagatgtaaaatgataaacgacaaaagtaagagcattaggcatggggaggcttttttgtattgtatactcctgcccatctgaaatttttagtaagaatagaattatctcaactttcagactaaaaggtatagtgtgaaagcttcagggagatttgtaacaacagtaaataaaatgaattgcgaggacaactgtctgggaagccatgacagaagtccaaaagagaagtaatggcaggcacattgcgggattggtggcagtgaaaatggaatgtgaatgacaaagatttttaagataagaaaaccatggctggcgttttttgtccattaaatgaaaagcaggaagtcagcagagtagctggtttgtggagaaagaatactcacacatcgatgtgaattatttcaattagaaaatgatactgctttcttagggctttcttaactaggggtgattctgccctccaggggacatactagcaatatctagagacattttcactgatcacaactgggtaagggtagggtggggaacgggtgtcctactgtaatctagtgaatagaagccaggaatgctgctaaacatcctacaatgtttgagcacaggatagctccccacaataaagaattatgaggcccaaaatgttaacagtactgaggctgagaaaccatgtttaagactatagttaccgaaactcaactagattaccaaactgccaaaactcagaattcttaagcaaaagattaatcagacattaacaaaacattaaacttgtcattaagtttcttcaaaaatggatggtggaaccatttccgtttaacgtttcctgcaaaatgtgcttatcaagagccctgcgcaaataacatttttgtggacagcgctgggcatttaaaagaggcacaagacaaatgggttttccgaacaataaaataatagtagtaatggctgtgaatactatgggaggtttcatcacagatgcttgccatttacttttagggacgtcgcatacgacgtccgtaaattactggctcgggttttgagctttacctggctctcgtcccctgtagtacaatcctctttattctttcaggggacaaacaacaacaaaacccgtctctcacacagacaatacaccctgacagacaagtgacccacaaacaatccctcctcaaatgaaggtaaaactagggctagaaaacgttcaactaatttaaggcaattaaccctctgaaatttttcgctgatcaaaggaacaggaattgctgttttaaaatatgcaactggcatttcacacctctacactggacgacgtattgcgtggaggatggagaaggaagatcacccctactcccaaattcgtagttataagggcgggttattagaagggcgccaggaaggtctctctacaaagatggggggccggggaactccctatttgccctattttggtcccaacactgaaccaaggaaattgcgcccaaggttgaagcacacgcaatccgtccgtcatgcagacaaatgctctttcaggggtcctaattaagtgtggaggcctgactttccttccgaatccgccccaggtgttccaccccgagcttcccctcgggcttcccctcgccacgcagcctctgaagagaggagcatctacatacaaagaggcttaaactgcccagaacctccgaatgacgaagaatcaccgccagtctcaactcgtaagctgggaggcaaaaccccaaagcttccctaccaagggaaaacctttggcctcaaaggtccttctgtccagcatagccgggtccaataaccctccatcccgcgtccgcgcttacccaatacaagccgggctacgtccgagggtaacaacatgatcaaaaccacagcaggaaccacaataaggaacaagactcaggttaaagcaaacacagcgacagctcctgcgccgcatctcctggttccagtggcggcactgaactcgcggcaatttgtcccgcctctttcgcttcacggcagccaatcgcttccgccagagaaagaaaggcgccgaaatgaaacccgcctccgttcgccttcggaactgtcgtcacttccgtcctcagacttggaggggcggggatgaggagggcggggaggacgacgagggcgaagagggtgggtgagagccccggagcccgagccgaagggcgagccgcaaacgctaagtcgctggccattggtggacatggcgcaggcgcgtttgctccgacgggccgaatgttttggggcagtgttttgagcgcggagaccgcgtgatactggatgcgcatgggcataccgtgctctgcggctgcttggcgttgcttcttcctccagaagtgggcgctgggcagtcacgcagggtttgaaccggaagcgggagtaggtagctgcgtggctaacggagaaaagaagccgtggccgcgggaggaggcgagaggagtcgggatctgcgctgcagccaccgccgcggttgatactactttgaccttccgagtgcagtggtaggggcgcggaggcaacgcagcggcttctgcgctgggaaattcagtcgtgtgcgacccagtctgtcctctccccagaccgccaatctcatgcacccctccagagtggcccttgactcctccctctcctcactccatctttcctggcctctctccgggtgcttagcggacttggccaataacctcctccttttaaacgccctgaattgaaccctgcctcctgcgcatcctctttttgtgtcaccttagggttcagatttaactacgcgacttgactagtcatcttttgatctctct

SEQ ID NO: 2743 - DNA, 6000 bp, Homo sapiens
tgtatatatgcatatatagagagaaagaggtgtgaaaaaatgtgtatataattattttatactgcagtatttatagttagatttaactgtacaattagaggcacattctggtcaaaggcacaataatttttcttaacatttccgtatttaaaatgagattttcttaaaatctatacaagtaatgctgtaacacaaaaatgtttgccttgcttgcagtagtagcaggattaaaataaaagtataatttacactggacgcagtggctcacgcctgtaatcccagcactttgggaggccaaggtgggaggatcacaaggtcaggagttcgaccagcctgaccaacatggtgaaaccctgtctctactaaaaatacaaaaattagccgggcttggtggcgcgcgcctgtaatcccagctactcaggaggctgaggcaggagaatcgcttgaatctgggaggcagagctttcagtgagccaagatcgagccactgtactccagcctgggcaacagaggaaggctctgcggggcgggagatgggggaagtatatttactttttattactctgagaccaaagaaacatgacatttaaattgagacatgaaagatgaatagaaaacagccaggtaaataaggaaatgagcactcaaggatttaacattgacaatgaactatttaaaagcactcttggccaggcgtggtagtgtgctcttgtagtcccagctactcaggaggctgaggtaggagaatcgcttgaacccaggaggcagaggttgcagtgagcggagatcgcgccactgcactccagcctggtgacagagcaagactccgtctcaaagaaaaaaaaaaaagcactcttgcttatatggagagacatgtcattttgctgagccaaaggcttaaaacatgctttggagctgataagtaggaggttatcagagctagtaagctttgtctaccacttccatctcaactggtattaaggttcttatttaacacataacaataggagtaaaatgacatttctgttttaaaaggaaatgaagcaaattctatgctatggtggtatcctttgcaaatatcaaggatcaactatattttactatgccttgattccactgagtagctctcttcttttgggggcttctgatataatcaaactctcttttgatgtccttcaaaaaaatgtagtaagaacagcatttcaacatggacacaaagatgggaagaacagagactggggactgtttgagggttggaaagaaagggaggtatggcttgaagggctacctatcaggtactatgctcactacctgagtgacaggatcattcgtacaccaagcctcagcaacatgcaatttacccatgtaacaaacccgcacatctacccacagaacctaaagtaaaatagaaaagaaaaaaaaagaaacagcattctgttttactagttctgatctaaacctttatataatacaaagaagttttttattaaactatgaatgtctgtaaacagagaaaaaatacatatatttatgtatattatacctacaaataactatatctcaagaagtaaaaaggtagggaaagtccttctcctatccatccatctaaattctacttaatctttcaagattaagtatgtttctctgccccgattcaatctcacagaatctcaaaattgggaggaactaaaagaccaggtccaatcttcctatgaaggaaggaatgtctcttacaaaatgaatgccctgtctttgaatattctcagtaagagctgactaccggggctaggcgtggtggctcatgcctgtaatcccagcactctgggaggccgaggtgggcgttccacgaggtcaggagttcgagaccagccagcctggccaacatcgtgaaaccccgtctctactaaaaatacaaaaattaaccaggtgtggtagcatgtgcctgcaatcctagctactggggagactgaggtaggagactcacttgaacccaggaggcggaaagtgcagttagctgagatcacgcaattgcactccagcatgggcgacagagcgagactgtctcaaaacaaaacaagacaaaaaaaacaaaaagagctgactacccattttattagcagatggctctgattctcttctccttttatattcactggtggttcttctgacttcccccatcccccaacactattacaacttccgctttactctgctatagattacagattgttatttgagttcttttcatttgattatatacttcctgtggacaagtattatcatttttgtttttccattccttatggttttatctaggaatcttcttacttcttcaatctcagtttaaagccctcttgagtcaataaggaaaatgaaactggtaatctaaccaatgaaaataccttagcaatatccaaagaaccataaggtttggcacctttattcctaaatatactaaagatttgacacttcccggaagaggcagccctaaacttgacttttttttccccatggtgtgacttccttgaacttgtttttcttaccttcagcttaatgattactttgaagaaaacaaaacagttcagtattatctacataaacagaagatgctcattcactgatagatgcaaacaatatttactacttatagctagacaaataatgaactaaacagatacaaatcctaccctcatgaagtcatatctgggcagcagggtgacaataaacaagtaaattgataaaccaatgcataattccaaattgtgatgtatgcctctgaggaaacaaaaacacagtaatagaaaataactgtagagagaatcattttagataaactgtcagggaacatatatctcagaggagtttataataaagccaagatctgaactaactggtgccaatcaaaaaaagggctagaggaccaacacttcagggaaggagactagcatagccaaagggttctacaatgttaaagaacacagtatgttggcggaactgaaagaaggcagaggaactattaggtagtcaactagagtatgagtgtcaccatataaagatgaacttcatttatacattaatccagaatatctaggttccactcaaggttcaaacgaaaagataaggatttcctacttcctacgagcctctgaattgacgaattcagtgttcctttttagatctcaaccaagttgacccctttgcacaacttgacaatgacgcttatatcccatcttcctagaaataactctgcccttggcatgccattcttttctagtgctaaggagtgtggcctctgtagtcagattgtattagttcaaatcctggttcagccacttacaaactgtataatctagagcaagttcactaatctcttcaaacctcagtttctcaatgataaaaggaaaaacaatactagtacctacctctatgagtccctttaaggacccatatacatgcttacagtgcctgaaacacagcaaatgttagcaatgatcatattaacttccgttatgactgtttcgaaagtctcctgatatctcttcttccgctcatacctcaaaaacagctttgttttcttggtctcatccattcctatgacttcagcagctgaaaacccacaaaatatatttcattcaatgccaggcctcacgctggagcttcagggtccttctacactttgtgcctttacacgcatttttccttccatctggaaggcttctaccatctgccaaggtaacactgcgaggtctcaccacaaactgaattgatagtctcaggctgagtttgcagagaaccaaagtcactcctctaccatcagagtactcccctatcaccacatacattatcatccactgtagttgtcttatctgtacctggtaaatacagcagctaacgctcacgagtgctcaccacaggtcaagattatctcacttatcttcacaagacagtagagagcggccacacgactgacagaattccaattccagccgtatgattccagagcccaagctcttaaccgcgaggctgaagttgaaatatcaataaatgctcgctgactaaaagtactaaatacgagagagagatcaaaagatgactagtcaagtcgcgtagttaaatctgaaccctaaggtgacacaaaaagaggatgcgcaggaggcagggttcaattcagggcgtttaaaaggaggaggttattggccaagtccgctaagcacccggagagaggccaggaaagatggagtgaggagagggaggagtcaagggccactctggaggggtgcatgagattggcggtctggggagaggacagactgggtcgcacacgactgaatttcccagcgcagaagccgctgcgttgcctccgcgcccctaccactgcactcggaaggtcaaagtagtatcaaccgcggcggtggctgcagcgcagatcccgactcctctcgcctcctcccgcggccacggcttcttttctccgttagccacgcagctacctactcccgcttccggttcaaaccctgcgtgactgcccagcgcccacttctggaggaagaagcaacgccaagcagccgcagagcacggtatgcccatgcgcatccagtatcacgcggtctccgcgctcaaaacactgccccaaaacattcggcccgtcggagcaaacgcgcctgcgccatgtccaccaatggccagcgacttagcgtttgcggctcgcccttcggctcgggctccggggctctcacccaccctcttcgccctcgtcgtcctccccgccctcctcatccccgcccctccaagtctgaggacggaagtgacgacagttccgaaggcgaacggaggcgggtttcatttcggcgcctttctttctctggcggaagcgattggctgccgtgaagcgaaagaggcgggacaaattgccgcgagttcagtgccgccactggaaccaggagatgcggcgcaggagctgtcgctgtgtttgctttaacctgagtcttgttccttattgtggttcctgctgtggttttgatcatgttgttaccctcggacgtagcccggcttgtattgggtaagcgcggacgcgggatggagggttattggacccggctatgctggacagaaggacctttgaggccaaaggttttcccttggtagggaagctttggggttttgcctcccagcttacgagttgagactggcggtgattcttcgtcattcggaggttctgggcagtttaagcctctttgtatgtagatgctcctctcttcagaggctgcgtggcgaggggaagcccgaggggaagctcggggtggaacacctggggcggattcggaaggaaagtcaggcctccacacttaattaggacccctgaaagagcatttgtctgcatgacggacggattgcgtgtgcttcaaccttgggcgcaatttccttggttcagtgttgggaccaaaatagggcaaatagggagttccccggccccccatctttgtagagagaccttcctggcgcccttctaataacccgcccttataactacgaatttgggagtaggggtgatcttccttctccatcctccacgcaatacgtcgtccagtgtagaggtgtgaaatgccagttgcatattttaaaacagcaattcctgttcctttgatcagcgaaaaatttcagagggttaattgccttaaattagttgaacgttttctagccctagttttaccttcatttgaggagggattgtttgtgggtcacttgtctgtcagggtgtattgtctgtgtgagagacgggttttgttgttgtttgtcccctgaaagaataaagaggattgtactacaggggacgagagccaggtaaagctcaaaacccgagccagtaatttacggacgtcgtatgcgacgtccctaaaagtaaatggcaagcatctgtgatgaaacctcccatagtattcacagccattactactattattttattgttcggaaaacccatttgtcttgtgcctcttttaa

SEQ ID NO: 2744 - DNA, 6000 bp, Homo sapiens
acaacttaagaataaaagaagtgtatttttttgtgtaaacttactgacaaaggtccccgaataggtaagaaagtatgcctgagtttccttcttaacataatattatcttcagcctacttttattataagtggaggtggtaatgagtaactaaatgaattgaaggggaaacaaccgaaaaagagaagaaaggataagatcctaactatatgaagggtattttttcttcctacttgtagagagggaaagataaaaagagaggtttaaagcaagcaagagatagtaaagcacgctatgtgaaaacatctccttcacatattttattatttcctagaaagattagtaatttaatgttcgttaagcatgcaaataattcttaggaagccgtaccttatgttgtcttatattactagatccacaaataacagggacaaggtttctgtctataaagttacaatttacttggagatagaagatatatacacaaataactgtaatgcaaagcaaaaatggtaagaaaatagagctgactcacttcatgggaagggaggggctggagaaaccactactaagcttggaaattatgtgatgtttgaaggtgcagatgagtactgaaggatggttgggaatcccaaagaagctgacagaaagtatatatgcaatcatatttggggaacatgtccagtttggatgcagcacaaggtttatgaagggtaacagttggagatacaacagaaaagacaaaatgggtaaggatcatgaaaagttttagacagcaatgagtacatatattattaaataaacaaaggagtgtcataatcagagccatacttttgcaaatgttttattaaatatctatgttttggtgatataaaggtgaatagaaccagcagctcttgacctgttaggggtgtgtcagttttggtcctgtttgacctcaaacacgttcttgacccttctgtcgctctctactgtatgacataaagcttgactctatataggcaatgttccccaagctcttctgtcggcctgctactggctgggctcagtaaataggaagcactggtgggaggctggagggcaggaggaagcagccatatttttcccccattccctttctgcctcagtagagtctcctctaagactaccactccctcatcagacaagtcttccacgttccgcagtcaaaccagcctcttgattgcttcctctctccttatccttctcattagcatagtggcttcctactgttgctaaccactgagatgccttagttgtaagctgctgggcgtcttagcttttctctcaccagtgtaaacgaattctctcattaaatctttccatgttaaatactcagaatggtttctactttttttactgcatgctgtctcatacagaaggtaacaaatctattcaagaaaaccttcacagatgatagttttggggactcccagaactcttgaagcttgtccattcatccatgactaagactactaataaaacaaaaaaccaagtaagtttcaaattgggaagatgaaaaagttccagaaactgatggtagtgatggttgcagaaaaatgtcaatatagttaacactactgatctgtacattaaaaacaaacaacaacaacaacaacaacaacaacaaactcattgttttgggctttaagaactatacatttttaagtgttgaattttgttagtatattttatcaaaaaaaagtaaacacacatctacaatgagacatgataaggttgtaacagaagtacaatgctatggcaacatttaagaagtactgactgtacttgctgaatgaagtttcagagatcaggcatgacctgaaccttgaatagaagtgtactaggaagacaaagagaagtagaatacatacaagaattttcaaagaaacttcaattcgtttggcatgtctgcagcataaaacagatgttaggaagttgagatcaagttggagaggtaggtaggatcagttccacagagcaccttgaataaatagataaaaactgaactgatggcccagaggcaacaaacactttgatgtattctggcccacacaacattttgtaaaatcccagcaaggcaataagggctacttaagtggagtagtgagatgcaaaagtcagagtgcagtatcctgaaggataaaaggtaggtgaagaacagcaactaagtggaattcattgttctttgaataaatttgacttgtgaaagggtgacacagaacataagacagaatgttctgtttaatgggtgtctaatgtctagtggggtccagaaaagtgtttttttgtgtgtatgtttaagaatttaaaaaaaacctaattatctgaacactaaggggagaaaacttaacttctctatgttcagcaattggcacagtgtttggaacatactaggcacccaaagatttgctagaaaaaaaacattatgaagggaccaataacaagaggagctgaagatggcgagggggtactgataggaaaagaatcatgagtaaataataaacctcatatgagaaagatatacacgatatgtatctatttaagatgtaaaatgataaacgacaaaagtaagagcattaggcatggggaggcttttttgtattgtatactcctgcccatctgaaatttttagtaagaatagaattatctcaactttcagactaaaaggtatagtgtgaaagcttcagggagatttgtaacaacagtaaataaaatgaattgcgaggacaactgtctgggaagccatgacagaagtccaaaagagaagtaatggcaggcacattgcgggattggtggcagtgaaaatggaatgtgaatgacaaagatttttaagataagaaaaccatggctggcgttttttgtccattaaatgaaaagcaggaagtcagcagagtagctggtttgtggagaaagaatactcacacatcgatgtgaattatttcaattagaaaatgatactgctttcttagggctttcttaactaggggtgattctgccctccaggggacatactagcaatatctagagacattttcactgatcacaactgggtaagggtagggtggggaacgggtgtcctactgtaatctagtgaatagaagccaggaatgctgctaaacatcctacaatgtttgagcacaggatagctccccacaataaagaattatgaggcccaaaatgttaacagtactgaggctgagaaaccatgtttaagactatagttaccgaaactcaactagattaccaaactgccaaaactcagaattcttaagcaaaagattaatcagacattaacaaaacattaaacttgtcattaagtttcttcaaaaatggatggtggaaccatttccgtttaacgtttcctgcaaaatgtgcttatcaagagccctgcgcaaataacatttttgtggacagcgctgggcatttaaaagaggcacaagacaaatgggttttccgaacaataaaataatagtagtaatggctgtgaatactatgggaggtttcatcacagatgcttgccatttacttttagggacgtcgcatacgacgtccgtaaattactggctcgggttttgagctttacctggctctcgtcccctgtagtacaatcctctttattctttcaggggacaaacaacaacaaaacccgtctctcacacagacaatacaccctgacagacaagtgacccacaaacaatccctcctcaaatgaaggtaaaactagggctagaaaacgttcaactaatttaaggcaattaaccctctgaaatttttcgctgatcaaaggaacaggaattgctgttttaaaatatgcaactggcatttcacacctctacactggacgacgtattgcgtggaggatggagaaggaagatcacccctactcccaaattcgtagttataagggcgggttattagaagggcgccaggaaggtctctctacaaagatggggggccggggaactccctatttgccctattttggtcccaacactgaaccaaggaaattgcgcccaaggttgaagcacacgcaatccgtccgtcatgcagacaaatgctctttcaggggtcctaattaagtgtggaggcctgactttccttccgaatccgccccaggtgttccaccccgagcttcccctcgggcttcccctcgccacgcagcctctgaagagaggagcatctacatacaaagaggcttaaactgcccagaacctccgaatgacgaagaatcaccgccagtctcaactcgtaagctgggaggcaaaaccccaaagcttccctaccaagggaaaacctttggcctcaaaggtccttctgtccagcatagccgggtccaataaccctccatcccgcgtccgcgcttacccaatacaagccgggctacgtccgagggtaacaacatgatcaaaaccacagcaggaaccacaataaggaacaagactcaggttaaagcaaacacagcgacagctcctgcgccgcatctcctggttccagtggcggcactgaactcgcggcaatttgtcccgcctctttcgcttcacggcagccaatcgcttccgccagagaaagaaaggcgccgaaatgaaacccgcctccgttcgccttcggaactgtcgtcacttccgtcctcagacttggaggggcggggatgaggagggcggggaggacgacgagggcgaagagggtgggtgagagccccggagcccgagccgaagggcgagccgcaaacgctaagtcgctggccattggtggacatggcgcaggcgcgtttgctccgacgggccgaatgttttggggcagtgttttgagcgcggagaccgcgtgatactggatgcgcatgggcataccgtgctctgcggctgcttggcgttgcttcttcctccagaagtgggcgctgggcagtcacgcagggtttgaaccggaagcgggagtaggtagctgcgtggctaacggagaaaagaagccgtggccgcgggaggaggcgagaggagtcgggatctgcgctgcagccaccgccgcggttgatactactttgaccttccgagtgcagtggtaggggcgcggaggcaacgcagcggcttctgcgctgggaaattcagtcgtgtgcgacccagtctgtcctctccccagaccgccaatctcatgcacccctccagagtggcccttgactcctccctctcctcactccatctttcctggcctctctccgggtgcttagcggacttggccaataacctcctccttttaaacgccctgaattgaaccctgcctcctgcgcatcctctttttgtgtcaccttagggttcagatttaactacgcgacttgactagtcatcttttgatctctctctcgtatttagtacttttagtcagcgagcatttattgatatttcaacttcagcctcgcggttaagagcttgggctctggaatcatacggctggaattggaattctgtcagtcgtgtggccgctctctactgtcttgtgaagataagtgagataatcttgacctgtggtgagcactcgtgagcgttagctgctgtatttaccaggtacagataagacaactacagtggatgataatgtatgtggtgataggggagtactctgatggtagaggagtgactttggttctctgcaaactcagcctgagactatcaattcagtttgtggtgagacctcgcagtgttaccttggcagatggtagaagccttccagatggaaggaaaaatgcgtgtaaaggcacaaagtgtagaaggaccctgaagctccagcgtgaggcctggcattgaatgaaatatattttgtgggttttcagctgctgaagtcataggaatggatgagaccaagaaaacaaagctgtttttgaggtatgagcggaagaagagatatcaggagactttcgaaacagtcataacggaagttaatatgatcattgctaacatttgctgtgtttcaggcactgtaagcatgtatatggg

SEQ ID NO: 2745 - DNA, 6000 bp, Homo sapiens
cgttgggattacaggtgtgaaccaccactggccagtaattttacattaaatcttcctttaagtataaccaaatgttggaaactcttagcatatttttatatttttatttacttaacatttattaagggtttgctatgtgtcagatactgtgccagttgagtacattttcttaattattattcccatctcatagatgaggaaatcaagaaaagttgaatgaatgttgtttctaggtcctactctaaataatattaacaagcatttaaatgatttatttttttcatttttcttaacacattgactttttggttcgtgcaggttttagagaaagtttctgaaacttttggatatagacgtttagaagactttatggcatctcatttagattatctggttttggaatggctaaatcttcaagatactgaatacaacttatcttcttttccttttattttattaaactacacaaatattgaggatttctataggtaagtttatacatgacatatgtgaaatttgtttaatttaaaattagttaacaatacttagcaagtcccctcaccagcaacacacataccatacccatacacatgtgtgtgtgggagcctacatagtatgagaagcaggacagcttcttttaataagaatgtattgaagggagtcactggacttcagatctggtcctagctgtgccaacaaccagctatctgactttggtcaaaccacataaagaccctctatgccttggttttttaatatgtaaagtaagcaagttacacaaggagatctttcaggtccttttcagctttaatatttgatcatctttcctttggaaaaaattgaagataaattactagtagctggttatttctgccttgtttttcttttctgttgcttgactataggcctcttagttattacttctattagatttagaaacttaatgtaaaactttattttgctaactttaactctgtagaagaaaaatttgaaaatggagaggtttgaaacaactaaaaagtaatgtttaggtatcaggatgatgggaaggcatctcatatttgttgaacatgctctgtgttatggactttgctatgcattttacatgtagtgtatcacagatctgagtttcagacttatcctaatagagttttctaatagattatgagttgtatgtaggtagtttcctttaagaaggatattcctacaaaagtaaatttagtggtccttatagttcattcattttggcaagaacaatatagctatatctctgtatatgcgagggattcattccaggatcccccatgtatgcctaaatttacgcgtactcaagtcaccaagttggccctgcagaacccacgtatatgaaaagtcagtcctctgtatatacagactttcacatcctgtgaatactgtttttctatctgcatttggttgaaaaatatgcaagtataagttcaaacccatgtttttcaagggtcaactgcatttatgttagttgattatgcagaagaaataaatataaattcaagtctccatttttatttgtttattgttttgttttttctttttgctaagggtgctactgaacaaggtcccatttttaaatcccataattatggtggtggtatgttctaagctttctaatttttttaatgtgactatttagaatttacttaatttttccatttataaaattaaagaatgtttaataatctggataaagtatgatactttaatgctgatggtattaaaacagtttttaagaactattttataaaattttacttggaaaagttatatataacctgtattttaaatttttctatttttagatcttgttataaggttttgattccacatctggtgattagaagtcattttgatgaggtgaagtccattgctaatcagattcaagaggactggaaaagtcttctaacagactgctttccaaagattcttgtaaatattcttccttattttgcctatgagggtaccagagacagtgggatggcacagcaaagagagactgctaccaaggtctatgatatgcttaaaagtgaaaacttattgggaaaacaggtatggcttcaatttttatgtacttttcattccctgaatgatatgagatataacctttaagttttaaggctatttattcgatttattcgtatttatatattgaaacttagcttgtggtaatcattatctagcatagccaacccatgaatttttttggttatgtcgtgttgtctccctctgattggcttttaactaagtagaaatgttttaaattagaaataatccaaaaaaccatttgaataattttcttctgccatttaaaaatttattttaactgttgtaatacacgaatgcaaactggttgttaaagtcaaggaatactaaacagtgtacagaaaaccttcactccctcttcaatctcaccaagctttccacttttcaagaaaaacaaccgtccctcattcctatagttctcataccctgctgtttgtttttttgtgacacttattaccttctaatgtatgatacaatttaccttttttttctgtctttgcttttgtttttgagacagagtcttactcttttgccaagactggagtgcagtggcatgatctcagttcactgaagcctctgtctcctgggttcaagcaattctcctgcctcagccacccaagtagctgggactacagctgcgcaccaccacacccagctaattttcatatttttagtagagacggggtttcaccatgttggccaggctggtctttaactcttgacctcaggtgatcttcccacctcagcctcccaaagtgctgggattacagatgtaagccaccttgccagaccataatttacttttgaattatgtttattatttaccagtcttctccagtatacatttttctctctttttttttttttggctgatgtatctctaatatattttgagtattcattaaatgtttgtcaaaagaaggagtcaagtaaggaaggatttaaaaagcttcgtttgttttataatcatttatatacatttccaaaattttttgaagcaacttatattaaaacatacatacaaattttttaagataaaaaagctgtggtcaccccacatttatgtatgtatttatttattttggatataagtaagggataagtaaccaaacttggtcaatattagataaacttcaagggaccttttttttttttagtttcctagttatctatattgaaccaagaaatggaacagcaagttccttagttgcttaggtggacctattcagaactggttgtaagtctgcagtctgaagggaaatggtgagcagaggactcctttcccaaagacagctggaacagaaataggcactccagaggttatggaatttgagagagatactcagcctctagccactcccattcaatctcccagcttagtcttctgagcattcttaatcttactattcttttcttaatgtattcaaaccaaaagacagcaatttttagagcctgaataggttttggagggaaaagtaattacgttcaacttcgattgaaactcttgcctcaagaatgaagaacagcaaaaattaaatcacagtttcttagctttttggttaaagatgtaagttaaattcttggccgggtgcggtggctaacgcctgtaatcccagcactttgggaggccaaggcgggtggatcacctgagatcaggagttcaagaccaacctggccaacatggtgaaaccccatctctactgggtgtggtggtgtgtgcctgtaatcccagctgtttgggaagctgagtcaggagaatcacttgaacccgggaggtggaggttgcagtgagccaagattgtaccactgcattccagcctgggcaacagagcaagatttcgtctcaaaaaaaaaaaaaaaaaaaaaaaaaagaattgtataaaacacacaaacaaagcaaggaaagaatgaagcaacaaagccagagatttactgaaaatgaaattatactccacagagtgggagtgggccctgagcaagtggctcaagggcctggttacagaattttctggggtttaaatacccttcagaggttttccattggttacttggtatacaccctatgtaaatgaagtagtggtctgtaatcagtctgattggttataggaggggaccaatcagaggtactttcaatttcttatctgccacagtaaaagggagggggttgcaaagggagtagcctcttgtccttttgttacttgagcatggaaagttggggttttccttttgatttcgttctaggaggtcagcatggattgaccttaggttccctgcctccagaccttattgccctgcctcatttacgttaggtttctttcttgtcaccttctaaaatattttttgttattaggaagtatgtttttgaacttccttatgcattaagtaaattagccatttatcactgtaattccttatttggaaagttgttatattcacccttaagacttcacaattctcattcatttaactaaagtgcaacatagcagacttattctttatatttagagaatttgtgtcttttgtgaagctacctgtctatagtgggaagtagattaatgaaaagtccaaatctgttggggagggttttattctactattgatgaaaggggatgtggatcgcagctagccttagaatttgggatggcactcaagtagaagtctgggaagaagttacgcagggaacaaagatgacattgttcgcagtccctgggaattcttaacagtaaagttctgtaattgagacagaattcccaaataaagtcaagagtaaaattcagatagaggagcagttatacatcagtgggaaatttggttggcagaaaaattaccaggtcatacaacttaatgatagacctgaagtcttatttaaaatgattctctaaaattgaagaattggattaagggggccttgtttggctgattttcatactttttcctcttagtctacaggttggctgcatagaagaaaaaggtagagttatttataatcttgtaaatcttggactttgagtcatctattttcttttacagtcatcgaatacttttggaaataaggtaatatatgccttttgagctgtcttgacgttcacagatataaaatattaaatatattttaattttgtgcccttgcagattgatcacttattcattagtaatttaccagagattgtggtggagttattgatgacgttacatgagccagcaaattctagtgccagtcagagcactgacctctgtgacttttcagggtatgtacattttaaacttagagaactagctctaacttcacaagtttttaaagaagtttattggttgacaccttcaatgtctatttcaatttatagacatcactctttttaaaaaattttctttaaaaatagccacctttgaattgaggtaattacctatcctcttttaccatagtctccccacagtaattactctttctaaattgaccacttggttggccaacccaataaccttttcttagtctttctgtaatatttgaacattgtgccatctgttggcccttgaaatttttttcttcatacacattattcctagttctcttctctttatctaggtcttgcctttctagatcaccttttctttttttttttgagatggagtctcactctgttgccctggctggagtgcagtggcataatctcggctcactgcaacctctgtcttccaggctcaagctatccttccttccacctcagcctctcgagtagctgggacgacagatgcacatcactgcgcctggctaattttttatatttttggtagagacggggtttcactgtgttgcccaggctggtcttgaacttctggcctcgaatgattcccccgtgttggccaaccaaagtgctgggtctacaggcatgagccgccgtacccagcctcaccttttctttattg

SEQ ID NO: 2746 - DNA, 6000 bp, Homo sapiens
tcctaccatctctccccgcaggaatcctgtactatgtctacatggggctgctggcagtgttctgtaccaatgccatcaatatcctagcaggaattaacggcctagaggctggccagtcactagtcatttctgcttccatcattgtcttcaacctggtagagttggaaggtaggtgggattgggggtggggagagagaagtctgagtgttaaaggtgtggcctgatatatgactttgggaaattcaggggaaaaaagcaatatgcatagtaattatagaagataagggaagctacttactttgcaaataacaatgcagatttattaaaagtgagaaagaaaaatagtagccctgtcatttatagctggattggcactaatagctaggccatgatcttctcccattgaatataaacagtttcacagaaccccaacgttacacagggtcattctgtgaccgtgatggagcaagactaaaactagacccctccctctgtaatcatgtttgagcacaggcaaaaccacaagaacactgagcaacccacaaaatggccaagatcccctctctcggctaacatgagcgactgctgctgctctccaataacaactcagttcctaccacttcttttttttttttttttttttttttttgagacagggtctccctctgtcatgcaggctggagagcagtggcgcgatcttagctcactgcatcctctgactcaaacgatcctcctgccccagcctcccaagtagctggggctacaggcatgtgccaccacacctggcaaatttttgtattttttgtagagacagggtttcaccatgttgcctaggctggtcttgaactcctgggctcaagtgatctgccaggcctcccaaagtgctgggattacactcttgagccactgtgcccagccagttcctaccatttcttaaataaacattaaaatgcttgatcatagaattactcttgctttcttttcttttctttttttttttttttttttgagacggagttttgttcttgcccaggctggagtacaatggtgcgatctcggctcaccgcaacctccgcctcccaggttcaagcgattctcctgcctcagcctccctagtagctgggattacaggcatgtgccaccacgcccagctaattttgtatttctagtagagacggggtttctccatgttggtcaggctggtctcgaactcctgacctcaggtgatctgcctgcttcagcctcccaaagtgctgggattacaggcgtgagtcaccgcacccggccatgaattactcctgctttctaacagcacccagtccagagcaaaactactttctttcaccctctcccaaaatacccaaaacaaacgctactacaagcccctcctaacaccctcttactgagacattccgtggttcccaatggtgtgtggtttctgaagtctccctttttacaacaagtcattaaacctagctttgaactatagatgtgtttctgatggtctttggctgatgaacatcaacaagtgtttattaaagctaagtactttttaaacactatcttatttaaatcttgtaatggttttatgtggcagatgttataatcagccctgttttacagatgagaaaacaggcttagagaagttaaatgtgtcatgatcaagatcaaggtcacaaagctaagaagtaaagttggtatccaaacttacatcagaatgggctaaaccaaatttaagatagtaactagtttggaaggctgcacgaaagaggtggaatattgggaattgccttgggtgacataaaaggagtattgagttcttaaaagtgacttgggtgaggtggatgataacagctgtaaacagaacttagacaaaaataggaccaaggtttgcagaggaagtgggtattaacttttccttctttcttccttgcttccaaaggtgattgtcgggatgatcatgtcttttccctctacttcatgatacccttttttttcaccactttgggattgctctaccacaactggtaagtaggcctgtggataaggggacaactacctgaacacatggcaaagatggcccttatcataacccaccttgtggtggtgaagctaaacctgcgcatacctctatggagttttctgcgtcttcagttggtcgtattctgaaatttctctctacccagtagtagttagggatgagtgcgtggaggccccaggaatagatgaattcagggccttggatcctgcagagttgctgcacaactggagtctcctctgagtcagaactagggtcagggctagtccagtgcccatagggtgtgatgtgagagaagggattggtaatgcctcttgccactggctcggatcctcttcccccacacaggtacccatcacgggtgtttgtgggagataccttctgttactttgctggcatgacctttgccgtggtgggcatcttgggacacttcagcaagaccatgctactattcttcatgccccaggtgttcaacttcctctactcactgcctcagctcctgcatatcatcccctgccctcgccaccgcatacccaggtagccgctttttggcttgaaatggacatcatagccttttcacttgggatatctaatgccagcctatacatttgctgtgcaaagggagtgggcccaaagaagggctatttccatgtgagtagccctttataacttacaaagcacatttatttgcataatctgctacagtggttctgataacagtaagcagcagagccagaaatagatctcaggttgactccacattcaatgctcttcctattagccacagggaggagggttcaaatagtggcccagtcacatgaagctatcttccccccgcagactcaatatcaagacaggcaaactggagatgagctattccaagttcaagaccaagagcctctctttcttgggcacctttattttaaaggtaacagggtaacaaggaggtaaggccctaggctgccatcctgaccttgaggaatggggaacctagtcctacatcagatccaaggggaacttgaaagcattaaatagatccacattcctaaagcataggtattagctgaggttctcttcacctctggtccctccaggtggcagagagcctccagctggtgacagtacaccagagtgagactgaagatggtgaattcactgaatgtaacaacatgaccctcatcaacttgctacttaaagtccttgggcccatacatgagagaaacctcacattgctcctgctgctgctgcaggtgaggatgggaatcgagtttatacctccgtgtctccctttctgcgtgattcttactccagtccatttctccttgcagatcctgggcagtgccatcaccttctccattcgatatcagctcgttcgactcttctatgatgtctgagtcccttgatcattgtcctttacctcacagtctctaggattcctgactcaggctgacctctctctctggtcccagactgcctccttgcccaggcctctctcactcttcatactcctccagattttgttctcagcattttcctttctctgtgatcattggcatcctgggcgtttcttgccctctgctgactactgattggattttacctatggctttctgcaacttgctactctctccctctccatcccatctttgcagcctcatagggtgggatacagcagctttttttgcagttatccacactcacatttcagagtcctgactctcaaggaaccactggtttttgggatagaacttgggccagggctaggaacacaggctccacggtgacatgtcatttgattgtaaattaagtgttctgattagtaagaactaagcagggggccacatgctctcaatggagacaataaagtgttgtctttttcttattgtttatgtaggtatatttcctatatgggcatttttgggtagattgggaggggtggtgggggtacttcctccaacaggatgcctatctctctgccccatcagaccccgtctaacaagaagtgaacagaactgagaccaaacagaacatattgaataaatatttaaatcctgatactagaggtggcatggagggccacaaaattgaagttatcctgtttcctggcatgggaacaaactttcaaagagtcaccgggtgcagtggctcatgcctgtaatcccagcactttaggaggctgaggcaggaggattgcctgagcccaggaattcaagacagcctgggcaacaaaacgagactccgtctctacaaaaataaaataattagccaagtgtggtggagcacttgtagtaccagctacgagggaggtttagcagggaggattccttgaacccaggagttcgaggctgcagtgagctgagatcacactactgcactccagcctgggtgacagagccagtgacacccggtctattaaaaaaagaaagaaagaaaaaaaagaaaacttttaaggggtctaatttcttcacttttccattctccctttgtcaggtaggagaagggagtagggagtgactggacctggaaaggagggctgcagtagctataatattgacccctttcctttaaaaatcctacgccggcacagatttcccagacgctctctaggtggcctcagactccacccctttggtcttccgcttctggtttccgattgtagtgtttaaatctcgcgcgctttacaaggattggctacatcagcggatagttggcagtctgcgtgctacccctcctcctcgccttttctccccgggcaaaaggttttcaaattcgaccaatcagcgggcgcgctccctcagccgagccgcgacacccaagggttaaccgcaaccaaccggaggcgggtattggagaaaagagccaatcaggagggcgcagaggtgtgtcctgggggcttataaaggcggcctcgcggcgcgcgcgcgacagcagttacactgcggcgggcgtctgttctagtgtttgagccgtcgtgcttcaccggtctacctcgctagcatgtcgggccgcggcaagactggcggcaaggcccgcgccaaggccaagtcgcgctcgtcgcgcgccggcctccagttcccagtgggccgtgtacaccggctgctgcggaagggccactacgccgagcgcgttggcgccggcgcgccagtgtacctggcggcagtgctggagtacctcaccgctgagatcctggagctggcgggcaatgcggcccgcgacaacaagaagacgcgaatcatcccccgccacctgcagctggccatccgcaacgacgaggagctcaacaagctgctgggcggcgtgacgatcgcccagggaggcgtcctgcccaacatccaggccgtgctgctgcccaagaagaccagcgccaccgtggggccgaaggcgccctcgggcggcaagaaggccacccaggcctcccaggagtactaagagggcccgcgccgcggccggccgccaggcctccccatgccaccacaaaggcccttttaagggccaccaccgccctcatggaaagagctgagccgcttcagactgcggggcaagcgggccgcggctcccttcccctcccctcccctcgcccgccttcgccgcccggcctcgagtccccgcccgcccccgctcccgtcccgcaccgcctgccgcgtcggcctcgggccctgccctgtccgccgtccgccctccggtagggttcgggccttccggatgcggcttgggcgctcttcggggacctccgtggcgcggaagacccgagcctgccggggggaggccggcggcgccgcacctgcccgcctcggcgttcgtgactcagccgccccatcccgagtcgctaaggggctgcggggaggccgcagcaccttctggaagacttggccttccgctctgacgcagggccgaggtgggcagtccaggccgagaggccggcggccctgaaggtgagtgaggccctcggcagctgcagccgg

SEQ ID NO: 2747 - DNA, 6000 bp, Homo sapiens
ttgttaccaagttcaactacctaattttgaagctctttccaaataagatacaaattaaaaggggaagcattgccagtaacaggtccctagagagcagtgccagcctgcctgcaagaaaagaggagaaacttcttaaaaagttttaagcctgggcaacataaggagattgtttctatgaaaaataaaaattagccaggtatggtggtgtacacctgtagtcccagctactcgggaagatgagattggaggatcacttgggcctgggaggttgaggctacagtgaactgtgattgtgccactgtactccagtctgggcgacagtgaaatcttgtctaaacaaaaacaatttaactgggaagcacagtggtccttgaggacatttaatatcaggacaaagagcctatgaatatatcactgatgtatataaaccctaaggcgttaataaaagctaactgtttagtgttatccatttaagggaacaggaggaattgcataacttttagattagtcatagtggtgctcctaagggatatgctgttgtatatttgtatagccagggcacttagccttccaaaccaatttatataccatgttcttcaactgtgggtgagatttagcctcaagatttgatttactatatgtaagtacattacttgatttctataaagaatctttagtggaagaggttattctgaattatttatcaatatgattaataccagttagaaattattaatgatcttcctttatactatacataggataacttttaacttgtcgctacagttgttgctctgaggatcttaattttgttactttctaggctacatgaagctatctttttaaaaagtgtactcttcattttcactgttattgtgtacttagcataaaaaactcaaatctaggccaggtgcagtggctcatgcctgtaatcccagcactttgggaggctgaagcatgcggatcacttgagcccaggagttcaagaccagcctgggcaacatggctaatgaacactaagcatagttttgatgtctttcatattaaagactttctcaaattcttgctagtctgctcctctttaagagtgggaccctaggcagggcgcagtggatcatgcctgtaatcccagcactttgggaggccgaggcaggcagatcacttgaggccaggagtttgagaccggcctggcaacgtgggaaaactctgtctctactaaaaatacaaaaattagctgggtgtggggtacacaccctgtaatctcagctactggggaggctgaggcatgagaattgcccaggaggtggaggttgcagtgagcagacatcatgccactgcactccaacctgggagacagagcaagactgtctcaaaaaaaaaaaaaaaaaaaaaaaagagtgggacccaaaaaagctgattgaaaggtctgtttgtagggggtgtagatggggattaataatgtgggtttcaatctactgtgatctggctgggctgttacattgggaaatccatgatactgatttttagatttttatcttttgcataggtaagattcccttgagaaggcttgcatattctcttactcaaggatgtaagccaggcagtcagctttctgggagtagagtagggaaagaagttgtaacaggctcaaccttcagtggataaaacttaaacttaatccctccgttttcagtaaggtgcccaagcttttaactgtgcctaatggtctccagttcacatactgtgcatttaccctcttaaatctcgtaccagctttggggagggacagttccttggttacatagaaagggaagggatacggggatctatttgttttttatgtagcctttaaacctaccccttttagccccatttttacctccaccttcagttacctggtgtcaccagttcaacttgagctttttcagagttctgtgatgttaattctgctttccattgctagctttgggattcatcttcattacctttcatctaaaggctttctgctttccaaaatgtgtctcatactctgttcttatgggttcttttaaatattggtatcctttactattaaaatattttagtgggctttcagaagagaatagaggctatttctatgtattctgtctttaactggtattctgctggagtctgtatatctttttttttttttttttcaggctaaaaagactccatcagacacacaggaaatttgcaggtcttcctcttcgtattctttgttttcagcacacagtgaggaaacaagagaaaatgggataaatgatataaaaacttgcttttatttttataccaggccctgtggctcgcttctgtaatcccagtgacttgggatgctgaggtaggaggatcacttgagctcaggagttccaggctgcagtgagctaagactgcccaattgcactccagcctgggtgacagagcaacacaccctgtctccaaaaacaacaaactgtaaaaagattacatgaagcctaatctgtgatgtcatgattcaaaactatacacataagcattttaagagttttttccttgatttttgttcctgactttgcttctttaaaagaaatgtgtgtttttgttgttggttgtttgtttttgagacggagtcttgctctgttgcccaggctggagtgcagtggcacaatctctgctcactgcagcctctgcctcctgggtagctgggattacaggcactcgccatcgtgcccggctaatttttgtatttttagtagagacgggggtttcaccatgttggccaggctggtcttgaactgctgacctcaggtgatccatacgcctcagcttcccaaagtgttgggattacacgtgtgagccaccaggccccggccttgagtaacattttatacttgtttcactttactattatcataatagccagttatgcttagtgtttgtatgtggcccagtcttaaggactaagaaaatatatatgtatatatataaaatatatacatataaaaaaatatgtttttttcctacggaatcatgctgttgcccaggctggagtgcagtagtgctcactaacctctaactcctggactcaaacgattgttctgcttaggcctcccaagtagctagggctacagggacacaccaccaagcccgactaattcctaaatttttttatttgtagagatggggtctccctatgttccccaggctggtcctgaactcctggcctcaagccattctcctgcctcgccttcccaaagtgctggaattacaggcaggagccactgcgcccggccagtgctggagaatgtaatggagatgatcctgcctatccctgagttccagtctagtttactgtcagagaatacttatttccatttttcctattttgttcttgagtctctttcctcagaatttacttttccacttaaatgacgtacgcagcttttaaatttgcgttgtaagatttattttggctctccccgcctgttctttgcacattaaaaatgaaaaagtttgtagaactaagctaagcagatggtcttcctgcaaaaagaccgggctgaagtaaagcattgttttggagctggttcacagaaaaaaggcaaaactggttatcctgacttcaagctccaacataaactgctcgctttctccgggaaacttgccccgccacacacacttgactgcgtggccagttctttcgaagcctctcgctcccaacacggagttcctcccatttcttcacagtcggctctcagcagctgctgctggtttctcggctccagcaccacgagtaccgcactctgaggtttacaaagcactctgcttcaccgactgtgatcctcacagtcctgtccggtggcctcacgcaggtggcggtgcagcctttcaggcccagagcggccaggagcgaagcccgcagccccgcctggaagcgcagcgcggtcggtcgcgcgcccctgaggcttggaggcctgggcttcccccagcagcgctcgagcaccgcccagtcgagcctcacaccggatgccacttcatatttgggcccagagctcaattcgcgccgatgcggtccgccgtccttaaatctcttcagccaggatctctccccgactgcaaagcagccctgggcgggagcggcaacatctccacgtcacccttttggagccgccgacattcagaggggcaggacacgggaacgcgcgctgtcttgctttacggcgcgggtgcgcgagtttgcggcagcgtgacgccctcaagttttggcgggaaaagcgctgcatttggattcctgcagtggtgggcaaaggacagtccggtgaggaagggcggccggtagagtagggaaggtttctaaagaaggagttcggggtctagattagtgagggagggcatggtgggagaaagttagcattgactagcgcaggggattggagagactcctgcggaggggcggtttcggagggtggaggaatggtaccaggaggttcccgttgtgggggcgggggcaggagggactaacccgctgctagctaagaaccccaaggaagagtcccagcccttcctttcgcctctgggggcagtttggccccgccccggcctttgggacgggtggggctgtggatggggatgggaattggaattgagcaattgggaggaggcgctgccgcaggcgttttctgccccataccgctccctatatcctcttcctctcttccccagacccccacctctccctcctccttccccagtcgttcgccggaaagcatttgtctcccacctcttcataacaacaattaatttcctctggggcctgaggagggcagaatttcaaccttcggtgtgcttgggagtggcgattgtgatttacacgacaaaatggtcaggtttagaatagttgttcgtggttgaaagacttggataaatgtggatgagatagaaggggaaggcaagagctgttaattttcgtgggcaatcctggggagaggcggggctcagtggcttcactggtgatcttacactctacatcttttctggattcctgccttttacagccgaggtgctcggtggagtcatggcagtgccctttgtggaagactgggacttggtgcaaaccctgggagaaggtgcctatggagagtgagttcttttaagcttgccttcgttttctgagtgcatattcattgttttggagtctcacactctggtgatttagaaagtagatgtttgagatccaagggttttggcaactgaagttacacagccttttgctaggattaaaaattttttccttccctttaaaaaaaaaagttttctttgtagagagctggaagggacacgaagttattgtttccatgcccacaaatggcttctcagggtttaagcattgcggttaatgagcaaatgagcagactctggagattgcctgcctggtttcagatccttgctctatcacatactggtcattgttttgtgatcttaggcaagcttcttaatgtcattgtgtacctctccttcactacctttagggtggcaataatcgcatctaccccataggagcttaggacagtcagttacacaagcacatatagtatgggattaatgctcttaaaagtatatgagtagaacatgtatatatgtgatgtggcttagaattatctcaatctattttatgaagcgtttattaaatgacttgtgtgacagcataatgacgtctttggagggttagctattgtatttcacattttagaaaagagtagtgtgtgttgagaacatagcagaaaccacttccttggtttctcctttgtggaaaaagtaatagaggtaaaatcgttttggatgagtcatgtttaatctttggaagttttagaagaaatggaattctgtaatgttaaaactcttttcctttttagagttcaacttgctgtgaatagagtaactgaagaagcagtcgcagtgaagattgtagatatgaagcgtgccgtagactgtccagaaaatatt

SEQ ID NO: 2748 - DNA, 6000 bp, Homo sapiens
agtcttgctctgtcgcccaagctgtagtgcagcagcacgatctcagctcaatgcaacctccaccacccgggttcaagcaagtctcatgcctctcagcctcccgagtagctgggattacaggtgcgtgtcaccacacctggctaatttttgtattttttgtagagacagggttttgtcatgttggccaggctggtctcaaactcctgacctcaagtgatccacccacctcggcctcccaaagtgctgggattacaggcgtgagccaccgcgcccagcctgttattgtaaaaaatttaaggatttctgtttaggaaatgacactatggacaaagttaataagcagctaacagagtaagagaagatatttacaaagtcaaaatctgacaagagattaatatctagaatttcaaagaataccttcacatcaacaagaaaaaggtaatgactacatacagaaatgggtgaatgatatgaacagccaattaaaaaaccagaaaaccaaaaactgagcatgcacaggaagtgcttaaaatcattagtaatcagaaatataatttttttaaaaaagataacatttcacactcattacactgccgaaagttgtgaatcagcatgatgtcaagaattggcaggggtgtggacatacaggaaccctcatgcaagggcggtggagagcaagctgtcattactcaggcaaataaaatagacgtctgtcacccaacggttccactgctgtgtgtacggaacgctctcacacagtttataaaggaacatgtaggaatatgttcactgtagtattatttatgatgttcacagtggggaaggtagatgggcgaaatatggtggatgtacaccatgggaaatgctgtggcaggcaggcacgatggattagaaatcacattgtgttagtttcctaaagccattgtaacaaattaccacaactgggtggcttaaaacatcagaaatttagcttctctcagttcttgaggctctaagtcccagattaaagaacttggcacggccatgttatgaagtaaataatactacagtggatatgttcatgtatgtcccttcgtaaattgtatgaggactttttgtacacaggagtggaatcactgggtcgtagacatacactttatttgactaagtaatgacagcttgctctcacagcaggggaggatacttccttgcctcttccagtttccggtggcctcatgttctttggcttctggcataatgactgcaatctctgcctccatcttcagagggctgccttccttctgtctttgtctctgttttcttatttttatttttattttttttgagactgagtctcactctgtcgctcaggctggagtgcaatggcacaatcttggctcactgcaacctccacttccgggttcaaacaattctcttgcctcagcctcccgagtagctgagattaaaggtatgtgccaccatccccagctaatgtttgtatttttagtaaagacggggtttcaacatgctggccagggtggtctcaaactcctgacctcaagtgatccgcccccctcccaaagtgctgggattacaggtgtgagccacctggcccgggcgtctcccttccctccctccccctcccctccccctctcccccctcccctcccttccccttccccttttcccttcccccttcccctcccctcccctccccttcccctcccttcccttctcttccgttccctttcttttgagacagagttttgttcttgtcgcccaggctcaagtgcaatgactatatctcggctcactgcaaactccaccttccaggttcaagcaattctcctgcctcagcctcccaagtagctgggattacaggcacccaccaccatgcccagctaatttttgtatttttagtagagacggggttttaccgtgttggccaggctgatctcgaactggccaggctggtcaaggcgatcctctcgtcttgacctcccaaagtgttgggaggtgtgaggcaccgaacccagcctgttttcttataacagcaattatattgaagagggtctatcctgaattgagtatgacctcatcctacttgattacatctacaaagacccctctctaattaaggtcacattcacaagtactggaggttataatttctacctgtctttttgaggaacacaattcaacccacaacaaagaatagcaggaactatttttaaaatgtagtttttagagctgagcatggtggtgagcacctgtagtcccagctactcaggaggctgaggcaggaggattgcttgagccctggagtttaagacaagcctgagaaacatagtaagaacccctctctaaaaaaaatttttttaattagccaggcatagtgtcatgcacctgcagttccagcactttgggaggccaaggtgggagaattgcttgaggctaggagttcaagaccagcctgagcaacatagcaagaccctgcctccaccaaaaaaatgtttttttacttagctgggcatgtagcctctgtaatcctagctacttaggagactgaagcaggaggatcacttgagcccaggcatttgaggttatagcgagctatgaccgtgccactgcaccatagcctgggcagcagagtgaggtgctgtctcttagaaaaaaaagtttttcataaaaaaaaagaaaacaatataatatatacaataacatgcaggtaggtaactttaaaatacatttaccccaaaaattatgtttcagaatttataaaattcagctaaaggagttcttagaggaaaatttatagtttaatagtttaaatgcctttacttaaaacaaaaaaaggttaaaatcataagaaacaaaaagaaagaaaagtaaagtaaacctaaagtgagcagaagaaaggaagtgatgaagataacaatgaaaatcagtgaaacaaacaaatggaaaaacaattgtagtaattaataaaaccatgagctggttctttgaaaagacaggtaaaattaataaacatctagctggactagtgaaaaaaggagaggacacaaattaccaaaatcagaaatgaaaggacacaacaaagaaaacaacagagtgagagaaaatatttgcaaaccatatatccaataaggggttactatcctattctaaatatgtgaagaaagcaaacaactcatagcaaaatcagatcacacgactaaaaagggggcaaagggcaccaggtgcactggtttacacctgtaatcccagtgctttggaaggctgagacaggagaattgcttgaggccaggagttgtgaaaagcctggacaacatagaaagaccttgtctctacaaaaaaattttagattagccaggtgtggtgacatatgcttgtagtcccagctacctgggaagctgaggtgggaggatcacttgagcccaggagttagaggttgcagtgagccatgattgcagcactgcagtacagtctgggcaacagcttgatagcttgagaccctgactctttaaaaaaaaaatcatttatcaaaagatgacatacaaatgatcaacaggttcataaaaatgctcaatattggctgggcacagtggctcacacctgtaatcccagcactttgggaggctgaggtgagcagatcacctgaggttgggagttcgagaccagcctgaccaacatggagaaaccctgtctctactaaaaattccccagaggctggggaataaggggctgggggagataatggggagatgaagatgttggtctcagggtacaaagttaacagttaaacaggaggaatacaattttgagatttattgcacagcatagtgactatagttaataataatttattgtatatttcaaaatttctaagagagtaagttgaaaatatctcgccacaaaaagaatgataagtgggctaggtgcagtggctcatacctgtaatcctagcactttgggaggctgaggcaagaggatcacttgaggcgaggagttcaagaccagcctgggcaacatagcaagaccctgtcgctacaaaaacttttttttttttttttgagacggagcctcgctctgtcgcccaggctggagtgcagtggggcgatctcggctcactgcaggctccgtcccccggggttcacgccattctcctacctcagcctcccgagtagctgggactacaggcgcccgccaccacgcccggctaattttttgtatttttagtagagacagggtttcgccatgttgcccaggctggtctcgaactcctgacctcgtgatcagcccgcctcggcgtcccaaagtggtgggattacaggcctgagccaccacgcccggccccaggggacattctagaggggacttcgccccccaagccgcacttctccatttccctgcggtcgtcgctaaccgaaggcgccatccggtgacgactggatgtgcgcggcggtggtgagaggccgcgagaaccaccaggtccaccgctgcctcggcccgggcggaatctgggaaggtctctgacaaccattcatcctcagattttcccaattgtgcatgggtgggcgggccccgcatcctaatgggcactgggcatgtgaagtgtgaaccacccgggcctaactagccgctgaaggcctgacgaaaccgccaggcccaccagggggcagcagagatccgacggccgcggaccgagggaagctggcgggaagtaggaggcagagggcgcgcagggaagcggcagggcgagcggctcagaacgtaaaagccagcaccgcgcctccaggttgctttacggctgccgcagaaggctttgcggctcttttcccctccgacttgatttacggttccttctctggtctgtgtttttttttttccccctccggcgctgggcgtgggttcggaccttcttcccagagacgctcgcgcacccttcccattctcctctgcgcggcctccatctaagatctcttccccttgtccatagcctagatcgagctccctgtgtgcaccgcgcgctgcccgaggcgcgtaagtgggggaggagagcggcttcccccggggtggttctagccgtgggtgtggagcgtgggaaggctcagcttccgggtcgagaacctggggctgcggtggacctgatcctgaggtctcagcgtagagatgctgagtccagaggcctgttctagttcaccagtgcagtgaggggctcagtatccgggcctcccgagaggtgggtaggaaggcggggtacaggaaacttggcaccaacgcgccgggaccccaccgcggtgcggacagccaggtgtccgtggtggcgcttccttggagatgctgcctgcagacaggcgtggggaatctgaagtttgtgttaatagctaaacgaagttgagttgcagggagcgggggacgctgggaagaaatgattgatttaaaaggaatttgacgccgggcatggtggcggcatgcccccatgttccctggaggtcaagcctgcagtgagccgagatcgcacccgtaccacgacactccgtcccgggcgacagagcgagaccctgtcacgggggaaaaaataaaaataaaaatttgacgctcactttagctgagtattgagccttgttataacattgagatagaggtctggcgcggcgtctcacacctgtaatcccagaactttggaaggccgatgcgggaggatcgcttgaggccaggagttctacgccagcctggctaacatagcgaaaccccgtctctactaaaaatacaaaactaggcaggcctggtggcgggcgcctgtaatccccgctactcgggaggcggaggcatgagaatcgcttgaacccagtaggcaggtgtgccggtaagccgacatcgcaccactgcactccagcctgggggacagagcgagaatccatccaaaaaaaaaaaagttataattcacgtacaattaaattcactcccttttttaaaaaaaagtggagacatagtctcgctctgttgcccaggctg

SEQ ID NO: 2749 - DNA, 6000 bp, Homo sapiens
tcactgcaacctccgcctcctgggttcaagagattttcctgccttagccttgcgagtagccaggattccaggcacgcgccaccacccccagctaattgtttgtattttcagtagagacggggtttcaccatgctggccaggctggtctcgaacccctgacctcatgatccgcccgccttggcctcccaaagtgctgggattacaggcgtgagccaccgcacccggcctaatttttttatttttgtagagacatggtctcgctatgttgcccagccatcctcccacctcggcctcccaaagtgctgggagaactgttcactactatgataccagcatctagaatatgtggtacataatatgtatttaatatatacttattaagtaaaaatagtatacacagttaaacttcaaatgatgttagtgaaccagctaattatgtgcccaaactgttctaaatacatgaattaattcatttgaccagcttaagaggttaggtactactgttattatttctattttgcagatgaagaaattaaggtacaggttaaggttaggaaataaacaacattaagcagtttgccctacatcataccatggcaaagccaggatttgaactcaggcactctgaccccagaacccaaactctagtacactgaaagacttggtgagcaacagatttcaattacattccacacacaaaaaataaataagaaaaaaaaacaaattatattccacataatctgtatgctaagtttattttactatatgtctctgaaaactgataatcaatgtactactgattcttaaaccaaaatacttcatttcttgatctttttccattaatgtttctgatgaaatatgtgtaaaatacacatttaacaactctcatacttctaaatgtaaacatagtgtaaaaccgagcagctgttgctatgaaaaccttcactttttttttttttttttttttttttttttgagacggagttttgccgtgactcaggctggagtgcagtggtgcaatctcggctcactgcaagctccacctcccaggttcaagcaattctcctgcctcagcttcctgagtagctggggttacaggtgtgcaccaccacacccagccaatttttatttttattttttgagatggaatctcgctctgtagcccagactggagtgcagtggcatgatctcggctcactgcagcctctgcctcccaggctcaagcaattcttctgcctcagcctcctgagtagctgggattacaggcatgtgccaccacgcccagctaattcttatatttttagtagagacagggtttcaccatgttggccaggctagtctcgaactcctgacctcatgatccgcctgcctcggcctcccaaagtgctgggattacaggcatgagccacggcgcccggccaagaaccttcacttttaagtttgcagtattaatgttgaattaacagactggcatacttatctatgacacaggtaatgaaggaaaaaaaacacctcagtagactcaacaaggatatcacaagtaatgactagcaagcaacattttttgaaaaataaaatgtaggcataatttcaggcacaagaaatgctaaacgaaatagcttacttttaccttaagactttccccaaattatgtgatttcattcctacaaggacaagaatcacagcttactaccagccatgcaaatgtcattttaggagtacacacaagttttacccagtatcttagttcacatttgtcccaattaattaagtctatgtataatttaaaagcgaaaactagatatgtcaattttgttttccttctaactaatccaaagtcaaaactgttcactttaccaaatgaattaactgaatacagttaattaaatcttttatttataattaaaaattggaacacacactttctcacttaatacctattatgtcctgtttcccatacctctctataaagtagaagtatttgctggaagacaataatctgctcattaagtaggcacttagaaaaagcaacgatctgcaactactgaaattcttatctgtatatttctcttttgggttacaagaaagcacttctctggctattttcccaaataaactaggcaagccttgggaaagtcactgcttaaatcccactttctgacagcttctcttcctccataaatgaattattgagagccatgtctacttccatccattacataatacatgtccatcatgggacctgttttctgaacaagaaatagcttaaatgacactaactgataagtagggccagagaatactgtaatctaacagggagcaagaatccagaaaagaagattctgatttacagtgctaagttgtgaaagagtgatgtgaagaacattgaacactgcttactctaatatttccatacaaagtgacacacctgcccccaaaatgtttttaaagcacttgactccaagaacatttctcagaaattgaggagcctaccaaaaaaaaagagttccatttcattttaaagtgttttaataaagactgcaagaaacataactgcaaatgagaaataaaatttcaacaatttagcactgaacacaaaatgtctaaaagtcaaggtgtactgagcaagcaacacgctataaaagacggttgtactttaaaacatttaagcatttttcatataattagctccaacagaactattccaattgttcactttatccacccaaagcagtcaaccacaaccacctgcaactattattcagcaatgtgccttccaaagcaaccacctgagtttggggccttctctcaaggggccaggataaagcctgtaaaagggtggtataaagagatcttttaggcattggggggaaaaaaaactggaagacaccaccttgaaggagctaagcgtaatgcgacccaaatggtggctgccggaacgaagttgtctaaaccgaagatctccctcttcttcggtgtaaaactttcagatacatccacgctcacaatttacctgagccaaagtaaggggattctcttccctctccgaccccccacccaccccgccagaagaaaaagaatcgaaccctaaagtagaaacgtgagatctagtgcaataaaataggttctgcaactgcctcaaaggcaacatgcacagctcatcgtccttttgaaatacacttcatcttttatctcaccatttcatcgaaaagaaaagaatcatcttcagcattttacatcactcacctaacccaaagatccaccctgaccgcaccccaacctcatggctccccaatttctccgtctccccactacctcgtccgcggcttcactagtcctaagcctccccccctccgctccccaagtgcccagagccccagtccccactcccccacctcccgccccaggatccccacatctaccgcctcggctcccgcccgatcccggagcccggctgggtggagcccgcgggtgggcgccggtggtctgggtggggcccgcccctccccaccccccgggctgccgaggagggggagggggtcgcgaagcctcacctacagctccgcccctccccgggggcgcgttgccctgcccagcccagcccgggccgtgagcaagaagctgggtaggaaaggcgaaagcctcagcactagcgacaggggggaagctctgggtcccgcgcgacttccgcgctgtcgccgccgccgcggccgtctcaccgtcctcagggctgccgctactgctgctgctgccgcccaggcaccgccgccgccgccactaccgccgccgccgccgccacagcacggcccaggcgcccgcgacgtcaccgcgccccgccccctgcgcgagacacctagccccgcccccagccccgccgcggggcgcagcgcgcctccccgggctcccggctcggctgcctccctttccctcagcctcccgggagcgtgacgcggcggcccgggggcctccgggcgccttccggggcacgcgggtgaggaactgggaagcgggggaaatcggcgccacggcggtcgattagcaccgaaacagagtgatgggcgcggagcgtccctgcacacacacacacactcacacacacacacacacgacccctgcggccacgggaggggagagccggggtcggctccgcgagcgcagggtggcgcttgtctcctcctgcttgccgtaggaagtggacgctggaagcccgaggagccgcttcgtgtcttcccaaacctaagcggcgccccaccccctacttctcgtggcccgttacgcccggggcagccaagcgccgcgggagcagcgccgggatcgaccctggctgctggggggacgctttgtcccaagaaagctggttttttgccccttagcttcgtggaacgcggccgcgaaattagtggtcttctgacctgagactcgcggggctgcgcacacgggcatcgccgaggaccccagcaatggacgtcgtgtctgtggtgatcccgccaggacgcggggagcgtgggcggaaattagtgtccacgttccgaccctgcgctgtgccaaacgctgcttcgggagctgtttatttagcctccgacagctaagcgaatcggcgggcggctggggcctggtgcaacccgattttctcgtgcagactcgcagccggctttggttttgttttttgttttttgttttttttttggagccatgcagagggtagctacagccattaatttaaggatgtagataagctatctctaaaccaagaaagtaagaatggtgtgaattatatttattcccagccttccagtgtttattaaaataattttcggtgtccttgagaggagttaaaagccatcattttactcctgcttacctccgccaccgtaattaaccactttatactgcctcataatcccattaacaaattgcagtcgctcctcagccttcacattcattcactcaccagtttctactgtttcatcctgcccggactcttaactgttccctcccaggatcgacatgcacttggatcattgcagtttctgggcctgctgtcatctcccccttcagtacttcccacatatgactaccaactgttagacgatgtgctgctgccagaccagcctttcatttcttggacatccggctatttacccaggaaaagtcatcctttgactatttttcatgacctttctcatctgactcgtgatctgcccatcttgttactccctagcagtgtggtaaggtaagagaaaattcaactaggagtcaatagatatttctgttctcattctcccactgtctacttgtgtggcctcaggcaattcattctacttgtggtcttacttaactgtaaagtgaggtttgaagtaggtgtctgagatacatcatgtccttaaaatatgtggatctggagaattaagttgctaagcgctatgttatacacggaaatactgtcctaacacagattcagatttttgttttttattttttgccaccacactggcaaaaaatattatttcctgccctgctccagttatcttttttaaaacctacgtttaggatttttgattaaagctagctaaccgagcacatgtatttactgtctcttcttcctgagaccccataaaatgatgataaataaaagtgatacaaaatagaaaatgagaagggggacatcggaagataatttttttttatttgacatgcaaaaagtaagtgtggtctgacaaaataaaatggagaaaagcataatgtagaatgggtgtagagggtgctgtagaaaggaaggggacctgtcagcccagaagtgctttagggagacggagatttggagataactaccagacagagcaagagtgagaagcagagttgagaccagggagactaaataaaggtctatataaggaagagcagaaccctccctatatctcagatacaatatctaggcatttatccaggctaaaattaagcactctgataatctggggagatttgggttaactgagtatt

SEQ ID NO: 2750 - DNA, 6000 bp, Homo sapiens
gttggctttgaactcctgggctgaagcaatccttctgcctcagtttcccaaagtgctgggattacaggagtgaactaccacatccagcctgcttttgtttttatttttgagacagggtctcaccctgttgcccaggctggagagtggtaccattatagtgcactgcagccttgaactcctgggctcaagggatcctcctgccttagcctcccaagtagctaagaactgcaggtgtgtgccaccattcccggctaatttttaaaatttttttgtagagacagggtctcgctgtgttgtctggggtggtctctgactcctgtcctcaagcgatcttcttgtctcagcctccagaagtgctgggattacagatgtgacctactgagcctaaactgttttaacgatagcaagactatgcttcattaataggttgggtgtaaaagttgaaacccctaaaagcagcatcttctaagctttttttttttttttttatcatagtaactgattattctgtttaattctctcttttccgggcgttttctctcccagaactcctacccttctgttccaatctaactaagttcctgggacttccctttactgttttcctgaattggatctagtgattactggatgttgtcagataccctgatttctccctcattttgcttgagcacacatttaagtaactcttttttaaaatttatttttattttttgagatggagttttgctcactgcccaggctggagcgcaatggcacaatctcggctgactgcaacctctgcctcccggattcaagcaattctcctgcctcggcctcctgagtagttgggattacaggtgcccgccatcatgcctggctaatttttgtatttttagtagagacgaggtttcaccatgttggccaggctggtctcaaactcctgacatcgtgatccacccgcctcagcctctcaaagtgctgggattacaggtgtgagccaccgtgcccagcccgccagtttgatttttgtccttttatgggctcctttttttcctctttggaaacttagaatcttctttatatttagagttcaaacatttcacatggttgaattttttttttcttttggttctgcactagtggattctttcagttctaggaaattgtcttgcattattttttcaataattttctgtccttcattaactttgttttctctttttcacataatattagtcctgttgaactaattctttatcttattttctctcacaatttccacccctttgtatatttattgttttcttttttttttttttcctgagacaggatctggctctgttgcccaggctggagtgcagtggtgttatttcagttcactgcaacctctgcctcctgggcttaagctatcctcccacctcagccacctgagtagctgggattacaggcatatgccaccatacttgacttatttttgtatttttttgtagaaaaagggttttgccatgttgcccaggctggtcttaaactcctgggctcaaacgatctgcctgccttggcctcctaaagtgttgggattataggcgcaagccactgcacccggccctattttcttttttcttttttgaaataaggtctcttgctctgtcacccagactggggtgcagcttcctaaagtgttgggattacaggcgcgagccactgcacccagccctattttcttttcttttttgaagtaaggtatcttgctctgtcacccaggctggggtgcagcaccaccatcctggctcactgctccgttgacctcccaggatgaggtaatacttacacctcagcctcctgaatagctaggaacacaggtgcgcatcaccatacctggctaagttttaaaacatttttaaagagatggggtctcattatgttgcccaggcttcttctattttctttaaaagttcagtgactttatctttcaatattttaattgaatttataatttggcaatttattttaaatttcaagatctatttttaaaccttggattgttacttcatctgagtatcctagtatactaattaggttttcctttctaaattctctgaagtttctgtttatctgcccccacagtccatgttggagacttttcttaaatacctaataacacttagttgtctgttcatacgtatgaggcagttggaatgctgatggggagtcttgtgaacttgggaggtgtcttagtctattttatgttgctataaaggcatgcctgcagctgggtaatttataaagaaaacgggtttgtttagctcacaattctgcaggctgtacaggaagcaaggcactagcatctgctcagttctggtgagggtttttgtgctgcatcaagacatggcggagaaggtcaaggaaaagtgtctgtgcacatgcaaagagaaatcaaacccgaggtgagtcctggctttacaacaaaccactctccaaggaacaaatccattctcctgataaccaacatagtttcgcaagtgtgagaactcactactgtaagaatgacaccacgtccttcatgaagaatctgcccccatgacccaaacacctcccatcaggacccacctcccaatactatcacactgggaatcaaatttcaacatgagatttggtagagacaaaaaaaccatatccaaaccatagcaggaagttcctgccaacttgcccaactacactttaaagtgggtgggtaggaaaccagctattgtgctagaataaagaatactttactcttaggcccttcaatactcagttaacccaaatctccccagattatcagagtgcttaattttagcctggataaatgcctagatattgtatctgagatatagggagggttctgctcttccttatatagacctttatttagtctccctggtctcaactctgcttctcactcttgctctgtctggtagttatctccaaatctccgtctccctaaagcacttctgggctgacaggtccccttcctttctacagcaccctctacacccattctacattatgcttttctccattttattttgtcagaccacacttactttttgcatgtcaaataaaaaaaaattatcttccgatgtcccccttctcattttctattttgtatcacttttatttatcatcattttatggggtctcaggaagaagagacagtaaatacatgtgctcggttagctagctttaatcaaaaatcctaaacgtaggttttaaaaaagataactggagcagggcaggaaataatattttttgccagtgtggtggcaaaaaataaaaaacaaaaatctgaatctgtgttaggacagtatttccgtgtataacatagcgcttagcaacttaattctccagatccacatattttaaggacatgatgtatctcagacacctacttcaaacctcactttacagttaagtaagaccacaagtagaatgaattgcctgaggccacacaagtagacagtgggagaatgagaacagaaatatctattgactcctagttgaattttctcttaccttaccacactgctagggagtaacaagatgggcagatcacgagtcagatgagaaaggtcatgaaaaatagtcaaaggatgacttttcctgggtaaatagccggatgtccaagaaatgaaaggctggtctggcagcagcacatcgtctaacagttggtagtcatatgtgggaagtactgaagggggagatgacagcaggcccagaaactgcaatgatccaagtgcatgtcgatcctgggagggaacagttaagagtccgggcaggatgaaacagtagaaactggtgagtgaatgaatgtgaaggctgaggagcgactgcaatttgttaatgggattatgaggcagtataaagtggttaattacggtggcggaggtaagcaggagtaaaatgatggcttttaactcctctcaaggacaccgaaaattattttaataaacactggaaggctgggaataaatataattcacaccattcttactttcttggtttagagatagcttatctacatccttaaattaatggctgtagctaccctctgcatggctccaaaaaaaaaacaaaaaacaaaaaacaaaaccaaagccggctgcgagtctgcacgagaaaatcgggttgcaccaggccccagccgcccgccgattcgcttagctgtcggaggctaaataaacagctcccgaagcagcgtttggcacagcgcagggtcggaacgtggacactaatttccgcccacgctccccgcgtcctggcgggatcaccacagacacgacgtccattgctggggtcctcggcgatgcccgtgtgcgcagccccgcgagtctcaggtcagaagaccactaatttcgcggccgcgttccacgaagctaaggggcaaaaaaccagctttcttgggacaaagcgtccccccagcagccagggtcgatcccggcgctgctcccgcggcgcttggctgccccgggcgtaacgggccacgagaagtagggggtggggcgccgcttaggtttgggaagacacgaagcggctcctcgggcttccagcgtccacttcctacggcaagcaggaggagacaagcgccaccctgcgctcgcggagccgaccccggctctcccctcccgtggccgcaggggtcgtgtgtgtgtgtgtgtgagtgtgtgtgtgtgtgcagggacgctccgcgcccatcactctgtttcggtgctaatcgaccgccgtggcgccgatttcccccgcttcccagttcctcacccgcgtgccccggaaggcgcccggaggcccccgggccgccgcgtcacgctcccgggaggctgagggaaagggaggcagccgagccgggagcccggggaggcgcgctgcgccccgcggcggggctgggggcggggctaggtgtctcgcgcagggggcggggcgcggtgacgtcgcgggcgcctgggccgtgctgtggcggcggcggcggcggtagtggcggcggcggcggtgcctgggcggcagcagcagcagtagcggcagccctgaggacggtgagacggccgcggcggcggcgacagcgcggaagtcgcgcgggacccagagcttcccccctgtcgctagtgctgaggctttcgcctttcctacccagcttcttgctcacggcccgggctgggctgggcagggcaacgcgcccccggggaggggcggagctgtaggtgaggcttcgcgaccccctccccctcctcggcagcccggggggtggggaggggcgggccccacccagaccaccggcgcccacccgcgggctccacccagccgggctccgggatcgggcgggagccgaggcggtagatgtggggatcctggggcgggaggtgggggagtggggactggggctctgggcacttggggagcggagggggggaggcttaggactagtgaagccgcggacgaggtagtggggagacggagaaattggggagccatgaggttggggtgcggtcagggtggatctttgggttaggtgagtgatgtaaaatgctgaagatgattcttttcttttcgatgaaatggtgagataaaagatgaagtgtatttcaaaaggacgatgagctgtgcatgttgcctttgaggcagttgcagaacctattttattgcactagatctcacgtttctactttagggttcgattctttttcttctggcggggtgggtggggggtcggagagggaagagaatccccttactttggctcaggtaaattgtgagcgtggatgtatctgaaagttttacaccgaagaagagggagatcttcggtttagacaacttcgttccggcagccaccatttgggtcgcattacgcttagctccttcaaggtggtgtcttccagttttttttccccccaatgcctaaaagatctctttataccacccttttacaggctttatcctggccccttgagagaaggccccaaactcaggtggttgctttggaaggcacat

SEQ ID NO: 2751 - DNA, 6000 bp, Homo sapiens
aaaattggtagaatttaatcacattgaaaagtggaaataaattatttttatgggaacttcacaatgtagccaaatatcttttttcaaagcccattacttgggccaggcacagtggctcacacttgtaatcccagcactttgggaggccaaggcgggcagatcacctgaagtcacgagttcaagaccagcctggccaaagtggtgaaaccctgtctctactaaaaaatacaaaaattagccaggcatggtggcggacacctataatcccagctactcaggaggtgaggtgggagaatcgcttgaacctgggaggcagaggttgcagtgagccaagatcgcgctgttgcactctagcctaggtgcaagagtgagactccgtctcaaaaaaaagagaaaaaaaagcccattacctattcctagtacattaaccatgctagaggaaataagcattatggggggaagagaaagtagctcctatttgaggatttttacaatagtagtattttctctttccattaccataatgatcttcctaagatcctaccaaagtaacttcttattttcttgcaaaaggatgttcttttccagtccattactgtttctcacaggtttttctgtcttaccaatcctctgaactgttgtagttctactcttgactgtcaacgtaaaactactgctgtggcttttccacatgtatacaacacatatatgcatactttcagggtctatgcagtcttcatcacatactcagcaagcactaatacttgttgtctcttatatgcttccccatgtaaaaataagataacttaggactccccccacctactactacacacctggcaatttataagtatctgatgacagactgatgacaaaaaaaaaaaaaaagctagatgttatactctacactctttttcccaagtggtagatacagttaaggctgtgctcaaggcaaaaacagattccttcaaaccgaagacttactaaatatttgacttacagaaaactctagtggtctaagaaagaaatattaaatccacttcaacatataacataatctaatgcaatgttcctcaaacttttcaatcatagcagagtcaagtaaacatatgactaatgcttaaaaggcataacataagcctaacctttcttcaaggtcttgttttatagtacaattaatagggattttatataatatgctgtaacatctttgtatctcaaaaagacagtgttttccttcttcagggatggaataggagacaaacctctatgttgcaactatggactttagagtagtttagatctaaagagacttttcacctggcctgttcatttatcacctactaacataatttttatcagtataattatcagcataattatcccaaatgattagaaaactatctttccagacctacctcatatgcatttgggcaatttagtcagtgtttgagctatatatgtcatataaattccgaggaaatgagtttccaaatctttagaacaaaaataagaagctttacttaccatcactgtcagagtggtcaaactgtgagtaattgactggtttcttatgtctatgaccaaaacagaattttttcattaacacaaatgtcaatttctcaccactattacttaaggctattaatgaatattatttatttatttaatattattcatttattaataaataatgaataaacgaaataaataaaaatgtgttaaatgaaatgtgtttcaataaatgaaaatgtgtttgggttcaagtaagaatatttaactctaaaacatgatttgcattttaccgcggggatttatcattagctaaaatagttacaactatacctgatatacctgggtattgttggcttttcaattatatgataaaggaaaaaaattcaggtaacttacaaagaataatctacataattaacatttataattgctatactgtttaattgctgttgggcatttgtaagttcccgttgtacgtgttcttctgttttgtgtgtgcattctatcttccttactagattataaatttcttgacactaaaagctactttcttttcaatctctccaccataccaaataacatttttatgcaacggacacttaaaaatggtgagtgaccttgttcctaccacctgagatgagtatcccttatctgaaatgcttggaaccagaaatgttttgaattttggattttttcagattttggaatatctgcattatatacttaccagctgagcatcccaaatctgaaaatctaaaatctgaagtgctccaatgaacatttcctttgagtgccatgtaggtactgcaaaagtttcaaattttggagcatttcaaatttgggatgctcaacttgtactacttcagagggcattagaagaaaatgatattcaaagtgaaaaaaataattttttcctccctcctctaggcactaaataaaatgtttttctagtttttatttctatatttttgtcaaatggctaaatgtgaataacctaatttgtcagctggttgttctttcaagtaaaaagaatgttctatgaaaaagaggtagtaagctcagctcacaactcagacaatctcacaagtgcttttccttgagataactatcacgcatcagtatacagaagtgctttatgtgtacttcctgtttcctcacgcaaactattaaaaagtgcactcatattactctcttactcttcagagttaaagaagttagagctgaataaaatgtgaaaacccctttataaattctgaacttgaataatagtaaaataaaatcaatagcctatttttaattagtatacttaagggttaagctatgatgaatataataatttccactacttcatcaagcatattcttaactgaaatgatttttttttttttttttacttttaagagtatggcagtaaacattgcaaagactagtagtacaatttagtgccactgccttaattgttctgaggtgccagcagttttatcggggtcactgcagtgcaaatgacaaagcagcgaaaaaggcaaatcatatcttagtattgttatgaaaggagttttgacctcatagacctctagagaagtttccagggacccacagaggtctgtagaccatactttaacaactgctgttccttacaaagggattatgactccactgcctggatgcttaaaacccatttcaaattcagcatgttcgaaacagaaatcttgatccctcacacctcctaaccttccttttcctagtcttccctatcttaatacaaagatcatccatcctgtagctcagaccaaaactattgtggagtcatctctgattctttctttcccttacctgtacatctacttcatcagcaagttctgtccacagtgcctccgaaatacatcccaaattcatctgttccattccatgcccactaataataccctatcccaaaccgctctccaatgatataatacctgattttcctgctcccgttctggtcaccctatccatcatttattctccaccaacagccagtgacctttataaaagcaaacttagattcctctcccctacttaaaaccctccactgacttcccattgacttaaaataaaacctaaactcctttctaagacttacaagaccctatctgttctggcacctgcctatttctctggcctaatccccctacgattctccccactgcttgttaatcctatagcattagactgtccctaaaatatggtcaagtatggggccttggctcctattccctctaccctgattcatgactcagtgcatgcattatcgcctcagagtcacatattaactactatatttaaagtagtgctttcctctttcgcactctcatatttcgaggcttattttcggccccctaacctcacctcccactggaatgtaacctccagcacctcgtacactaaagaagtgaatatattcaataactttattaaatgaatggctaactataggcttccatggcactcaactgtgtaaatagaagaatcgtttctaataccacgatggaaagcacagaggatcttgagtgagatgacttaggtttgagtattgccctgccacttactgggctgtatgactcagataacttaccctctatacgtagaaatgttaaatcaatacaacaggaatgcttactctttctatatcaaataactacagtgataaacaaataaaataacacataattgggcgctcggtgaaatgtaaagcgctgttcaaacgctaacaaggtcttggtaaaagaaacggcgacggttgtgaagggaggcaaagagaaggaaaaagctacgatgctaggatacttctgagcaacgggtggctctcactggagactgggttcttgataaccgtccatcctaaccccaccatcgctgccctccggtcttactcgatcctttccccttagtctcatgtcttttcccttagttttcctcccacccccgacgaatgtcaggaactacccacctcacaggccgcaccatggtccctttcaaggcttggtatttacagttctcaaattcttgttggcttcagcggcggtttcaattcccgcccaaaaccagacttcggagccctccgccccctgttaccagtcgtccaatcatcaccagccatgcttgcggcggcgcacgcgctgtggggaaagcgaatttgctcccgccctccccaaggcaccgcttttccgtatccggtccaccagagccgagtttgtgctttgtccctgcactttcgtcacaacggcggatttgccctgtctctgaaatacagaataacaatagaaatacaccttattgcacctttcaaattgttaaattgaaacaggttgggacataggggcacttggactgagaaattttctacaagatgccaggaaatagaaaaggatgtggcgaatctacgttcgcggatccgcggtgtggaaaaagtatgtcggcaagtcagctggtttcccagtgcaggacgcgctgacagctcgagtgagcggactgcccaggacttcggaactagacgaggtgagcccagaaccgagtgaggatgccctttcagactgacaaccgttacagagggattagtcccctcacccggctgaagtttctcagctcgaccgtctgtcttccttttccctgattaatgtgagcctcagagcctccgctctgttggctgtgtgtgttcggtccagaccttccatcccattttcttatgggaaaccttcctggatttcacggttgctaaaactgaacccaggcttcaggatagaccattagtctaaaaaaagagcgagaggagaaagaactaaagttatcagtttcttgaaacacaagtctaaatgttgaaccagagcttttgtgtctgccttctcttttttttttcaacattcctgattcattcatatttttgcatttatcagtggttgattcttttttattgctgtgtagtatttatctcataaaataaacaagtttactattctcctactaatacgcattttggttgtttccagtttggggtattataaataaaacttatatgagcattcttctgggtgtactttagcgaacatatgcgtgtgtgtgtatttggatatatacttaggaatgaaatttctacatcatagaatatacctttatgtagttttggtagttttctaacattataaaaatttgtattgctttacgtttaattttaattctttctgagtaaaacaaataccctatctctttgcattatggtgaaatagacgaagatttttgtgtatagcctacatacagatttgaaaatatagtctggataattcaacttagccccgccccacgacatgtacaaaagtcctttgagttttttttatatttcaggtgatatctttttaaataaccgtatgaataattttttgttctttatttttccagtgagcaccataaaataaaaacgccatacaatccaacaattatttattagttctt

SEQ ID NO: 2752 - DNA, 6000 bp, Homo sapiens
tatatgcaagtagcctcttgttttacaaaggtattacataaatagcattttgtcttatgtgctcaccctgatataggaagcacagaagcagcaacatatacattatagaatattgtatgtggagaaaaaggatcttataacgatttcaggattaccacagcattttaaaaattttcaccaaaatccagaatatccttgaaatttacaatctgacctattttcttacctcagcataagctttggcccatgtactcgccagctgatgtaaatctacttcacctgatttcacagctgccagggatgcttcagcatctctatcataatcgctgagggattcttcttctataaactgagtcagagcttcttttaagtctgttacagggacatcaaacaccatcgtcagcaaaatccaggtataaatagggaacattttacttggctgagaattccaatgtgaaatcttattgttaaatttttattttttatttagagatggggtctctctctctgttacacaggctggagtgcagtggcatgatcacagttcactgcagccctgaattcccggactccagtgatcctcccacctcagcctcccgagtagctgggaccacaggtgcatgccaccatgcatggctaatttttgtatttttggtaaagataggtctcaccatgttgcccaggctggtcttgaactcgtcagctcaagtgattcacctgccttagcctcccaaagtgctgggattacaggtgtgagccaccttgcccagacatgaaattttattttatcaagctgatactcttaatagaatctccaactaaaatgaaatcagcttaggggatcatttaactaatttcatgattattttcctttactattacaggctattgcatagagaaaggtcaaaagtcttaactcttacgtattcccttgatactaataaagtaatgttactttcttaagcctgatatttcagtttgaagccaagtgggtataaggacataaagaaaatgctacagattttgaaggtctgaacattactgtatttacattaaaaagagttttccatgtaactttaaagggtacattgttacatcctttgaaagagaagttaaatgactagcttattaacacatttaacttagatgactgaccgatttcagttttacagacaccacttagagaatgatataacggaagagcactgagagagaagttaggacacctgtgttctggctttggctctattattatcactatgttcgcgactttagactgtggttcacaatcttaagtgtgcattagaaacccctggaggccttatttaaacagactgccacatgctaccctagtttctgattcagcagaaatgggatgcagcccgagaatttgcatgtctaacaagcttgcaggtgatgctgttgctgctaaatgattagaaaccatatttcaagaaccactgcctagggtaaataatttaacctctttatgttccagtttccttgtttgtacaatgtgattgggctataaagtttctaggttctcttataactctaacctgtgatctaacatattctgaattttaaatttttcctagactgtgagatagagcacagacctttaaaaatggtttaatacatctaactttataaaactaatttaggtaagcaaagactattcaaaaattagtacactttctgttctatggcatctcagaaattaatgaccagattattaaaagggcaaccaatttagcactataattctattagcacaattagcgatagctaaactgccttataacttcacccaactaaattcagaagagctcctctaattccaaactttgtagctaatttttcattataaaatctaatttttatattttataaacaactaccacttataggaaaaaacactcaataaaagaaagctctggagaaatgtttttattcttggaatcagttcctatgttatggctgtttccaaagcttcttaggtttatgctttctaatatgaaacttccaatgacagactattgaaactaataaagtggtgttacttaaaaaaaaaaacagtcctcacctttttctataaagcacggtaaactgtgcagcagcatcagacgtccatgcaaatgactggcattctcttgaacaggaaatttgagtggcactctcagttctaagcactgacttcctactttaaatttatatacaaattctctctctctattgcagaatctttctctgtttttcttcatattctttgacaggatttctacagaactaacaaaaaagcagtaggttataagtccataaagaaattatgtttcattattgctgtcccatttctaagaaaacattccaccattcaagagattttgtctatgagccaattattctagtttttcccaagtgtttatccctgtacttccatcttcatgatgaaaacaaagtgcttctttaaaaaaaaaaaaaaagacactttgttttaaacttgatttaagaaaaaaaattatggccataaagtactttatattccaaggcagggttctcaataatagggaaggaccatggagagaagagcagagagaattcttagggagagttcatgggtggggaaatacaaagcttaagaaaccgttggtaaaaagaaagtcaaagaagcagatcagggaccaaggagtgatcctggagaacttagaggttgtggtcatgagatccgactgggggaaggggagtaagaaagtgttagaaagatttccatgtgggaagaagatacacagaaaagagagagtacaggacctccacttccggcccacaccccaaaggcaaactagacactactaaggaagaagaaaatctagttaaaggcagtaagaatcaacatcaattaaagatttatttattcatcagccttgtaactggacttcctatggctaggctttctcccatcaaatcagttcttacattattttctacactgaagttatagtaatcttcctttttaaaaaaggaatatacttatctgatcatgttgttcatccgcttaaaaactttctatgacattccattgctctcaggataaaatgcaaactctttatcccagtttacaacacccctgcttatatttccactcttctctcagaaactgcacctctccttcctaatacacaaattcacaaattttattttccagccattctgaacttctgtcaacaccaaacttctccttccatgccgaatctttttgaatgccttttcctttgcctagagcactcttactgatcttaatttcattggataacaattgctaattcttcaggtctcagttaagcctctaggaagacttatccaactccctaaaactggattgggtcccgacaggctctcatattagcctagacttatttgaatcatggcacttatcacgctctatttcttactcttggctagaaaacagtcttcttgaagtggaaggaatactgtcttgtattccatgtattaggcaggatgttgcgaatggcaagaactaataaataattgttggattgtatggcgtttttattttatggtgctcactggaaaaataaagaacaaaaaattattcatacggttatttaaaaagatatcacctgaaatataaaaaaaactcaaaggacttttgtacatgtcgtggggcggggctaagttgaattatccagactatattttcaaatctgtatgtaggctatacacaaaaatcttcgtctatttcaccataatgcaaagagatagggtatttgttttactcagaaagaattaaaattaaacgtaaagcaatacaaatttttataatgttagaaaactaccaaaactacataaaggtatattctatgatgtagaaatttcattcctaagtatatatccaaatacacacacacgcatatgttcgctaaagtacacccagaagaatgctcatataagttttatttataataccccaaactggaaacaaccaaaatgcgtattagtaggagaatagtaaacttgtttattttatgagataaatactacacagcaataaaaaagaatcaaccactgataaatgcaaaaatatgaatgaatcaggaatgttgaaaaaaaaaagagaaggcagacacaaaagctctggttcaacatttagacttgtgtttcaagaaactgataactttagttctttctcctctcgctctttttttagactaatggtctatcctgaagcctgggttcagttttagcaaccgtgaaatccaggaaggtttcccataagaaaatgggatggaaggtctggaccgaacacacacagccaacagagcggaggctctgaggctcacattaatcagggaaaaggaagacagacggtcgagctgagaaacttcagccgggtgaggggactaatccctctgtaacggttgtcagtctgaaagggcatcctcactcggttctgggctcacctcgtctagttccgaagtcctgggcagtccgctcactcgagctgtcagcgcgtcctgcactgggaaaccagctgacttgccgacatactttttccacaccgcggatccgcgaacgtagattcgccacatccttttctatttcctggcatcttgtagaaaatttctcagtccaagtgcccctatgtcccaacctgtttcaatttaacaatttgaaaggtgcaataaggtgtatttctattgttattctgtatttcagagacagggcaaatccgccgttgtgacgaaagtgcagggacaaagcacaaactcggctctggtggaccggatacggaaaagcggtgccttggggagggcgggagcaaattcgctttccccacagcgcgtgcgccgccgcaagcatggctggtgatgattggacgactggtaacagggggcggagggctccgaagtctggttttgggcgggaattgaaaccgccgctgaagccaacaagaatttgagaactgtaaataccaagccttgaaagggaccatggtgcggcctgtgaggtgggtagttcctgacattcgtcgggggtgggaggaaaactaagggaaaagacatgagactaaggggaaaggatcgagtaagaccggagggcagcgatggtggggttaggatggacggttatcaagaacccagtctccagtgagagccacccgttgctcagaagtatcctagcatcgtagctttttccttctctttgcctcccttcacaaccgtcgccgtttcttttaccaagaccttgttagcgtttgaacagcgctttacatttcaccgagcgcccaattatgtgttattttatttgtttatcactgtagttatttgatatagaaagagtaagcattcctgttgtattgatttaacatttctacgtatagagggtaagttatctgagtcatacagcccagtaagtggcagggcaatactcaaacctaagtcatctcactcaagatcctctgtgctttccatcgtggtattagaaacgattcttctatttacacagttgagtgccatggaagcctatagttagccattcatttaataaagttattgaatatattcacttctttagtgtacgaggtgctggaggttacattccagtgggaggtgaggttagggggccgaaaataagcctcgaaatatgagagtgcgaaagaggaaagcactactttaaatatagtagttaatatgtgactctgaggcgataatgcatgcactgagtcatgaatcagggtagagggaataggagccaaggccccatacttgaccatattttagggacagtctaatgctataggattaacaagcagtggggagaatcgtagggggattaggccagagaaataggcaggtgccagaacagatagggtcttgtaagtcttagaaaggagtttaggttttattttaagtcaatgggaagtcagtggagggttttaagtaggggagaggaatctaagtttgcttttataaaggtcactgg

SEQ ID NO: 2753 - DNA, 6000 bp, Homo sapiens
taccagtattctcaaaaccaaattttcagaaggtcaggcatcacttttaatttcttgattacttattatggacttatctacaaatttacctaaactataaatctacttaaatatttggtctagagtcctaaaatcacctctccgaagtttcaaagaatactgttttacctaatattaatattctaggtttttcatgtttcattagtttcattaaaaaacaaagaattgttgatcaactgccagatgcaaggaactgttccaggtactgaatatacagtggtagacgaggtgtaagctttaaagtctatgtttatcttgtatataaaattaatacttttattgactgtgcattctctaggtcttatttttttagtatgaaaagtcttaacttctaaggtgacagatgtactcttctattaatgttataaagcacaattcactaagttacctccttgatcattttagttttgattctagaaaatagccattaatccgtagtttagttagaagcacaatctgcatacagatgagtcagagtagaagccaccgtatttttagaagcacaatttaaaataccctatcactgatttctgatctattgcttaacttttttgcctcagctccagaaagctaaaatctaggtcacagctacttaaaaaactcttaagtcatataaaatgttctgataacttgaaaacttttatcaactttagctttttctacattccccacctgctcaatttcctgataactagtgtcttccattgcagacaccttttgttcccaaagttagtctaaaataattcaggtacctggtctataaatacaccagttaagtgaattcaacacacattcctatgaaaatttgaggctgatactttcatgatcaaaggccttaagagaatttaccaaattaactatttggatagtggacataatttcatagaggaaaatatggacaaaagagcaagtaaaattctattaaataactatttagtagttaggattaaacatcggcagctttgttagttgaagatgactaatttctatcatttcacaaataaccttgatgattacataaaaattctgagatgtttttagaaaggaaggtatatggaaagacacctactatgtactgagaatttaccacgaattaggccttatgaagtgcttcacataccttatatataacttaatacttccaatactactggaatgcaggtataattacatctttttaaagatggaggaaattgaagtttagagagttgacttaagttgcctaaagccacacttctagataagcattcgaaccaaggtcttttgaatccaaagctcatgtgcttaaccattaatgccatacctcttcccacagaatttttattttttaggttaaaggtgtttggttacatgaaactcaaggacactggagtattctgaacttctgggggacgcatcttttaggggattcaagtttaatattagcttgttatctaacatagccaagtagaactattaaaaattaactgcggtcaaaaaggccaatctctgagtatggtttaccgtgttatgaagtgtttatacaaaaattttataatttctttaacaaaattgtgaggtaaaaggtagcactggtcctatggttcatatgtgcaaccatggacctagaggtaattcagtaacttgttcttgatcatagaagcagcaaaaatgtgtgtgtgggtgctggtggtatggaggcaggtacaacagtctgtgaagtcagcattcaaccagtcttctcactccacagacaatggtcctacaactacaacatgggaaccaaaatattccactactttatccagtacagtccagcgggagacattgcccaaaacatctttgccacaactggtactggcaatgacattgccaagtagctcctgatccacactggtcaaaagtctcaaattggcctcattgtgcctttttctcacctccaggatcccccttttccctatccgtatgcattcataagccctctggctatcaaaagccttgcatagagctgccttcttcccatcggaatcatatccagtaaaacaaacttatcttccttcactcctcccacatgtttaaaaaactgtccacaagttaaaaaaaatataaaaacaatttaataaaacgaatctgtctaacataaggagcatactgtggaaattgtataaggaaagacacgcataatctaatggcaaacactgttagcattttgatatcttattcacaattttttaaaagcagcattgtctctcttaccataccctttgaaaaacagaagtcaagcaagaattcaattgaacattaactgtactggagaatgcaattatcacactaggcttttagacaatgtgatgaaatgaagatttagaggcagcatgcccctcctccgcccctctgaataagtcttgtcttttttggggcggtgaggaaagtcctagaatgccttaaaataatcatgaatttccatttattctactctgagcagtgcttggccactctctaaaaaccaaaatcccagaataatcctgacaaatcacttgaatgatggccaatccctgcagttaaacacactcacacacaaacacaatttgaaatccaaaatgcatttggttcactaatcgttttatgtttcaatccactgtttcacctaaaacatgtgacaagtgaacagcaaagagtaaaatttcattgccctcacaaaatttaatgaagtgaggagaatgcttctcagggagaatgcccatagtccaaacccactctcttgtttttataaagcaggcactcatcactatattaagtcttcaaaaatataatttctatgcacagattattctcagatctcaaataaagtttatatcaagtcttcttaggtgatagtggggtacagtgcaaaaggtttctgagccagcacacctgggatcaagttttgtttctgtcactttttctttgaccatgcactcaatttcttttgtgcctcatttaacttatgaaaggggcatgcttctgtgagccttacagggctcttataagaattatgcataatgattcacatgaaagcacatggttaactgaaagaaaatacctttatataattgccagtaattattattacactagattcctatcccctcaagactacacttttattttctttgatcagaacaggccaggccaatggaccaaagtgggcggcaaccttggggcaggtggccccaagaggcagccccagtccagcctcaggagggaagacagcctgattggggggtggcagtgtgtgtaggaggccttagaagctctgtgaagttggtctgccatgacttgaatctccacaagaagactccactttaaaatagggcattttaaataaacttctatttttcacttcaattcactgtttaagtcttaaaatattgaaaatctgagttaactggagtgaaatgaaaggcgtggcagataaagcaaagtgagacaaaaagagactcttatgaacatcaaaatatgaggtacagagcttgggcagacataaatacaaaaattattaatattaacaaaaagcagtaggaaagtggaaatattataatgaaagaaaaggaaaccgatatcaatgctagctttagagatgaaataggcctggagaactctgtggcaggcagagagcgatgctaaaataataaaacaagccacaaagcacaatatacaatactaacgaaatatatcctttaatggcacacaaagtggcttttctctactgcttgaaactttagcaggtagaaaagtgagaatgtttcaagagacttctaaaaggttgcttacagtactggcaaaaagcgaatattcaaaatgccacatttaagcgtaaggacattttcaaaaagagcctactgtaggtgacatttaaaataccgcctcccaaataaccagccagccagggacttgtagaggacccgaagtgtgtcatgcgcataaacgatcccgagagtgggccgcgggcaccacgcaaactttctcttgtggcaagcccctagaacaaagcgcccatctcactggggatgaggagatcagcgcgaccctggaatgagacagactctgggctaaagctcccctcccaacatagggcgtcccaccctgccccacagactcttctcccaggtcaggtccgccagtccaagtctagccccggcatcccgaaggcagccccttagggtcccagcagccctagctctgtctcgcaggccaccgcccccaacccagagcttcattcattgaccccggcggaggggcgagacccagccgggcgatgggtgtgcgcggctcgaggcgggggccccggagcaggtgcttactctgcgtgtccgttaaggagatcatggctgcagtggtggggacagcggcgacagcacctcggaaagcccagggtgggaagctgagtcgggagaaatgaagccgggaaacagcccaggcgagagccgccacgtcttccggaaacacgcagccaccctcactgccgctttaagagcgcttcctattggcgaaacctgcttccaatctcaaccaataactcgtaatgttgttcggtgacgcgcatggtgaccacaccccttgaccaattagagaagggagttatctgtgattggctgaacggaccgacccggaagggtggatgctctcagctggctggcgggaagattttactcccgagtagcggaaagatctgctcgaggcctgggtgctttggtgtcggagatccgagagtcggagatcggagagtcggacacaggacagtcggacaccggacagtcaaacaccggagagttagaccgggcttctcggtggggagaggctctgggataactactgttacagctttgaagggtcaagggtgtgcgctttttgtttcatccttccctttcctgctgcagggcgaggccggtctgtagcggatcacttcctttcgcccacacattggcggaggagaaaccggaaagttaatcactgccctgctctgagaactcgggcctttaggggcacgttcgcctgctgaccggtcttctgatctccccattcttttccatgcaggaggattggccaccaaagcctgtttattagcagctgccatttgttggtaaatactactggggatgcttcttccaccccctgcttcacagtagcggaagggcgggcgttattaatattaaattactattgcctctaaatgcaggtggcggggagagagaggatttagcctatggtatctcagtggcgtttcctccaacattgatgactggctgtcaccctgtaacattcttcctgtggatgcctagcttatactgctgagtgacagacctgctgtagttcaatttctggatacattttatgttgagatatcttttgctgttaaatcacatcattttgggaaggagcagtcttttaaccgcataatcaaaggagtcatttaaaatcgtgggggagaattggatatagactgtgtcttttcataagggtagaaacagcccctgctaccttagcaaacctgagccctcactacatcaaggcattttcctgggctgtgcggatacaaaggtgaagagattgaaccccagccctgctaaaggaccttacagtctatggaaggaatgttacattttcattacgtgaagagatgtttgtatagatcaagaattagaaatccttggtttactctcctatttagccttcttttaatggtgtggttattccacattctttagcaaggcaaaaaagagtcagcctatctttccggcctagtggtggcttcagaattctgtgtagaaagggcgtaaggtcagcagtctaaggataggtgttgcagaagtgacttttggagagcatcttagttttagaaaatgtccatattagagagatagaagaggtgtttttaggattatggggaatttaaagtttctactctccagccccattttc

SEQ ID NO: 2754 - DNA, 6000 bp, Homo sapiens
acaatcttctcttaccattgagccatatgacccaacagatttgatggtgctgtaagtttgtgatgaatgcagatgttatatgacacctttggcctatagatgagtcacaacaaagatgataaggattttagagcaaagctctttgccattatctacagagaactattaccctttcagaaacaacttctgggttgctcctgggtcttacaagagactaagttactatgtgacctgtgctgcctatcatcaaccaggtgtcatccgacccatcaattcatcaggcaggcctccatcatcacaatggaagtggtatgtgccaaagtgagcaggttctaagtgaaggcgtgaacaagaagtctgaatgctcatgcaccatgctcccctttgcctcctcctcctcaacctgtagctataacctcatggtgggattcagtgttactaagggaaaaaaaaatgcagacctaatttacaaaagattctgcatgatatattgtcactacctgaaagtgaacaactaaagcactctagcatctctccagagtgatcctgaaaaacattggagatggaaaattctcccagtcagcagtaagcagtccacatagttattcattttgccagaggaatacatccacactattataagcaatggttaatgattggcaggatggttagcaacttggaaggtagcaaataggaaaactggtggcaatgaggtctgaggaagagatatatgtatagacctctctgaatggtcagagtgtgaaggtatttgtgtccaatgtgaatgctcattaaaaacaacttcgacaaagtataatcataattaatcaggtagacaagatgacctggacattgaccacacttgtccttgcacaacgaagtcaagaacaaagtgccttctgcaacatggactgccactcacgaagacccatctggctacatccagagctaagtgctcaacctgcaaacagctcataccaaccttgagttccaatggaggcaccattctctgtggggacagacagatgcttgatggcaaagtgaccgcattggaaccgtctataatgaaagaggcagcactttgttctcactgatacagatgcttactccggatatgaatttaccatacctgcctgcagtgctctatcatgtccaccatccaggaattcacggaattcctactgattgtcatcgtattccccaccaaattacttctgaccaaagaactcatttacagcaaacaaagcacaacagaaggctaatgttcaagatattaactggtctaactatgttcaccaacaacctgcagcagctagcctgagaaaataatggagtggcattttgcagactcaattatgctgccagctgggtatcagcactttaagggctggactagtagcctccaggatatggcatgctatacatcagtgaatagtgctgtttctcccattgccacgattcacgggaatcagcggtggaaatgggagtggctcttctattacccttagtgatccgctagtgaaatttttgcttcccatccttgaaacatcggactcttgctggcctagaggtcttggttaccaagaaagaaatgcttgtaccaggggaaaaagcaatagttccattaaactggaagttgactgccacttggccactttgggttcctcatgccaacaaatgaacaggcaaagaaggcgattactatacttgctggggtaagtgatcctgactattaaggggaaatcagatagctactacactatagggataaggaagagtatgtctggaaagcagaagatcctctagtgcacctctcagtattcccttaccttgtgattaaagttaattgaaaactataataaccaaatataggaaactactaaggcaagtagtccccaccaagcaaagacccattaccaactgagaaccaaggaatacagaatgggtagttgaagaaggcagttataaagtacaaactatgatcacatgaccaattgaaaaacaagaactgtaatagctataagtctttcttgctttttaaaatttgtatataaaccaagtttgggtttttccttttatttggtccctctccgatacattacagtattaccaaggaggacatgattcagcaagaagagaaatgagcatcacccaaagacgaataaagataatttgtacctgctcttttggggaaggggtcagtgtatactcagcagtaagagaaataggcaaaagcatgattccgctattgcctttatttggacacaaataaggtaaaaattagacacaaaaggacaaatgttatatgattccatttatatgaggtacctaaaatagtcaagaaacagaaagtagaatagtggctatcagggattaggagaagagaagtaatggaaagttacggattaatgagtatagaattttagtctggatagatgaaaaagctctggagatggatagtggtgacgactgcacaacagtctaaatgcatttaatgccaatgaattattcacttaataatggttagcatggcaaagtttgtaatgtgtattttacttcaataaaaaagctgaaaaaaatcatttctataatcagaatttttaaaacaaactttttcaaatatcatacaaacagaaatagaacagaaggaagaagaaaatgtaatcattgctactaacctgaaacggacgccattctttttctttccaaatttgtttctaaaataatccaaatttctttctaaaaataaaagcacaacagtgacaacaagtttttaaaaatagtactattaatgatgttcactcaacagtaatctgtcattcctaagcacggaaaatgttagaaagtaaattatatattgcagtgacctttcaaataagaaccacatggttcttttgacactaattttttatggaaaactctatatttcagcttaataacccacaacactcagaacgactaactctctagatttcagagaagtgtccaaagtcacataaacgtatacatgacaaatacagtagcaatgacactcagcaaacatccacaagatacaaagtgatgtaacaaaaaacagcaaacattcaacaggtctagcaccaattgctatgtgactaaattactatgttaggcaaagttgcatatgctgttcctccaagcctctttccctacctgtaaaactgggaggatggcaatcttataaataagttggatagattcaaatgtaccagattaagcaaaatacatcaacataaataataaaattaatcatctaacattttattgagcccttgcgttaaagaattacaatataagcccaatcttaaaagagaaactggtattctacagaaaagctagattttctaagttagaggtggggggaggggaaaatggtttgtaatgatttctaagtatctatgaatgactaaaacctaagcatgcatatggacaagtggaaaatggggctggagagtagaaactttaaattccccataatcctaaaaacacctcttctatctctctaatatggacattttctaaaactaagatgctctccaaaagtcacttctgcaacacctatccttagactgctgaccttacgccctttctacacagaattctgaagccaccactaggccggaaagataggctgactcttttttgccttgctaaagaatgtggaataaccacaccattaaaagaaggctaaataggagagtaaaccaaggatttctaattcttgatctatacaaacatctcttcacgtaatgaaaatgtaacattccttccatagactgtaaggtcctttagcagggctggggttcaatctcttcacctttgtatccgcacagcccaggaaaatgccttgatgtagtgagggctcaggtttgctaaggtagcaggggctgtttctacccttatgaaaagacacagtctatatccaattctcccccacgattttaaatgactcctttgattatgcggttaaaagactgctccttcccaaaatgatgtgatttaacagcaaaagatatctcaacataaaatgtatccagaaattgaactacagcaggtctgtcactcagcagtataagctaggcatccacaggaagaatgttacagggtgacagccagtcatcaatgttggaggaaacgccactgagataccataggctaaatcctctctctccccgccacctgcatttagaggcaatagtaatttaatattaataacgcccgcccttccgctactgtgaagcagggggtggaagaagcatccccagtagtatttaccaacaaatggcagctgctaataaacaggctttggtggccaatcctcctgcatggaaaagaatggggagatcagaagaccggtcagcaggcgaacgtgcccctaaaggcccgagttctcagagcagggcagtgattaactttccggtttctcctccgccaatgtgtgggcgaaaggaagtgatccgctacagaccggcctcgccctgcagcaggaaagggaaggatgaaacaaaaagcgcacacccttgacccttcaaagctgtaacagtagttatcccagagcctctccccaccgagaagcccggtctaactctccggtgtttgactgtccggtgtccgactgtcctgtgtccgactctccgatctccgactctcggatctccgacaccaaagcacccaggcctcgagcagatctttccgctactcgggagtaaaatcttcccgccagccagctgagagcatccacccttccgggtcggtccgttcagccaatcacagataactcccttctctaattggtcaaggggtgtggtcaccatgcgcgtcaccgaacaacattacgagttattggttgagattggaagcaggtttcgccaataggaagcgctcttaaagcggcagtgagggtggctgcgtgtttccggaagacgtggcggctctcgcctgggctgtttcccggcttcatttctcccgactcagcttcccaccctgggctttccgaggtgctgtcgccgctgtccccaccactgcagccatgatctccttaacggacacgcagagtaagcacctgctccggggcccccgcctcgagccgcgcacacccatcgcccggctgggtctcgcccctccgccggggtcaatgaatgaagctctgggttgggggcggtggcctgcgagacagagctagggctgctgggaccctaaggggctgccttcgggatgccggggctagacttggactggcggacctgacctgggagaagagtctgtggggcagggtgggacgccctatgttgggaggggagctttagcccagagtctgtctcattccagggtcgcgctgatctcctcatccccagtgagatgggcgctttgttctaggggcttgccacaagagaaagtttgcgtggtgcccgcggcccactctcgggatcgtttatgcgcatgacacacttcgggtcctctacaagtccctggctggctggttatttgggaggcggtattttaaatgtcacctacagtaggctctttttgaaaatgtccttacgcttaaatgtggcattttgaatattcgctttttgccagtactgtaagcaaccttttagaagtctcttgaaacattctcacttttctacctgctaaagtttcaagcagtagagaaaagccactttgtgtgccattaaaggatatatttcgttagtattgtatattgtgctttgtggcttgttttattattttagcatcgctctctgcctgccacagagttctccaggcctatttcatctctaaagctagcattgatatcggtttccttttctttcattataatatttccactttcctactgctttttgttaatattaataatttttgtatttatgtctgcccaagctctgtacctcatattttgatgttcataagagtctctttttgtctcactttgctttatctgccacgcctttcatttcactccagttaactcagatt

SEQ ID NO: 2755 - DNA, 6000 bp, Homo sapiens
gaggtcaggaggtctcttccctgaagtcaggccatctcccacctctaccaactgagtctggggtctttacaggcacaggatggcggtggggtggactgtaggtaatactggaaaaggcaacatttgattggttaaaatacattattcagaaagaaccaatagggagagagtgggcaaacaggaatagaagttctcactctggtccatgggcttcacactgtttttggcttgaaggtcgggtttcaccggagacccacctctgtctgcctaggatttctctgccacctgcctctattagtagtactctgcattatatgaatacaccataatagatttaacccatactgttttgatgaacatttaggttgcaaggtctctatacctattccttatatttgcatattgtctaccatacttgtgaatagacatactttgttcacctactataaagcaagttagttttgaaggccgggtgtggtggttcccgcctataatcctagcactttgggaggccgaggcgggcggatcacttgaggtcaggagttcaagaccagcctggccaacatggtgaaaccctgtctctaccaaaaacacaaaaattagttgggcatggtggcacatgcctgtaatctcagctacttgggaggctgaggcaggagaacgacttggaccccggaggtggaggttgcagtgagctgagattgtgcaactgcactccagcctgggtgacagagcaagactccttctcaaaaaagagaaaaaaaaaaaaagaagttagttttgattaaaagtagctttttaatacaaaggataaacgcttgaggtgatggataccccatttaccctgatgtgattatgatacattttatgtctgtatcaatatatatcatataccccataaatatatatacttcctatgtatccataaagataaaaaattaaaaagtagcttttattgaattaattcaggtttaaatataataaaaaccaattgtaagacagcttaatatttaaaattgttctacacaggaccagctacataatttgtaggttccagtgcaaactgaagatgcaggactccttgttaaaaaaagtattaagaattttaagacagcaacagcaaagcattaggccaagcgcaggcacgttgtatgtctatgaagccagcctagcttctatgatgtgttagattacatggtcacaaagtttgaagaaaatattttttttgtttgtttgagacaggtctcactctgtcgcccaggctggagtgcagtggcactatctcggctttctgcaacctctgcctcctgggctcaagtgatcctcccacctcagcctccccagtagctgggactacaggcacacatcaccatgcctggctaatttttgtattttttgtagagacaggctcttgctatgttgcccaggctgggcttaaactcctgagctcaagtgattcccctatctcagcctcccaaaatgttgagagtacaggagtgagccactgcacccagcaaagaaaatatttttatcgtgagtgaatgattgcacctctaagatcactgccaagtgaaaaattatgtaatcttagtaacccctatgtgcaagatagtacatgctttactctttacactgcacaagacagatatttttgcttgttgatagcattaatagcattatgaatgaatttttaacttttactatagaatgaaacttactgtacttgatgccacggaaaacaataagtatttttctggctcctctagctctggtcatctatccactttagtcttagggagagagtacaacaaaagatagaacgcatagcaaggtagaatggggacctatgtctttaatatcttgctcagaaattaagaaatattgttagagtaggtagctagtcatgaatgagcagggcaggagagggctccccttatacacacacccccctccacacacacacacgcacaccccaggaatttcaggcgaccatcaggtgacggtcaggtggttattaactgtctttctaaaacaataattggttgcagccagcaccagggaatagcattctcccaatagatacaaaaaacctgaaactagtgatcagcaactttccagtaagatctcaggagctgggtgagtgtgcgcaagcgtgcacattaagaagcaaaatggcagaatttaactggtatttgatcttctagggacgtgcaactgctaatggaagaatgcctcaagtaagcatgtatacgactccaataaacacactatgcatgctcccctcccaagtcctggcaagccactgtgcatgcagacagcccaccccaagggaaaaatcaggggagaagggacatagaccccagaagtatgccaacgtataaaaccctaagtcaaaggtcaaatggggtacttgactttcaagtcgcccacttggccctcttcccagtgtatttccttccttttgttcctgctgtgaagctttttaataaactttcactcctgctctaaaagtcgcttctgtctctccttctgccttatgttcctcgatcaaattctttcttctgaggaggcaagaattgaggttgccgcagacctgtacagatttgccgctggtaacagtatgaatatgatcatactccttttgtccctaaatttctatggtataggacttgcactttactaaaatatacaaacttgcaagaaaaggaggctgttgcattgaccctacacttaatgccaatgcccaccgtttatatttatgcctttaatcacgactgtcgtaagaaaaatattattgctgtcattttccttgaaactgaaactcagaaagataaggtagatttgcccaaaatcataaagaaccagagcctggattcaaacctcacctccatctgattaaaaaggccatgattttgatcttaaaaatagtccgaggagaggagagaactccattggaatatgggggcagaaggtgatgtgatgtgatgtgtctaccagccaaggagtgccagcaaccattagaagctaggagggaggcatggaacagattctccctcagaacctccagaaggaaccaaccctgccgacacctggattttggactttccagactccaggattgtgagagaggaaatttctgttgttttaagtcacccagtttacggtactttgttccaatcccctaggaaactcatacatcatgcttctattttggaacaataacaggatggtaaaagtccagaaaagatgaagatgatgaatattacaaatacttgtccatctcatgctatttgtccccctcccataccttactgattgatgtccatggcgcactgaatgttcacagctagaatattcttggacacctgcatacctctgctctactggttgtatgcttaccaagaatcggttttgtttatttttagttgtttttactgttataattttgtcactttgagacaaaatagggaaataggccagacccatgcctgtaatcccgacattttgggaggccaaggcaggaggatcacatgaagccaagagtttgggaccagcctggacaacatagcaagacccccaactctacaaaaaacttaaaaatagaaaaaataggccaggtgcagtagctcacgcctgtagtcctatcacttttttgggaggccaaggcaggaggatcgcttgaacccaagagtttgagaccagccctggcaacactgtgagacctcatctctggaaaaacaattttttttttaattagctgggtgtggtggtgcgtgcctgtagcctcagctacttgaaaggctgaggtaggaggatcacttgagcctgggaggtcaaggctgcagtgggccatggtcctgctaccacattccagcctagcaacagagcaagactctgtctcaaaaataataataattaattaattaattaaaataatttttaaaataaagagaaaatagagaatttattttattttattttatttttgaggcggagttttgcttttattgcccaggctggagtgcaatggcgcgatctcggctcatcgcaacctctgcctcccgggttcatgcgattcttctctcgagtagctgggattacaggcatgtgccaccacacccggctaattttgtatttttagtagagaccaggtttctccatgttggtcaggctggtcccaaactcctgacctcaggtgatccacccgcctcgggatcccaaagtgctgggattacaggcgcgagccaccgcgtccggccgagaattgttttattaaggcttgtatgttaattcatcctaccgtagaaaatttaagagtgttcattaaaagtttattttctaggtcctgatgagttctgactttctgtaattctaagctgatctaacaacaagctaaccatatatagctaaaagttataggctacgtacacgcggtgttcactgtatgccaacgctgtacacaaatatttgtctatgctaacttgtctgagatcatacatcccagaagtggtgaagtcaagtttgaaacccaagcactctggctcgggatactgcttctctccccttagcgcatattactggcattagttgaagacttctttaatccaagtaaatgtagaaaagcaacaattataaataacaagagtccctcgggtagaccgcctgactctcggatcaactgaggttccacccagagcacgcccgccttcagtgagccgcaacccctatccctacggtctttatctgcaattctctacgaactgattcactcgatttttaaggattttttttgttttcttttcattacttctttcagtttgggggaatcttcctgcacatttgactcggctctgagtgcgcagaccaacgtgtttcctctttctccagcctagggcggtgccagcccagggagcctgcgcttagcggccccaggcccgcccctgacactgaacgccgcttgtcccctccggcttgccgtcctcgcagccatggcggccgccgcgctcccagcatggctgtctctgcagtcgagggcaaggactctgcgtgcattctccactgccgtctactcggccactccggtcccgacacctagcctgcgtgagtgtctgtctcgtcttctctgggctttgggggaggtgcaagagcggaataccggcctcatgaagggtgccgcggtggctgagccagcgccgcccgggggaggccagtgcgtccgctgccaggcccgtctggtaggaaaaccatggacgtgggtctgtgctctgcacccgcgttgcccggcttctagccgcctgtttctgccctgggtgctctgggagtttgctcagaaagcttacatcccccttccccgtgacctgctcctgtgttgcccccgtccacagcccctggcacaggttactggtgctgtgttgtttatcgggcatcggcgctgttgaaccatggatttccccaaacattaagagagtcatacggctgtgctaggacaaattgctgctctgaattccaggccaccaaatgggcggccttcattcaacaggcgttgatgacctccatttaacagagattgtagggatgcttgatagcgtgcttaccccggaggactctagtggaaaatacagatttattagcggagaagtgctatgtagggtgagaggcgctgtgatagaagtgtggctagaatgacgggagcgttgaggaggagctggcgtgagtctaatcaataggcggatcctacctgtgctacttcctgttatatctctaatttactctcctcatactaccaactatctagttcaggtgaccatctcatttctacaagttttttttccgtttcctgtttcccctcttgctctcctacattgaattctcaaaacagccaaatgaggttttcaaaatttagatcttgtcttgctgctctcatgttcaagatctacaaatggtttcccattgttttcagataaactataaatacattaatccttcatactggctcttcat

SEQ ID NO: 2756 - DNA, 6000 bp, Homo sapiens
ctcagactcatcttgatcctcttctagttgctcaatttggttcaacctgtgggagatgctcctcccattctccaagtctcacttccatccttcctgctaaaggacttggggatcagtcccattcccttgtctgtctgtctatctgatgtctgtgtggtccctcaggataattgctctggacaactctaacaccactcagacagattgtccggcctcctggccctgacatctcccaccactgcatcaagccaaattactcggcccccccaagccccgggctctggtgaaatccgattagtgaggagagagctgcactgagctgacagctcctccgataattgcttcccaagtaagtgatgcaaatcagcccatccagcctattcctgctcctctcttggggacccaggcgtccaggccccaggagatggaggacaccagagttgaggagacctagacgctgtcatcttcctccagttaagtaggcataatccataaagctaggttgtgctgccttggggctgaggtgtgcgtagcagggtagcgaggctgagccagggaccccactggctctgcatttctgtcttaactgagagggtgtcactttgtcaccttattctcaccccttggagaataatcccatttcttgtaaggtagatgaaggcagagatatagaagatacagagacagcgagatggctgaacctgttgagaaacaaatcaggcaggtgcggtggcttacacccataatcccaacattttgggaggccgaggtgggaagatcacttgagcccagcagttcaagaccagcttgagcaacatagcaagaccctgtctctacaaaaaaaatttttaaattagctgggtgtggtggtgcgcacctgtagtcccagctactggagaggctgaggcgggaggactgcttgagcctaggaggtcgagagtgcagtgagtcatgatcatgccactgcattccagagtgagaccctgtctcaaaaaaaaaaaaaaaaaaaaaaaaaggacacaaatggatgaactcacagcctagctcctctggttgtgggccctgcagatagctttctctctttgtaagtgcccctcctcactaggctgaggaaaagacatggagtgttaagtccccacagatggaatggggaggcatggggaatctgatcaagtctggagacttttgcatctgtgccaaggacatgtccttgggatgcagtggcccttgcttaactcacacatcaaggagcccttttcccttccccaaatcagggccctttaaagggcctgttaatgcttcttccttaatgcatttccttcctacatctttacttcaggttctttcttgctgtgacctccttatcccaacttctgctgaccttggagacctgaagagttactttccttgcaatcctgaacttccaactccaaacctaaccctgcatgcaggtcactgtctttgggaaatctacaggatgagctccccagtcttgtcctccgtgcttgtgtgtctgatagggcttcatggactgggtcttgggtactcagactatcatctgcctgagaccctggcagagcaacagcaataactaccctttgtggagcccaaattctgtaataagcacttaatgtaattaagtcatttaaacatcacaaaagaagatagagattacaatgattatcccattttacaactgagataactgaggcacagagaaattaagtagcatgcccaaggtcaccatgagtaagtggcagagcttggattcaaacgcagcagtctgattccagagcccaaagtcctgaggcctctgctatgctgtcttcactgtcctatgctcttttgatgtttgttgggctaatcgggacaggacccagtgtagtggaagtggggaaggtggctacactgaaagttaaacaccagaaccccctttggggctccccatgtcagaaacagtgagtgggagctgaacagggtgaaacttagtatctatgaagggggaaacatggccttcaccttctccaattcccgacctttgttttgtgcagtgggaggccccgcagctagacagcccttccccgtgagaagcggcgaggcaagggaaaggctgaaagatccgcctagcagcccaagtgagcagagtcggagctaggacccaaagaggccgatagatggcgctcatggcccaacacagctccagcagcccgaggaaacaaaaaaaaaaaaaaaaaaacaagtgagccggttaaccccttccctcccgggctcaggacagaggggctggctggtgggtatgcctggagccctgccccaggaccggtgactcaactctctaggctcttacccaggcgataacctgggtcatcttctgttcctgccccacaaggctctacccgtaaatcacagtcagcagcctcctgaagacttcccagaagacatgaagactaataaatggaagagactggttggaagggctgcacccaagcccatgtttcatctcttgggctctatctcttgaaagcctcagggtccctgtttctaagcacgcctacttcaggagagcgcctcacctccatctttcctgggagtgactcactgggcggggaggaatagcatggactagagagagagaaggccccaggcccctctgacattggctgtagggactcactgtgggctgcctaagcctcagtttctccttatatctggacttcctatctctgggttccctggggtggatgggcttatagggacagaaacagttattcaagtcttctaggaaattgaaatcaggggtggggaggtggaggtcctgggggatctctgcttgcctgttactcatttcactcattattgttctgccagaagcagactttgaatgtggaggggctgccaagatgacaaactagaacagaagtgctgggcaagcaagtgacagaggggtcggggtggacaggagggttgtccaagggatggtggaaatcctggaatttttaagcaatgagatgacaccacaatgaggtcccttcaccttatttttggtcagaaacacagaaatacatagacacacagagatgggggaacttgttctagaagctcagattctcttattccagtcattctagggtaagaagcagaaacagggagatgttcacagagggagacagagacctgcagatacagagagaaagctacacaagagactagaaatagagataaatttacataagtagagaggggcaaataacataggcagagagagacacagagagggagaggatctggtaaaaattaaagctcaggaaattatgggcttcatgaggtggatgattaattccatttccaaagtcttgcaagggtcagggtagtttctcacccttgatgtcagcaggtcactgctcacagctccctgaagctcctactgcacccattaagtttttgttgataggagatcagacaagtcctgggaagggaatagcatcctttttctctcacttcttcctgttctggggtttataggtctccttttctaccactcacagggagaccttgcttctgtgattagagccttggctgtgctaaggtgtgtggagattgtggggtgggaggaatatagaagataactaaccttagggggttcccagtctaatgaaagttttagagtcacgacacagaaccagacccagatagagcacaagaacaaaactaggaataggacagatttggacatagatattgggatgggggaatggtgggggaatggactgttaggtgcagccatgggatgaggattgatcagggaagccttcctggacaaagtatttgagggagaagatttggatggaagagtgatagctaactttatgtgtctacttgagtggtctaagggacacccagatagctggtaaaacattatttctggatatgtctgtggagtgtttctggaagagatttgcatttgaattggtagactaagaagatcaccctcattaatatgggtgggaaccatccaatcccttgggggccagtagaacaaaagagtggaggaaggcaaattctctttcttcatgagctgggacatctattttacctgcctttggacatcattggagttcctggttcttcgtccttcaggctctgggacttagcagtgagcctcctcccctgctttggactttcctgaattataccacctgttttcctggttctccagtgtatagacagcagagcgggagactgtgggacttcttggcctccacaatcctgtgagccaattcttggaataaatctcgtcatatagatagatatcctgttagttctgttctctggaaaactcttgactaatactgaggttatagggttgggcagatagcaaggcagagaaagaagtcaaaatggtgacactctggagatgggcttggacagtaatgggggatgccccttgctaaaaagttgttaggagctaccagaaatgtcttcgtggatgttctgtataagtaatggcaggctgcaaaggagaagtctcttatacccacggtggcagggggcctagcaatggtctttagctattgttaataccttcaggtgggtgagggattggggatggttgaagcttcctgatttgcaatccctttgggaaaatagtgaatgaacttttggaagggcgatgccctttagggatagaacccaggatttcctaggtacttacaggctgtggcttttcacttctcaagacttcctgatttaacgctgatggaaagattaaactacaattcccagcgatctttagggctaatttagtgcgccttccgggattggagcatttccggcggaagtggctgcgggtacgccaatctccttccctaaacaatgtagactacgactcccactgtccttagcgccgggggttgggtttggggtgggggaaaggaaccggaaacgggatggggagctggaccaggtgaggaagtagggggctgggaatccgggactgtgggggcaagttgacggctcccagggtcgtcggggctgagccgagagggtggttagaatttctatattttggggtccctccctccgtatggggtaagactcagtgcagggagagcccagcctatgaaaccgcctgggaggtctgcaggatcaaggctttccagtcggccggagccagcgggcgcccccggaggttttgtatggtgccttagtagtcggcccctttggaaccagatgaaatggtctttttgagtttatgctttattattattattgtttatttatttatttttctgagacggaattttgctctgaattccaggctggagtgcaatggcgcgatctcagctcactgcagcctccgcctcccgggttcaagcgattcttctgcctcagcctcccgagtaggtgggattacaggcgcgcgccaccatgcccagctaatttttgtatttagtagagactgggtttcaccatgttggtcaggctggtctcgaagtcctgacctcgtgatccgcccgcctcggcctcccaaagtgctcggattacgggtgtgagccaccgcgcccggcctatgcattattattattattattattattattattattattattattatttattattattattattattattattatttcgtttaaggatatttattattgtccctggactcccggagtgcctccaaaggacaggggagtgcatatgtgatttcgattccttcctcacttcccggatttgatgtcagagaagtctgacatcagtctgaagtcggcccttggtggtcagccttatcgcttggtccaactccgctgtctttgtgcttaatgtagtatgacaccgtattttataaaatatctacatttcttaagcctctggctcttggggcgactttgggtagaacttacaagttcctcctttgggttctcttagtgttttgttccgggtattaaagctcacatcacactgtattacagttagttgtttatttgc

SEQ ID NO: 2757 - DNA, 6000 bp, Homo sapiens
gggtggttctgggggaagggagccaggacccccattaagtggagttgtaggaggaactcgacagggagggcgggcagaggggggccctggggacacagtgtggaacatttgggggctcgctccctctcctgcaataaatgaaaaatgaagggtcagcctgtggctccccttccaaaaactcttttgtcttctctagtcccatctcccacaagttcccaacctccctgtgccctcctttcaacatgcagctccccacccactcccctttctctttgctccctctcaaggaactcctcccaccaccagccttccaagcccttaggttttcctcggtcttctgtaaagtggcagaagactcaccaggagaagagtgtgagcaggtggtctccatgctgcggtacagagttgccatagcaacagctttccgccggtggttgcacagcttggtcatgtcctcctctgatgctggccccaccccagccccacccggggtcaccggggccaaagggtcaaagttgaaaacctgtaaggtggaaagcaaggacagggaccctgaggggctggaacctgtgagaagggctacctcagtcagtgatttgcattaagacttttagcttatctctgtactctcaggcgcccctcaccactctgaccttggggacattaagtggacactccagaccgcacttgcaggtcccatcgctgaggaggtagctccgggtttgctccaaggaagacagctctgtgccacttggactgcgagaggacagggtcagaggacatggggttagctggcagcgaatcaggcaatactcctaaagcacagtgcttaagttacagatcctcctagaagaacagaggataaggaatgtgggaagacacagaaaaagggagaatggattcaaaggcccagagctacagaaagcaaaaaggctgaggaaggaaggggaagagaggagagcaatcgggtaccagagagctgagctgagagaagaaacggaagaaagaaaacctgggcaactggagtggcagagcttggggacctgtgaagatccgtacctgatgtagagcacagcaccctctcgcacacagcgctgccagccgatggggacagatgtggccacagggcccccagctctgtctgctccactgctctcattgcccccattcattgtgtgtaatcagctcccgcgtgcctgataacacagacatccatgtaggcactaggaggattaaactgagcgaagtacctgagagaggactccaggaaggcaaaggttgtggggagacccaagaaaactcaggggaagccccagaggagcaaggggaacccctcagctgggagggagactgaggagtcctctgccgtatcaccacagctacctgaacatctctgcaaacattgtggggtccagtctaaagccggggccaccagcttagcccacacctgcaacgcaagtagagagatgggactgtcaggagtctgcccaactctaaagagcagcacagcccagcaccctctcaaaagaaagatccttaacaatgtgaggcaagcacctataaagatctcggggatctgctggcttagtctacaaccatcctttccaagcccagtccctagggaccagagggtcagaacctcagctccctgggaccaagaaagtctagcccaattcttaggcatatgaagggcaaggcctccctccattcggagtagaagacttcaaccaggagtatgggcacattcccataatgctaggccactaggaagtttcccagagtgtctggctcctgttgttctctacccaggaagatgatataaaaagtacagattgccccacaggtcaccaggcaattgcccaactgcccgctggggtggtaccagcagaactccccccatgcctgctccatcagacaatcgctgatatagttcattcgggtcttaagaggtgaggatcacagctcagtcttctcccaggatcctgggaagctcctgattttccctcaagcctacggcaaagggattcagaacctcctattccactggcttccgattatctccaagagagcctgtcctccgatagaaggggaagcccctccaacctgcaggtatcctccccagcctcaccattgctcccaccccacactggcggcttccaaactttccctctcacaacaaggcgccctgtcacccagactgcttccctcagcttgaggaggaggggaaggcgcacgaagtaggaaggaacttggggagagggcgggcggagggtgggcgaagcactgaggggagggcggtgaggaaggcagaagtctggcagtgagagggagaagcggcgggggcaggtgagggcgggggagtggggatggggccggggaaaggggccgagaggacgcggagggggcagagggtagggacgggagggggaggggcagggtggggggggccgggccccgcactcaccgcggcccatggttcggccggccccgccctgcgcagtcgcggcccagagggtgagtgggagggggtgggaggagggtcggtggagcccgagcctccggtacggccccggccggtcctagcaggaagcgccgctgccgccgccgcggatcaccgagcggcctcccgcgcatgcgccatgggggccaggggcagccctggggattccgttcccagaaggcactgcgcaggctgctgccgctgccgccgccgccgtcgctgccgcagccgccgccgcaggagccgccgcctccgccgctgcccggacgggagaggggcggggccgggcccccgcccagcggacagcgacgagccaactggaggggctgcagtgcgcatgcgggagcgcgcctacccctcccccacaaccccccattaatccccaagagaacaaacaccccacgcggcccccccgccctccgcggaaggatctgcgcctcttcccaggccactggtggccaatcccagccctcctcagggaggggccccttccaaagccacagtctgttgcgggaaccaggaatgccaggtccgggaggggccaggccccgaaagatgaaagtcgcgacttgccctgccccgccccaaaggcttcccgggtagtgtgctgggacttgacccgcctccccaggtcaacatgtcacaacacgacctcagcctgtcaagtcacatgacctctgcctgtcactgacaacctggtctgtctttaggccaggggagaccatctggtccaccctccacactacccccattttcagagaggaaatggaggtgtggagcagcggagcagcctaaccaaagacctgtcattgccacaccactccagtcacaaccggccttgtgacagtttctacttaaactctggctgcccccatgagggtatgacaggatatgtaacaggccaccacatggcctctgttttcaaggcacaagaaaaatactttgcattctgggtggtgcgttttacttttggtcaagttgcctccaagttcatggttctcattttaccttcacaacttttatctttaatttacaaacaaggacggtaagatcccttggcaagtgatggggagttgagtctaaaatcgcggctccggtctccccagtccagggcagtcctgcgctgaagtgcactcacacgtcccgggatgagactccgctgtaaatctcgacccgaacacctaggaggcaggcctgtgccgcgctcctcacacagggagtcacaggacttgctgtctggtacagcaagagagggtcttggagaaagccataggagtaccgtgggggaaaataggtggccaaacagaatcgggtccactgggcaaaatacatgacttctggcaggctgagggcttaccaactacaaggtaaaagtcaagggcgctgttctgagagaagcggaaaatgactaccaagggattccagtacctcggccccttttgggagatttacggggctagaacaggagaccacccccgtttttttgtttgtttgttttgttttttgtttttggtgaaacgtagtctcgctctgtcacccaggctggagtgcagtggcgcgatctcggtcactgcaacatccgcctccagggttcaagcgattcttctgcctctgcctccagagtagctgggattacaggcgcgcatcaccacacccggctaatttttgtatttttagtagagacggggtttcaccatgttggtcaggctgatctcgaactcctgacctcaagtgatccgctctcctcagcctcccaaagtgctgggattacaggcgtaagccactgagcccggccaggagacctctttaagaagactcgagatgtcgacaatcccagtggatggataccaactttaaaaagaaaagttcaaaaggcctatgtgcccattagctgggaggggccaagaaatatgggagtcccttatagtgggggtaaaacggcgggtaaagctaggtgggcggaacagcagcttctgggggagacaagcggcaaagaggctcacgaccgactaggggcgaccaaggctgatagccgttggggccgttgggcgccgggagctggcgccccgccctctctcctctcccccaccctccgcacctcccaccaccctcggtgtcccctgcgcgtgcgcgtgcagacaccggttgccaaacattgcatcatccccgcccccctttcctcccctccccccccgctacactcccctccgcgcgcgcgcatgactcacccacctcctccgtgaagcctcgtgacccaaagccacttccgggtccgacactacgtcgaccccctagcgagagggagcgacgggggcggtgccgcggggctcctgagtggcggatgcgagggacggggcggggccaatgccggcgtgccactttctgattggtaggttttggggtcccgcccctgagaggagggcaaggccatggtaaaagattacagccaggcgctcccgaggtcagagacttaagtctaaggcactgagcgtatcatgttaaagatgagcgggtggcagcgacagagccaaaatcagagctggaacctgaggagagaggcgagtactgattcccatctaccttttaccctcccgtctcctcaaagttggggcgtccgctctttaggatcggcctcactcctccacagtgaagttagggaccgtccgagagaggaatggggagagtcccttattctggggtggtgcttacaaacccctattgcttcggacgacggcgtctctccacccctgcccggagccggaacacgggccctgctctgtgctgctgggcaaagggacctcggttgcccttgggaaattcattctttcccgtagccaacttcaggcctcatcgttaggcctgtccgcggggaggcaggtcagcaggacacacccccgctctaagactgggtgaccatcgctcaggccgtttccgccgcttcgccaccagcgggccttctccctaccccacccccaattctgtctcagtctcagtgcctctggtgtcagcatggccaccttggtagctggggctactggaccctgcagcggataggggaaccttgaggagacacaagcctttgggaggggtgccgatggacagggagtggtgtgttttccttttgccgtagaggtctctgggcctcctgcacaagagagcagcctggatctcttaagtgtaggaggccatttggggtctccccagggtattgtccttccctcgggattagtccctgcctctttaacccggtcctgtctcccagctaatctctgtgtaaccattgcatcaggccagccccgtttggctctgcagccttctgacctgaggctctactgctgatgaaagccaagtcccacacactggaaggcaagggagggttccccagggaggacagccctgcagagaaatacttcgggcaatattgcatctctagcccctagggatcagcagctgccactctgcttctgccccttccctataagagagactggggggagttt

SEQ ID NO: 2758 - DNA, 6000 bp, Homo sapiens
ttaaggcagcgctttggagggggccaggtgagaaagctaaaggctgtgccctcgctccacaacagccacagcatcacttccctaatttccctaagtagtcctcacccatcactctttccatcttttggccctgccgcttcctcacttacagtttttctttcctgtcttaactagaagagaccttcgacttaaaggtaaccactttccctctgagatgctgtataaaactggaggttaggggatatttatggttgctggtgataactttgttgttctccaggcaaaaacgtccccgaagccagcagttgtagagactgttacaacagccaagccacagcagatacaagcgctgatggatgaagtgacaaaacaagtatgaagcttaagccctgtgggagactggacaagctgaatcctaaatagatctttttcttgcctcactgttacctccccacccccctttatcttagggaaacattgtccgagaactgaaagcacaaaaggcagacaagaacgaggttgctgcggaggtggcgaaactcttggatctaaagaaacagttggctgtagctgaggggaaaccccctgaagcccctaaaggcaagaagaaaaagtaaaagaccttggctcatagaaagtcactttaatagatagggacagtaataaataaatgtacaatctctatatacaagctgagacctttccttttgtctactccaagccttccccctgcgtatgtgggattgagggtcacatcattggcactagtgagagggtagtcagtagccacttctgggaaaggtgggtagtgtggcccaagtgggggactgatgctcccaattgttcatgcttggtgcagattcaccattcggtcaatcagagctcggcgagtcgcctctacttccctggtcaggcgctcgatttcctgcttgagccgttcattctcttcagctagctgtgccactttcctttcattctcctgttctttctccttcatgcgctgctttccagcccgggctggggaatgaccactctgtttccgtttcctggttctcccttggtcttcctcctcttcctcctgagccagggagctctgactggaatctggagagtgagggctctgggaggtgcttgtgacctctgctggttctggctcctcctcagtcagccaagccagagaagcagggtcaagagtggtgaagatttttgattcttccttcaaggaaatgaggaaagggaacatagatattagttgagaagggaaaggtaacatccccctttagctttagggctaacattcttacctcttcatttccaggaggtgaaacataggtacccccattttcatctgaagacaggacctcttgcaggtcctcataccaggcttccagctcccagctggacagtgtcccgaaggagaaaggcaatgactcagctgccatctctgcagttggatcagtctggaaaagcacatctgcaggataatggggagtggctggaacaagctccatgtagcaaacagtctatgccacaagttggcaagctggtctgatgcctgtttttgtaggtaaagttgtactggaatacagccacatctgtttatttacatattgtttatggctgctttggtgctacagtggcagagatgaagagtcacgctagagactataggacttttaacatctaaaatatttactgtcctgccgtttaaaatttttggaaaagggtaggttaagtttacctgctttcaggtgtggtgatgtatgaagatacacttccttcttgaacactgtgggcaacaaagagaaatgtcagccatttttggaagggggagaggcaacttacttttctttttctttttttctttctttttttttttttgagaccaagtcttgctctgttgccaggctgaagtgcagtggtgcgatctcggctcactgcaacctctgcctcctcggttcaagtgattcttctgcctcggcctcccgagtagctgggactacaggcgcgtgccaccacgcccagctaatttttgtgtttttagcagagatagggtttcactatgttggccaggatggtctccatctcttaaccttgtgatccatcgcttcccaaagtgctgggattataggcatgagctaccgtgctgggcccttatttttcttttacctccagcctcctactggtccttccttacttctggtcttgtggggtatgcatacttggtccctgtagccatttcgaagggcagaagagggcctgactttctttatttttagttgctgacatttgtagtcctggttacataatagtaaagtcctggccaactcagctttctctaaatccaaagcaggcctcaaatctgccagggtaaaaactaaactacagggaagggaacaaatcatagcattttcctaactccattcccacagggctgacatcctccaaatgtacatttccagtctggacctcttccagaacttcagactctgctgtctactgcctacttgccatttctttttcaatgtctaataggcacctaagactatgtgcaaaggcaaactcttgctgattttccccttccaaggtcatccccatctcagatgacaactctagttgcttaagctaaaaaccttggtatcatccttcattcctcttctctcacaccctgcaatccaaagtactagcaaattttaactcattcctttttttctgagacgggtctcactctttttgcccaggctggaaggcagtggcgcaatcggctcactgcaacctccgcctgctgggttcaagcgattctcctgcttcagcctccggagtagctgggattacaggcatgcactgccatgcccggctaatttttgtatttttagtaaagatgggatttcaccatgttggccaggctggtcttgaactcctgacctcaggtgatccacccacctctggtctcccaaagtgctgggattacaggtgtgagccaccatgcccggcccttaactcattctttaaaaatgagtttttaaaacctttgcttagaagaatctaaacacttctaattccattgtttccaatctagatcaattcactaccatctctaaattactgcagaaactttctgactgcagaaggtcttcccatttcttctcttgccacccctccgcaactctattcaccatacagcagcctgagtgagccttttaaaacaggtcattcctctgctcaaaccctccaatgacttcctatttcatgtcatggaagtcactgaagggttttgagtggaggaattacctaaggtaattcctgaccacctgatgtaacactctgacctccatcctgaacattctccattcctttctctgctttagctttctccgtggcacttatattttgtttactgtaggcctcccactgagatgattttttcctcttgctcaaggatgtaccctgagccccaaactgtgtggcacacagtaggtcctcattaagtatttgttaagaatgaatggataaactccccccagtctctcttatagggaaggggcagaagcagagtggcagctgctgatccctaggggctagagatgcaatattgcccgaagtatttctctgcagggctgtcctccctggggaaccctcccttgccttccagtgtgtgggacttggctttcatcagcagtagagcctcaggtcagaaggctgcagagccaaacggggctggcctgatgcaatggttacacagagattagctgggagacaggaccgggttaaagaggcagggactaatcccgagggaaggacaataccctggggagaccccaaatggcctcctacacttaagagatccaggctgctctcttgtgcaggaggcccagagacctctacggcaaaaggaaaacacaccactccctgtccatcggcacccctcccaaaggcttgtgtctcctcaaggttcccctatccgctgcagggtccagtagccccagctaccaaggtggccatgctgacaccagaggcactgagactgagacagaattgggggtggggtagggagaaggcccgctggtggcgaagcggcggaaacggcctgagcgatggtcacccagtcttagagcgggggtgtgtcctgctgacctgcctccccgcggacaggcctaacgatgaggcctgaagttggctacgggaaagaatgaatttcccaagggcaaccgaggtccctttgcccagcagcacagagcagggcccgtgttccggctccgggcaggggtggagagacgccgtcgtccgaagcaataggggtttgtaagcaccaccccagaataagggactctccccattcctctctcggacggtccctaacttcactgtggaggagtgaggccgatcctaaagagcggacgccccaactttgaggagacgggagggtaaaaggtagatgggaatcagtactcgcctctctcctcaggttccagctctgattttggctctgtcgctgccacccgctcatctttaacatgatacgctcagtgccttagacttaagtctctgacctcgggagcgcctggctgtaatcttttaccatggccttgccctcctctcaggggcgggaccccaaaacctaccaatcagaaagtggcacgccggcattggccccgccccgtccctcgcatccgccactcaggagccccgcggcaccgcccccgtcgctccctctcgctagggggtcgacgtagtgtcggacccggaagtggctttgggtcacgaggcttcacggaggaggtgggtgagtcatgcgcgcgcgcggaggggagtgtagcggggggggaggggaggaaaggggggcggggatgatgcaatgtttggcaaccggtgtctgcacgcgcacgcgcaggggacaccgagggtggtgggaggtgcggagggtgggggagaggagagagggcggggcgccagctcccggcgcccaacggccccaacggctatcagccttggtcgcccctagtcggtcgtgagcctctttgccgcttgtctcccccagaagctgctgttccgcccacctagctttacccgccgttttacccccactataagggactcccatatttcttggcccctcccagctaatgggcacataggccttttgaacttttctttttaaagttggtatccatccactgggattgtcgacatctcgagtcttcttaaagaggtctcctggccgggctcagtggcttacgcctgtaatcccagcactttgggaggctgaggagagcggatcacttgaggtcaggagttcgagatcagcctgaccaacatggtgaaaccccgtctctactaaaaatacaaaaattagccgggtgtggtgatgcgcgcctgtaatcccagctactctggaggcagaggcagaagaatcgcttgaaccctggaggcggatgttgcagtgaccgagatcgcgccactgcactccagcctgggtgacagagcgagactacgtttcaccaaaaacaaaaaacaaaacaaacaaacaaaaaaacgggggtggtctcctgttctagccccgtaaatctcccaaaaggggccgaggtactggaatcccttggtagtcattttccgcttctctcagaacagcgcccttgacttttaccttgtagttggtaagccctcagcctgccagaagtcatgtattttgcccagtggacccgattctgtttggccacctattttcccccacggtactcctatggctttctccaagaccctctcttgctgtaccagacagcaagtcctgtgactccctgtgtgaggagcgcggcacaggcctgcctcctaggtgttcgggtcgagatttacagcggagtctcatcccgggacgtgtgagtgcacttcagcgcaggactgccctggactggggagaccggagccgcgattttagactcaactccccatcacttgccaagggatcttaccgtccttgtttgtaaattaaagataaaagttgtg

SEQ ID NO: 2759 - DNA, 6000 bp, Homo sapiens
agttggctgcagcctccaactcctgggctcaagtgatcctcctgcctcagcctcctgagtagctaggactacaggcacacaccaccatgcctagctagatttgctgtatttcaaaaaactaaatttttaaggttttctctaaaattaatgactccaacttcttttatcttcaattattttacactattttagggatttaagttgcttttttcttttttaagagacagggtctggctgccacccaggctggagtgcagtggtgctatcatagctcacagtaaccacacacacctgggctcagacaatcctctcacctcagtctcctgagcagctgggactacaggtacatgcatctatgcctggctaaattttaaattttttgtagagatggggcttcactatgttgcccaggctagtcttgaacttctggtctcaagtgatcctcccaccttggcctcccaaagtgctgggattacaggtgtgagccactgcacccagcctaagttgctattttctaaatacattttattatcttcacttaaaaaaagcatataccatactgaatacttacaaaataatgaacaaggctaaataatccaaatgctcaactaaaggggtctggttatgtaaattatgatgcgatagcaccataactattattccatttggtattgctagatggaggtctgtgtattcaccatatgtacagtctactagaaactgtaaatataaagatttagaataagccagtcctcatacagtattcctcaaatagtataattcctcatgtagtatgatttcaaatttcttcattttttggtgctcggaatcaaacaaaactccagataaagcctcatcagcccgaaaatgagcagggctaccaacttgctcattttggagacaaactgcagaacccatgacactagctatactggcacccacattatactgttgattcacactgagtttcccatcaacgaacactgtccttgtatcacttctccctcattccacactttatcactgatttttctgcagctgagtataggattgtgcctcttctttgtaaaagatgattcaccattccagtcagtcaggatttatctggactctgattaaatcaatcagttaattccacaaattcctcccaggcttgggtcactcacaaattttatcaccatgccatcagcaccctgacgttaaggtactgaaaggaacaaagttagggatagagatacatggcatataagtacagacctctcttcagtctgcctgattctttcagtagtaagtcaggtttttatttcacctaactggattgccatcagtccatctccatcttgctcactaagagaggcagtaaagcacatttgctagctagagaagcagactttgaagctaggtcatctggattcaaatttcagctctcccatttactagctctgtgggcaagttccttaatctctttatgcccatgcttccacatctgtaaaatgggaatagtacctaataattggttaggagcattaagctagttggcctatgtaaaacatccaaaacagtacctggtatataataaatttgctataataatgactactgtaggtacctcctgccagcatccttctgatgctgcctgtctagtataggtcttgctttctttctgaactgatactgtagtgtagtggtcactagttatgccaccatgcccagctaattttgtatttttagtagagacggggtttcaccatattggccaggctggtcttgaactcctgacttcaggtgatccacttgccttggcctcccaaagtgctgggattacaggcgtcagccactgtgcccggtcaattagtttcttttaaaaatgctcagtaaccattgattaagtaaaaattttgttcaggatcaatgtcaacagaggacagactccacctctggaagaacaggaacccacgtgtttatttccaggtcccttacatttgctacaaatcctctaacactgctttaatctggcctctcccttgaaacacaacacacgcaggccaaggcatatgattctgttagaacacctgaaacttctcctaaatgccttcactggtcttgagctttaagtcttacagatattcattctgccatttccagtcagacaatcattttgctaacataggagatgtaaaatccaaatcagaacaaagtacttaggtgttctgttgtctgctgccaccatgccagtagactggggagaaaacccaaatcttttttattcttcttgttgtcaacatctaaccaaaacagtccttcctggtctccttaacatttctataaagtctactctcatgcaagggttaatctttcctgttggtattcttagtggtccatgctactctcttccagttacttttgatttggcatcctattttccatcttcggtaaatgtctttttcacgcctgaggtcacgggaaactccccagtacccttagaaaattcctcctttattcctctctggttgattgactgtaagcactttctaagactcctgaactattttgccattgaaataaagtctaggctgggcgctttggctcatgcttgtaatcccagcactttgggaggccaaagtgatcacttgaagccaggagttcaagacccgcctggccaaaatggtgaaacctcgtctctgctaaatatacaaaaaattagctgggcgtggtgttgggtacctgtagtcccagatgcttgggaggctgaggcatgagaatcgcttaaactcgggaagcagaggttgcagtgaacggtgatcgcaccactgtactccatcttgggcaacagagtgaaactctgtctcaaaaaaaaaaaaaaacaaaaaaaaaagtctgtattcatggaatttgaattttcttctttgaatatctgaaattagtcttctaaaaaagtcggctgggcccggtggctcacatttgtaatcctagcactttgggaggccgaggcaggtggatcacttgagggcaagagttcaagaccagcctggccaacatggtgaaaccctgtctctactaaaaatacaaaaattagccaggcctggtggcaggtgcctgtaatcccagctacttgggaggctgcagcgggagaatcgcttgaacccgggtgatggaggttgcagtgagccaagatccgccactgcactccagcctgggcaacagagcaaggctctgtctcaaaaaaaaaaaaaaaaaaagtaaatttattttttttcacatcccacattacatttcttgattagcacagtcaagggtgacagagaactactctcttaaggattacctggggtctgagtcatttcagaagattacacagaattttccacagttcctgaaggtgaaagcttttcaaggcaaaataaaatctggtctatagccttttggatgaagtcaggccgacatatcacagctttgagctaaacagtgtattgaagtcctactattttgctgtaagaccctgaataaagtcttacaatgtgtaatttattcttggcccaagtttcaattctgctcttaagtgaggttatgagagagagatttccacaaattctggtgaattctcttatttgtaaagttcttctgggaaagaagtggagtaatttattccaggacttgatccacaaagtcaagataaagtccacactttgtctacatatatctcttttcctaagctctaatttattttggttagtgtgccctttcatgtaacaccaattctcggcatgtcagaatcagattccagacatgccaactttacagacatgaacaggcccatataagtcccttgtattgcctaaattcagctcccattagccactgagagtcaggataattcttcattaggcataggtttttttccttttaatttcaatgtaaatcatcactctttatcttttaaaaaactgtcaccatatccattttttaaaaatttagtcttccgccaggagttcaagtccctaaatctcctgcttttgcaaatttttctcttgactcccccaaaggactttttaaaaacggattcttaagatcgtccccaaggccactggaaaactcaaaggtcatttttagattgactactcgagagtgtatacatatgcccacaacaaaattatctaacccgtgacccttaaagttgctttcagtaggcctttggggtggggggaagccgcaacaaatcaaccaactttaaaatgaaaactcctggagctggaaatgttcgacactcatctttacagctctctgcgtggtaatggagggtgacggaaaacccttctagccaagaatggcatccagaaagacacattaaccaaagactgctgaatgcttactaatatattttatagtcaactggttatcgcggggaaccaaagaagggtccaggtgcaccaggtaaccctcagagcagccccgacctccaccaccaccgccgcagccagggaaggaaaggccgaccaggccacagtgcgcacgcgcggccccggcctttgtattccggccgggatttaaaagacccctgcgtgcgcgcgcgcgcgccagccagcctgcccagcagtgaggggcgcaagggaggggcggcgctggccccggtattacctgcccgcgttctccgcttccattccccgaggccgctgatgcgggcggctccacctgccgggcacacgggcagccggtctctgtagtaccgcgtggtactcactgcggtaagacaaccccagagacctgggcccgatggctggcagtacccagacagtggctggactcaagctcctcctccaggcttctaccgtcccccacggaccccctttctgtgctgcacttccgcctcctcggagccaaatcccacgcgtactggccgtcacgtgatgtaggacagcccaatcacgctcacccccttctcgttggcgccccagctccgccgcttggcctttcgggaagggtggaggaccagaagacggggactaggagcgctctgccgacgtcagcttttgtctccagtattttcgggggctggtggacgcgtgggcgatagggtgctgtccttggggtgctgtgtatatgggatgatgacgcttatcagcattatctagtcctttccaccccgaaattcgccccgattaaagactgtgttgcattatcaggtaatgagatgtgagggagggtctttgaaagtggaaaacctgggcgtcgaggccactgtgccatcttgggcctcagtttccttatctgtgaaatgagggtgaatgtaaagctgctatgtaaaatgtaaagctctacataaaccactctccgcattactttggatatatgagaatattaacgtttgacgtctacgagactagatcccattcgagcatcacctcccataaccttacagactaacccctcttttaaatctcagtggttcgtaatcttacagactaacccctcttttatgtctcagtggttcttgcagctggcttttgtttcattagttctcaatttctgtcactggtgtttgtactttattaaggaactcttaatggaataggcttttgggtttttctagtttgcaggatgatgaaaaacatggctgctgtatttgttggctttcctgagtttattcatatagtaacaggtaactccaaaccttcagtggtttacagccacagaagtttatttctcactcacgtgatctgtgagctgggagatggctgtggctctgtgctccatgtattttcttcattctaggatccaggctttcgtgagtaaatacagaaagatttttgtaatatatcaactgtttaaagtttgagtgaaacgtttaaaacagtacagaacttttatgaataccctgtccattagtagacactactcagaacctggcacatggtaaatattcaatgaatatatgttgagtgaatgaaaaaagcccatcctctctgattttgccaatggctcaggaccatcgtctagaaaagt

SEQ ID NO: 2760 - DNA, 6000 bp, Homo sapiens
aaaaaggaaagttaactgtaaaacagcctcggccggatccttcacaaggtactccagaaagcattgttatcataggagatgacgactccctgtgggttattgcccttgaagaccttccaggatgtggaggtggaagacagtgatactgacgatcttgaccctgtgtaggcctaggctaatgtgtgtgtttgtgtcttaagtttttcacaaaatttttaaaagtaaaaaaaaaaaattaaaaacagaaaaaaggcttatagaataaggatataagaaattgtttatagctgtacaatgtgtgttttaagctaagtgttattacaaaaaggtcaaaagtttaaaaaattaaaaagtctataaagttacagaaagctaaggttaatatattattgaacaaagaaaattactttttaataaacttagtgtagcctaggtgtacagtgtttataaagtctacagtagcgtacagcaatgtcctagaccttcgcactcactgactcacccagagcaacaaggagttctgcaaactccattcatggtaagtgcctgctacattttttatctttaatactgtttggttttgttgttgttgttgttgttgttgttgttgttgttttgagacagagtctcgctctgttgcccaggctagagtgcagtggctcaatctcggctcattgcaacctctgcttgccaggttcaagcgattttcctgcctcagcctcccgagtagctgggactacaggtgcccgccactacgcccagctaagttttctttgtattttagtaaagatagggtttcaccatgttgcccagggtgttcttgaactcctgagctcaggtgatccacatgcctcggcctcccaaagtgctgggattacaggcgtgagccaccgtgctgggcctaatactgtatttttactgtacctttcctatgtttagatacatacttaccattgtgttacaattgcctacagtattcactatagtaacatgctgaacaggtttgtagcctaggaaccacaggccatacaatatagcctaggtatacagtaggctgtaccatctagatttgtggaagtacactctgtaacattgtcacaatgaaaaaatcacctagtgacatttctcagaatatgacaaatgaccatattttcttgtgcttctattttctttggtgatgtatctgttcaaatcttttgctcatttataaaactgagttgttttcttatgggttttgagtgttcttttatatgttctggacacaagtcctttatcagatatgatctgcaaatattttctcccagtttattgcttttcattaattttttaagagaagtttttaattttaataaagtataatttatcaatttttccttttgtattatatttaaaaaatataacccagggtcataaatattgtcttctatattttcttctagaaattttacagctttgggttttacatttaagtccatgatccattttgtttttttatatggtgtgaggcaggaggtgcgacttgactcccaaggtggagcttggacacaggaccagattgaggaccagctaaaacagggaagaggtggaagctcttctccataaaacacaccaactaatgtgccctgtcagtttagctttgccatggcaacacccagatgctaccactcctttccatggtaatgacccactgacccaaaagttacctccctttttctagaaatttctgcacactcagccccttgatttgcatataattagaagtgggtataaatatgactgcagaactgcgtctgagctgctactctgagcacactgcctatggggcagccttgctctgcaggagcagtcttggagttgtaacactgctgcctgaataaaactgttttcagctcactcttgatttatttcctgggtgaagccaagaacactcctgggctaagggcttgcctgccctgtgtcatgcatacaactttgttttgtttttgcatatagatatctgaactacctttgaagcttagttgaaaatcagttcatcacttgtccatgtatgtgtctatttctggactctattctgttgcactgatatatatttctctctcttgatgctaatactacactttttttttttttttttgagacagggaatcattctgttgcccaggctagaatgcagtggcatgatctcagctcactgcaacctccacctcctgggttcaagcgattctcccatcccagcctcctgagtagctgggactacaggcatgtgccaccacatctggctaatttttgtagttttttagcagagacggggtttcaccatgctggccaggccgttctcgaacttctggccttgggtgatctgcccgcctcggcctcccaaagtgctggggttacaggcatgagccactgcgcccggctaacactgtcttgattactgtagccttataataattcttaagtcaggcagtattagctctcccagctttggctattctagatctttgcatttccatataaattttagaatcattttgtcaatttctacccaaaaacgcttacctggattttggttagcattatattgaatctttaaacatcttcacaatatttggtcttctgatccatgaatacaacatatccgtgtacttatttagttcttacccaatttctaccagcaatgcttttcactttttatgatagaaatcttgcgtcttttgtcagctctatccttaaatatttcatatttttgatgctattgtgaatggtattttttctaattgtttgttgttagtacataaattacaattgatcttcctatattgatattttatcttgcaaccttgcgaatctcacctattagctgtactaggttttttgtaggttccacaggattttctacataaaccagcaccagagcaatgaacaaagacaaattgtttttttttttatagatgtcatttatcaatcttcaggaagtttacaaggaagttcccagttctgtttccagattgctaaaagctctggtgggccaggttcacaagcagaaaaagtttgtcttccagactcagatgcaggatgttgagagagagacactgatgggataaaagccagtttgctgcaactgcttcaccatttttaggttcagtgtcctcaccgacaactcctcccataagctttttttttttttttttttttttttttttttttttttttgagacggagtctcactctgtagcccaggctggagggcagtggttcgatctcagctcactgcaacctctgcctccctggttcaagcgattctcccacctcagcctcccgagtagctgggactacaggtgacagagatggggtttcgacatgttggccaggtgggtctccaactcctgacctcaggtgatccacccgcctcggcctcccaaagtgctgggattacaggcatgagccaccacgcccggcctcctcacgttaactttcttttgccatgcaagattgggcagaggaccctggtctcttgaggttatgaatggagctggcaggacccagcacagcaacccacagtgagagaagcccttgctgccaagggtaattccccgagtgcagacatcctgagaaaagtttactctcttcacacacattttcagtcaccagaattctctcccaaagcattcagcagtctttggttaatgtgtctttctggatgccctgaaataactgaggcaagccacctgctgtaagacttttctagacgatggtcctgagccattggcaaaatcagagaggatgggcttttttcattcactcaacatatattcattgaatatttaccatgtgccaggttctgagtagtgtctactaatggacagggtattcataaaagttctgtactgttttaaacgtttcactcaaactttaaacagttgatatattacaaaaatctttctgtatttactcacgaaagcctggatcctagaatgaagaaaatacatggagcacagagccacagccatctcccagctcacagatcacgtgagtgagaaataaacttctgtggctgtaaaccactgaaggtttggagttacctgttactatatgaataaactcaggaaagccaacaaatacagcagccatgtttttcatcatcctgcaaactagaaaaacccaaaagcctattccattaagagttccttaataaagtacaaacaccagtgacagaaattgagaactaatgaaacaaaagccagctgcaagaaccactgagacataaaagaggggttagtctgtaagattacgaaccactgagatttaaaagaggggttagtctgtaaggttatgggaggtgatgctcgaatgggatctagtctcgtagacgtcaaacgttaatattctcatatatccaaagtaatgcggagagtggtttatgtagagctttacattttacatagcagctttacattcaccctcatttcacagataaggaaactgaggcccaagatggcacagtggcctcgacgcccaggttttccactttcaaagaccctccctcacatctcattacctgataatgcaacacagtctttaatcggggcgaatttcggggtggaaaggactagataatgctgataagcgtcatcatcccatatacacagcaccccaaggacagcaccctatcgcccacgcgtccaccagcccccgaaaatactggagacaaaagctgacgtcggcagagcgctcctagtccccgtcttctggtcctccacccttcccgaaaggccaagcggcggagctggggcgccaacgagaagggggtgagcgtgattgggctgtcctacatcacgtgacggccagtacgcgtgggatttggctccgaggaggcggaagtgcagcacagaaagggggtccgtgggggacggtagaagcctggaggaggagcttgagtccagccactgtctgggtactgccagccatcgggcccaggtctctggggttgtcttaccgcagtgagtaccacgcggtactacagagaccggctgcccgtgtgcccggcaggtggagccgcccgcatcagcggcctcggggaatggaagcggagaacgcgggcaggtaataccggggccagcgccgcccctcccttgcgcccctcactgctgggcaggctggctggcgcgcgcgcgcgcacgcaggggtcttttaaatcccggccggaatacaaaggccggggccgcgcgtgcgcactgtggcctggtcggcctttccttccctggctgcggcggtggtggtggaggtcggggctgctctgagggttacctggtgcacctggacccttctttggttccccgcgataaccagttgactataaaatatattagtaagcattcagcagtctttggttaatgtgtctttctggatgccattcttggctagaagggttttccgtcaccctccattaccacgcagagagctgtaaagatgagtgtcgaacatttccagctccaggagttttcattttaaagttggttgatttgttgcggcttccccccaccccaaaggcctactgaaagcaactttaagggtcacgggttagataattttgttgtgggcatatgtatacactctcgagtagtcaatctaaaaatgacctttgagttttccagtggccttggggacgatcttaagaatccgtttttaaaaagtcctttgggggagtcaagagaaaaatttgcaaaagcaggagatttagggacttgaactcctggcggaagactaaatttttaaaaaatggatatggtgacagttttttaaaagataaagagtgatgatttacattgaaattaaaaggaaaaaaacctatgcctaatgaagaattatcctgactctcagtggctaatgggagctgaatttaggcaatacaagggacttatatgggcctgttcatgtctgtaaagttggcatgtctggaatctgattctgacatgccgagaattggtgttacatgaaagg

SEQ ID NO: 2761 - DNA, 6000 bp, Homo sapiens
cagttcaaaatattttctaaattttgttatgatttttttctttggtctgtgaattatttagaattatatcctttgttacttataatatttattatattccaaacatgcaaagttttctaattgtcttttcagtattaatttttagcataaatacgtcaaggtcagagactatgctgtaaataatttcagttctttgaaatttatatagacttttttttaaatggtccaatatatgctgaatttttaaaaatgttccatgtgtatactgctgtcttcattgttattagacgggatattctttgtttttccattaggtcaaggttgttaataagttgtccaaatcttctgtactcatttttggtctgcttatctcaattattatcagaagaatgttaaaatccccacagtttaatcatagatctgtctttatttgaagctctgtcatttttactttatacaatttgaaatgctaaaattaaatatatgttctcctggtgaagtgaaggcttttgttcttatcattacgaggtgtggagaaatgtgtaaaatatgtatatatttagatgattattaacctggttaaagtcattatgaacgtgactttatagtatatttctttacagttcattatgtttataattaatatagctatggcagctttctttggtatgtttatagtcaacttttttgtatccctttttttttttttcaaactttctggagtcttttagatgtctcttgtaaatagcatatattaacttttgtttatttagtctgatagtttttaattaattgaagcctttcgttagtctgtttacatttgttataattaccaaagtatttggatttattgtcatattattttgtgttttctttttgtccttcctgttctattttttaatattcttttaaattctgttgttttaaatttcattaatttctttctaataactagatttattaatttatcagacttaataaatttattaattaataaaataattacacattattttagctattcttttagtgtttactctagaaattaccagaagcacattggttaatgtctaaagttaatcaataattttgtctatttattagataattcaaggcccttgaaacgcaaactctaattacctttcttctgatttatatattctaattctggtcatttctctgtttttgtttttaaaaaccaaaatatattattcttgttttataaggccagtattcatttacccacatatctactatttacaatgttctttattcttcctagcatctcagctcttccattggggaacatttttcttttatctcagatgtatcttttagaattctctatagaaaaagactggtgatggtaaactctcttaggtttgtttgaagatactggccttgtttacactggatatagaattctaggttgacagtgattttctctgagcctgttggggatgtagttatagtcagctgccactcccactcatactttttttgggggtaatatcttgtttctttttgtctaattttaaatattctctttctctgacatgttctgaagtttttcgatgatgaatctccgtctgagtttctttgtatttacttctcttggatttacagtgctccttgaaacctgtctgttgctatctttcatcagctttgaaagtttttcagctgttactttttcagatcttgctttgccttgctttattttctctttttggaaatacatttgtagccggccaccgtggcttatgcctgtaatcccagcactttgggaggccgaggcaggcaaatcacctgaggttggaagttcgagatcagcctgaccaacatggagaaaccccctctctactaaaaatacaaaaaatttgtcgggtgtggtggcacatgcctgtaatcccagctactcaggaggctgaggcaggagaattgcttgaacccgggaggcagaggttatggtgagctgagattgcgccattgcactccagcctgggcagcaagagtgaaactccgtctcaaaaaaaaaatacatttgtacgtgtgttagacatttttactgcactcttttattttcttcatattttccatctctttggttctctgtacttcatttttaaaaatgtctttttatcagctattctataaatgttatttttaactgtatctgttaagtttggatttcaattattatatttttcatatatggagattttctttggttctttttcaaatctgccatttcttattccttgctttttttactttaaacatgttgattaaattatatgggctctgccttcaaaatgtatccaagttcggaccatctcatgcttccacattaactaccgaataatttcccttcagattctctggttctctccttcttcctcttcagctcattgtgatccttcataatcacaagtaggatcaatctctagtggcttatatctcagagtaaaaggcagagcccttaccatagtctacaagatgtcatgtgaactggaacttgataactttctaacctaataatctcttgccactctttcactctctgtgctgtggccatactggttttttgagtattctttttaaagtgccatgcatgttcttcacctgtgttgtacatctgctgttccctctgcacaaaatgtttccttaccagcactgcttgctctccaactttccttcaggtttctgcacagatgttctattatcagtgagtattttcttgacttgtttcatataaaataccagtctccattcctttattccctgaagtcccagtttcccctttaactttatgttattcagttattaccatttgaacagtttgctttactgtttttgtattattctgtctttactccctctccttctagaatattagcttcaaattgtaggaagtttgactttaaaaaaccacaggtgtgtttctaatatctagtacagtctttagtacataagttctcaataaatatttgttgaataaataaatgattataaagtgttattcaagggactgcccttgtggtaaagaggtactgtcattttaggagagtctcaaatctaattacgttagattttttagaattctctatagtaaaaggctgctaatggtaaactctcccaagtttgtctgaagataccatccttatttacactgggtatagaattctaggttcttttatgaccttcttgattttctttttcttgtctttctctttaaaaatcatccttaccaagtaaccgttagaaaaacctcgtgcaaacttgggatagttgtttacaatttatatcataggtcagaaaaatcagaataattttcagcatttttgaataatttttttgagaagggaaatttcttttagactacagaaaatcattatatatagttctaatttgccttttacaaatgcttaacagattttatttaattttatataagtctcctaaagtccccaagtagatgttctgctgattttccctcccctttggagtcacaatatagtgttctttaaaaatagataaaaattagtaggagccttagattacaattacctctatgtggtttttgaaatcatggtggcataagttatatagacttgtgctagtgtaattcaactctagaaggtatatatacttctattacagatcattttatgctgctgtcacaaagtgaaatgctatgatagttaaaaggcccatatcaaagattatcttcgtgaaactttatggaccttccttgacagattgactcctctgtgccatgaactttaataatgcagtttgataggtaatatccatatcttattctcattaaatttgggaggcttcaaggatgggaattctgtatcttcttatttatctatttttaaagctttattgattttttttaactcaagaaaatacccaaatgttgattgaaagaatgagtgaatgaaagtgcttcagatacaattttctgcattttattggtcactaatattttaccataaaaaggacataaaagcagtaggactataagaatatttaaaaattaatacaggcctaaatgtaactttttacctaaataagataatgtgactcacaggattagttaagaatagttctgttgtttctgtttgtttgtttgttttttctctacataacacatgtttttcatataattacataacagctatatggttagggaacatttttattttcaaatgtgtaaacgcatgtaattgaaatttgttttcagtccatgacaggttcataaccctcttgtttgaaatttttaaactgtttctccacctttcttttgaaaaccacatcatatttagtggctatcttaattggatttattttgttgttctttcattattttcttttttctagagctctcatactcacttcctgttaagtctccttatcaaagtgtctgaatctttctgtcctgctctttctcatccattccactcttcctttctttcatgctgccccctccttctttcataattgacatccaaacacccatttgtcctttctaagactggttagtctgtccttccaaggctggttagtctgtctctgtcatctttacaaagatccatcttacaaaggtctgtcctttctgtcagcctttcttcctttttgtgttatttctgtttgtgctgctatgagggaacatctcagactaggtaatttataaagaaaagagatattttggcacacacttctgtaggctatactggaagctgctgctaacacttgcttctgttgagggcctcaggaaacttacaattgtggcagaaggtgaaagggaagcaggagaatcacatgacaagagagggagcaagagagaggggaggaggtgccagggtcttttaaacaaccaaatcttacatgaactaatagagtgaaaactcacgcatcatgacgatagcaccaacccattgatgaggtatctgccccagtgacccaaatggctcccccctaggcccacctccaatactggaggtcacatttcaacatgagctttgtaggggacacaatgtccaaatcatatcacttattctgtctctcccttccttttttggtgctacctgcctatcctaccttccttcttccaaacttccctccccttgccatctttcttcccagccctcctcattgtttttctctctacctttccattttttctagctttttcttcttctctttccattattcctattttcttatggaaagatgctctcttgcttttactttccccttgtgtctcccccactttgtcttttgtaaccactccattttctttatctccttacttccttgaatgccttagtttttcttccttccaactgttcttccacttgtatatctagttttatagcaattagggccatttctacagtaagtcccaaatttatgtctactattgcagatgtctagcttaaattccagaattatgtacatcattttataattaacaagtcctcttggatgtctcataggcacttcaaactaaatacatgttaaactgggcatttctacttctggaagtggctgatttggttgtcctagaccaaacaccaggtatgtatactaaaaatacataggaaagctgagaaaatattttttaaaaatctctttgaagccatcagagagttacacagataataagaatttgtctggacacgatggctcacacctgtaattccagcactttgggaggccgaagtagggagatcacttgaggtcaggagtttgagaccaggctggccaacatggtgaaaccccaactctacttaaaaaaatacaaaaattagtcaggtttggtggcacgtgcctgtagtcccagctactcaggaggctgagtcaggagaatcacttgaccccaggaggcggaggctgcagtgagccaagatcgcactactgcactctggcctggccaacagaatgagaccccatcccaaaacaaacaaaaaaaagatagtaagaatttgt

SEQ ID NO: 2762 - DNA, 6000 bp, Homo sapiens
ttctttttctttctttctttcttcccttttctttcctttccttttcttttcttttccctccctcttcctttccttttcttttcttttccctccctcttcctttcctttcctttcctttcctttcctttcctttcctttcctttcctttcctttccttttcttgacagggtctcactctgtcacccaggctggagtgcagtggcatggtcttggctcactgcagcctccatctgccagctacatcaatccttctacctcagtctccctagtagctggaccaggcctggctaatttctttgtatcttttgtagatatggggtgttaccatgttgcccaggctgctctctaactcttgggctcaggggatcctccccagggttttcattgtattagtatgttctcacactgctaatacaaatgtacccgagactgggtaatttataaaggaaggaggtttaactgactcacagttcagcatggcttgtggggggcctcagaaaactgaccaccatggtggaaaaggaagccaatacacccttcttcacatggaggcaccaaggagaagtaccgagcaaaagggggaaaagcccttcataaaaccatcagatctcaagagaactcactcactatcatgagaacagaaagggggtaactgcccccatgattaaattacctcctgctggatccttcccacaacacatggggattatcagaactgcggttcaagatgagatttgggtggggacacacccaaaccatatcattccagccctgacccttcccaaatctcatgtcctcacatttttaaacacaatcatacccttccaacagtcccccaaagtcctaactcattcaggtattaacccaaaagtccaagtccaaagtcttacctgagacaaggcaagtcccttccacctataagcctgtaaaatcaaaagcaagttagttacttcccagatacagtggagggagttacaggcattcagtaaatatacccattccaaatgggagaaattggccaaaatgaaggggctacaagccccacatgagtctgaaatccaatagggcagtcattaaaccttaaagttccaaaatgatctcctttgactttatgtctcacatccaggtcatgctaatgcaagaggtgggctcccacctctttggcagctatgcccctgtggctttgcaggacacagcccccctcccagcttccttcacaggctggtgttgagtgtctgcagcttttccaggtgcacggtgaaagctgtcggtggatctaccattctggggtctggaggatggtggccctcttctcacagctccactaggcagtgccccagtggaaactctgtatggggctccaaccctacatttctcttctgcactgtcctagcagaggttctgcatgagagatctgccaccacagaaaacttctgcctggacatccaggcatttctatacatgctctgaaatctaggcagaggttcccaaacttgaattcttgacttctgtcaaggctgaacaccatgtggaagatgccaaggcttggagcttgcaccctcaagccatggcctgagctgtacgttggccccctttaaccacagctggaacacagggcgccaagtcccaaggctgcacaaagcagcaaggccctgggcctggcccacagaaccattttttcctcctaggcctctgggtctgtgatgggaggggctgctgtgaagacctctgacatgccctggagacgttttccccattgtcttggagaataacatttggctccaaattacttaggcaaatttctgcagctggtctgaatttctcctcagaaaataggtttttctttcttatcacattgtcaggctgcaaattttccaaacttttatgctctgcttcccttttaaacataagttccaattccaagccatattatttgtgaatatataaaactgaatacttttaacagcacccaagacacctcttgaatgctttgctgctttgaaatttcttctgccagataccctaaatcatctctctcaagttcaaagtttcacagatctctttgctaaaacatagcaaaagtcacctttattctagttcccaaaaagatcatctccatctgggaccacctcagcctggacttcattgtccatatccctatcagtaatttagtcaaagccattcaacaagtctccaggaagttccaaacttccccacattttcctgtcttcctatgagccctccaaaccattccaacctctgcctgttacccagttccaaaggtgcttccatatttttgggtatccttatagcagcacctcccagtagcaatttactatattagtctgttctcatgctgctaataaagacacactcaagactgggtaatttataaaggaaagaagtttaattgactcactgttcagcatggctggggaggcctcagaaaactgatcatcatgctagaaggggaagccaacacaaccttcttcacatagaggcaggaaggagaagtgctaagcaaaagggggaaaagccccctataaaaccatcagatcttgtgagaactcactcactatcatgagaacagcatgaaggtaactgcccccatgattaaattacctcctaccgggtccctcctacaacacgtgtggattatgggaactacaattgaagatgagatttgtgtggggacacagccaaaccatatcattcatatatataattttaaaagtattcttacagaaccaaagaaaggctgatatatacttcttgtggcaacagaagcagaagtagggaagactattcagacagattggctctctagagtattgaatttactttattgctgcactagtttgctagggctgctgtaaaaaagcaccacaaattgggaggcttagaacaataggaactaactgtctcgcagttctagaggccagaagttcaaaatcaaggtgtcagcagtgcgacagtcctgtgaaggtgctaagaaaggatctgttccaggtctttctcctagcttccagtagttccttggcttgtggcagcacagttccaatctttacatggtattttccctgtatgtatatgtatttctgtgtctaaatttctccactatatgaggccaccaatcacactggattagggtgcaccctaatgacctcatcttaacttgagcatgtacaaagaccttatttccaaataaggccacatttatagtcattgagagttatatgattttggggacacacaattcaaccaataagaattgccatctccttctttcttttaactttgccaaacacactggtggccaacagcactcactcactcactcattcattcattaaataagcatttgcctatgtcaggctctgttctggtgttgatgcaaaaaataaaaacaaaagaaaactgaatacagacccagtccttgagaaatcacacttcagagggaatcagaggcacattattatgataataagtactattactgagttggtattgctaggaatgggcacttttcaactaattttcacggtagtgtgaaaagtgatgtaacagaaacatacttggagaacccagggaggtcctaaatttgccctagggatcaggaatactttcagaaattagttattatttcatctgagtctaaagggatgcgtagaaatatcctaggtagctcaaaggtggtaatattgagtactggattccaaagaagagtattttatagaggaaaaaacagcaaaggttaagagacaaattgtaaaccccaggaggggtggggttttagtctgttttattaagtatctcctgtatctctagtgctttgaacagtgcctagttcattcaaaaagtaatcattgaatgaatttaagggcatcatatatctaagggatgccatggcctgcagttcactgtcgctggaaaagtagacaaacgtccagtttcaaagagaccggtaaactacattaaatgtaagagacgaggggtgaaaggttgatgatatatatcgctagtattaaaaaaattccaggaagtccaggaatgcctggcatccgtcctgccaattacccttttccccagagtatgtacaagggggaggaggcacccaagggccaggagagtggaggggcacagctccacaatctccaaagtagggttctctggccaaagcaggattgaagcacatggtttggacttgaaatgtacgtggagcctcccactctcctccttccactccatcctcccctcactctccgcccgactccaccactggctcctgaaggaaaccggacaatttccaggccctccccaaatcccacgggaggaatcgccgagcgcgctcctgcccgccggccccgcccccttaccctctggaacgcagcgagagcgcacgcgcgcctaacggagcagcgcgcgcgcccgcaagctccccgcatccccgtgctcatccgggtctcagcgagcctcggccaatggtggccgctcatggcccttgggggcggggctaagccttccctcacaaggggcctgtggtcaacgcgatttgcttccaagggacggccaccagtcggcacaggaaaggggcagaggcagtgagttcagcgtgtggacgagggtcaacaagtttgggatcaagcggctgccgctcctccaaaagcgaccgaagcgcgagcagattacccctccgagccagtgtagtaaacacacttcagaaacgtgaggtgccggtggtcacgaggggagcgcgccctccaatgaggagccgggggcggggccgaggccgctgacgcggcggcggcggcagagtcacccgggcagcctcgggaccggtcaccggccggcaaccgtccagcggcctcgaccaccgcctctagcctccgttcccggtcctttctcccgggccgagagacagcgtcgccgacaggggctcattcccctccggttctcctcggtgactcacctcgggcgggccgttttgtctttaggggccgccttggtggggcgaggtttccgtgacgaatctcctggggccgtccgtgccggctcgggccgtcgtggcggctcgagctcctggaacttgctcaggctccggaggtccgaggccctcgaagttatgcgtcgcctccaggcggttgcggcgggcgcgggctcctaaagggcgtcacacccggactccgccgactaggcaacctccattcatctttccactgcgcctccggcgcccccgccttctccggtcccctcctcggagtcattttttcctgttccccctctgccgccctttcctcacgccccgggtgaggcaattctcttggaagcgaaggtgtcggctatgagccggagcctccttccttgaatttctccgtggaggacccgccgcgccccccggcatgggggtgaacgccgtgcactggttccgaaaggggctccggctccacgacaaccccgccctgaaggagtgcattcagggcgccgacaccatccgctgcgtctacatcctggacccctggttcgccggctcctccaatgtgggcatcaacaggtggcggtgagtcacaagcccgtgggaaatggatttgggtgtttaatgagtctgatgttaatgaattccatgcgatccgccaaatctgtgaatttagacgtgggactgtcttgcttataccgcttacgaattttaggtgccctaagtattaaatagaattgacttaatacttctctggccaaagagtactgacgacctgaaacactcggtcttcatcagtgagttatgtgtctttctgtgctaactggagctcctcccctgaatttgtggagaattcttagtgctggagttaaagaaacacctttcctgtccttagtggccattgtatatggattcccttggcctttttgtggcattcggaaggattgtgatgtttcctgtttacgtttgtgtctaggtaactcatagtatggagaaaaatcattcattcagtacagcaggctccagat

SEQ ID NO: 2763 - DNA, 6000 bp, Homo sapiens
ctatacaaatcaatattctctgcacctcccactgtttcatttggatgcttgaaaacaattcttatgtctttagacacaatctgcttactttcaaattgcctaaaaggaaacacaaaacattgtattttaaaaagtacaataatgggccctgaagaatgaagcaatccaagtgaaggcacagctctgtataccagatctgctgcataggcgaggggaggctaagtgtggtgatgacccaaggcttatcctcatcagtaaaaatgacccatatttgcttaacactttacagtgaacacagggtttcccttcccttccctcccctcctctcctcttcccctcccctccccctctcctccctaatccccctcccctcccctcccttcccttcccctctccccttctctctctttctctttctttccttccttcccctccctccctcccccttctttttctttctttctttcttcccttttctttcctttccttttcttttcttttccctccctcttcctttccttttcttttcttttccctccctcttcctttcctttcctttcctttcctttcctttcctttcctttcctttcctttcctttccttttcttgacagggtctcactctgtcacccaggctggagtgcagtggcatggtcttggctcactgcagcctccatctgccagctacatcaatccttctacctcagtctccctagtagctggaccaggcctggctaatttctttgtatcttttgtagatatggggtgttaccatgttgcccaggctgctctctaactcttgggctcaggggatcctccccagggttttcattgtattagtatgttctcacactgctaatacaaatgtacccgagactgggtaatttataaaggaaggaggtttaactgactcacagttcagcatggcttgtggggggcctcagaaaactgaccaccatggtggaaaaggaagccaatacacccttcttcacatggaggcaccaaggagaagtaccgagcaaaagggggaaaagcccttcataaaaccatcagatctcaagagaactcactcactatcatgagaacagaaagggggtaactgcccccatgattaaattacctcctgctggatccttcccacaacacatggggattatcagaactgcggttcaagatgagatttgggtggggacacacccaaaccatatcattccagccctgacccttcccaaatctcatgtcctcacatttttaaacacaatcatacccttccaacagtcccccaaagtcctaactcattcaggtattaacccaaaagtccaagtccaaagtcttacctgagacaaggcaagtcccttccacctataagcctgtaaaatcaaaagcaagttagttacttcccagatacagtggagggagttacaggcattcagtaaatatacccattccaaatgggagaaattggccaaaatgaaggggctacaagccccacatgagtctgaaatccaatagggcagtcattaaaccttaaagttccaaaatgatctcctttgactttatgtctcacatccaggtcatgctaatgcaagaggtgggctcccacctctttggcagctatgcccctgtggctttgcaggacacagcccccctcccagcttccttcacaggctggtgttgagtgtctgcagcttttccaggtgcacggtgaaagctgtcggtggatctaccattctggggtctggaggatggtggccctcttctcacagctccactaggcagtgccccagtggaaactctgtatggggctccaaccctacatttctcttctgcactgtcctagcagaggttctgcatgagagatctgccaccacagaaaacttctgcctggacatccaggcatttctatacatgctctgaaatctaggcagaggttcccaaacttgaattcttgacttctgtcaaggctgaacaccatgtggaagatgccaaggcttggagcttgcaccctcaagccatggcctgagctgtacgttggccccctttaaccacagctggaacacagggcgccaagtcccaaggctgcacaaagcagcaaggccctgggcctggcccacagaaccattttttcctcctaggcctctgggtctgtgatgggaggggctgctgtgaagacctctgacatgccctggagacgttttccccattgtcttggagaataacatttggctccaaattacttaggcaaatttctgcagctggtctgaatttctcctcagaaaataggtttttctttcttatcacattgtcaggctgcaaattttccaaacttttatgctctgcttcccttttaaacataagttccaattccaagccatattatttgtgaatatataaaactgaatacttttaacagcacccaagacacctcttgaatgctttgctgctttgaaatttcttctgccagataccctaaatcatctctctcaagttcaaagtttcacagatctctttgctaaaacatagcaaaagtcacctttattctagttcccaaaaagatcatctccatctgggaccacctcagcctggacttcattgtccatatccctatcagtaatttagtcaaagccattcaacaagtctccaggaagttccaaacttccccacattttcctgtcttcctatgagccctccaaaccattccaacctctgcctgttacccagttccaaaggtgcttccatatttttgggtatccttatagcagcacctcccagtagcaatttactatattagtctgttctcatgctgctaataaagacacactcaagactgggtaatttataaaggaaagaagtttaattgactcactgttcagcatggctggggaggcctcagaaaactgatcatcatgctagaaggggaagccaacacaaccttcttcacatagaggcaggaaggagaagtgctaagcaaaagggggaaaagccccctataaaaccatcagatcttgtgagaactcactcactatcatgagaacagcatgaaggtaactgcccccatgattaaattacctcctaccgggtccctcctacaacacgtgtggattatgggaactacaattgaagatgagatttgtgtggggacacagccaaaccatatcattcatatatataattttaaaagtattcttacagaaccaaagaaaggctgatatatacttcttgtggcaacagaagcagaagtagggaagactattcagacagattggctctctagagtattgaatttactttattgctgcactagtttgctagggctgctgtaaaaaagcaccacaaattgggaggcttagaacaataggaactaactgtctcgcagttctagaggccagaagttcaaaatcaaggtgtcagcagtgcgacagtcctgtgaaggtgctaagaaaggatctgttccaggtctttctcctagcttccagtagttccttggcttgtggcagcacagttccaatctttacatggtattttccctgtatgtatatgtatttctgtgtctaaatttctccactatatgaggccaccaatcacactggattagggtgcaccctaatgacctcatcttaacttgagcatgtacaaagaccttatttccaaataaggccacatttatagtcattgagagttatatgattttggggacacacaattcaaccaataagaattgccatctccttctttcttttaactttgccaaacacactggtggccaacagcactcactcactcactcattcattcattaaataagcatttgcctatgtcaggctctgttctggtgttgatgcaaaaaataaaaacaaaagaaaactgaatacagacccagtccttgagaaatcacacttcagagggaatcagaggcacattattatgataataagtactattactgagttggtattgctaggaatgggcacttttcaactaattttcacggtagtgtgaaaagtgatgtaacagaaacatacttggagaacccagggaggtcctaaatttgccctagggatcaggaatactttcagaaattagttattatttcatctgagtctaaagggatgcgtagaaatatcctaggtagctcaaaggtggtaatattgagtactggattccaaagaagagtattttatagaggaaaaaacagcaaaggttaagagacaaattgtaaaccccaggaggggtggggttttagtctgttttattaagtatctcctgtatctctagtgctttgaacagtgcctagttcattcaaaaagtaatcattgaatgaatttaagggcatcatatatctaagggatgccatggcctgcagttcactgtcgctggaaaagtagacaaacgtccagtttcaaagagaccggtaaactacattaaatgtaagagacgaggggtgaaaggttgatgatatatatcgctagtattaaaaaaattccaggaagtccaggaatgcctggcatccgtcctgccaattacccttttccccagagtatgtacaagggggaggaggcacccaagggccaggagagtggaggggcacagctccacaatctccaaagtagggttctctggccaaagcaggattgaagcacatggtttggacttgaaatgtacgtggagcctcccactctcctccttccactccatcctcccctcactctccgcccgactccaccactggctcctgaaggaaaccggacaatttccaggccctccccaaatcccacgggaggaatcgccgagcgcgctcctgcccgccggccccgcccccttaccctctggaacgcagcgagagcgcacgcgcgcctaacggagcagcgcgcgcgcccgcaagctccccgcatccccgtgctcatccgggtctcagcgagcctcggccaatggtggccgctcatggcccttgggggcggggctaagccttccctcacaaggggcctgtggtcaacgcgatttgcttccaagggacggccaccagtcggcacaggaaaggggcagaggcagtgagttcagcgtgtggacgagggtcaacaagtttgggatcaagcggctgccgctcctccaaaagcgaccgaagcgcgagcagattacccctccgagccagtgtagtaaacacacttcagaaacgtgaggtgccggtggtcacgaggggagcgcgccctccaatgaggagccgggggcggggccgaggccgctgacgcggcggcggcggcagagtcacccgggcagcctcgggaccggtcaccggccggcaaccgtccagcggcctcgaccaccgcctctagcctccgttcccggtcctttctcccgggccgagagacagcgtcgccgacaggggctcattcccctccggttctcctcggtgactcacctcgggcgggccgttttgtctttaggggccgccttggtggggcgaggtttccgtgacgaatctcctggggccgtccgtgccggctcgggccgtcgtggcggctcgagctcctggaacttgctcaggctccggaggtccgaggccctcgaagttatgcgtcgcctccaggcggttgcggcgggcgcgggctcctaaagggcgtcacacccggactccgccgactaggcaacctccattcatctttccactgcgcctccggcgcccccgccttctccggtcccctcctcggagtcattttttcctgttccccctctgccgccctttcctcacgccccgggtgaggcaattctcttggaagcgaaggtgtcggctatgagccggagcctccttccttgaatttctccgtggaggacccgccgcgccccccggcatgggggtgaacgccgtgcactggttccgaaaggggctccggctccacgacaaccccgccctgaaggagtgcattcagggcgccgacaccatccgctgcgtctacatcctggacccctggttcgccggctcctccaatgtgggcatcaacaggtg

SEQ ID NO: 2764 - DNA, 6000 bp, Homo sapiens
gtgggcagatcacctgaggtcaggagttcgagatcagcctggccaacacggtgaaaccccgtctctactaaaaatacaaaaattagctgggcatgatggcaggtgcctgtaatcccagctacttgggaggctgaggcgggagaactgcttgaacccacgaggtggaggtcgcagtgagctgagatggcggcattgcactccagccttggcgacagagcaagactccatctcaaaaaaaaaaaaaaggataatacttcaaactgccctaccacttaactacacacactctaagcaataatgtaacgagaaatcttgacatgaaatatcaatgttctaaacatgaaaactattgagaaaaaaacatagtattttaaaccacttttaattatacctaccatgtctgtagaagaattgaataactactttgcatttatcagatctggtgaatattctgcacttctctatatttctttcaagggaattcagacatctaaagatgggcaaaattgactgtaacagaaatatacatattaagcacatacttaacatggttgattcattttagaaacaaaagtatatgcattcataaatgaacagacttggccaggcgcggtggctcacgcctgtaatcccagcactttgggaggccgaggcgggcggatcacgaggtcaggagatcgagaccatcctggctaacacagtgaaaccccgtctctactaaaaatagaaaaaattagccaggcgtagtggcgggcgcctgtagtcccagctactcgggaggctgaggcaggagaatggcgtgaacccgggaggcagagcttgcagtgagccgagattgtgccaccgcactccagcctgggcgacaaagcgagactccgtctcaaaaaaaaaatgaacagacttggccaggtgcactggctcacgcctgtaatcccagcactttgggaggccgaggtgggcagatcacttgaggtcaggagttcaagaccagcctggccaacatggcgaaaccctcatctctattaaaaacacaaaaattagccaggcatggtggcacacgcctataatcccagctacttgggaggctgaggcacaaaaatcacttgaaactgggaggcagaggttgcagtgagccaagattgcaccactgcactccagcctgggtaagaaagcgagactctgtctcaaaaataataataataatgaacagatttgtcctgaatgccatttaaactattaagtatagaatacaggttatgtcctatataatgaatatttctacagaataagagaaaaccagggccacttatatttaccttcattcccaatttgcattttaaatgcagtgttgtgtcaagttcattttcactcattttcactaaagctgaccattgataatgctgaaaaaacacaggagagaacaggacacatccatatgctgaccgagaagaattcacacatcttagagcaagctagaaaaataagataaaaactatttaggagaggttgcgcatggtggctcccatgaacctgtaatccaagcactttgggaagccaaggcaggaggatggatggaagccaggagtctgagaccagcctggccaacagagcaagaccccacctctatttttttattttaaaaaaatttaggagaaaataaactttctttacataatagcttgattcagaaaacgtcattatgtttaacatcacagttaaatgtgttcaaataagaacatgggatgttaattatggactgccctatatagtctgtattgaatttgcatatatatacatatatgtacacctataatatatacaggacataacctgtattctatacttgatagtttaaatggcattcaggacaagtctgttaatttattatacacctatatatatacatacatataggtgtacatacatgtatatatacaagcatgtacgtatatataggtgtatacatatatgtatattatattgaatacatatatgtgttaaatctaaaagtttacatgttgaaaacataaaatagtaaatgcctacaggggccttaactttcttttaatttcttttttactttttttcaaaaaaccagcctgttggccaggctggagtgcaatggtaccaccgcagctcactgcagcctccaaacccctggcctcaaccaatcctccctcctctcagccttccaagtagctgggactacaggcacacaacatatcacccgactaatttttaaaatttttttgtagagacaggtagtgtcttgctttgttgctcaggctggtctcgaactcctgggctcaagtgatcctcctgtctcagcctcccaaagtgctgggattacatttgtgaactaccacacccagtcatgagccttaaccttaatgtgtgaaatggcaaaaggcaatatataagggagttgcaatatataagggagttacagcatattggcggtctcacaccttgtctaagcggggaaaccattactcagtttcagccaactacttccacttgggaatgaatgcagtcccaaaactgtcaggtcttctgaattttcaagagaagcaggaaaaatttgactcaattttttttttttttttttttgggacggagtctcactctcactctgttgcccaggctggagtgcagtggcaccatgtcggctcactcactgcaacctccatctgctggattcaagcaattctcccacctcagcctcccgagtagctgggattacaggtgcccaccaccatgccaggctaatttttatatttttagtagagaaggagtttcaccatgtggaccaggctagtctcgaactcctgacctcaggtgatccacccacctcggcctcccaaagtgctgggattacaggcgtgagccatcgcgcccggcctcaatttttaaatgttggaaattatttcaaattaaaaaaaaaaaaaaacagtgcaggccaacaaacattcctgcagaccgtagctagtctcttaactaccagtttgtgacttccagtttaaatcaatcaagcttatctgcatattttcaactttaccatgctctaagtgtattcagatatgtaaaataaagataaacagtgaaagggataattacaatttctggatttcctagttaacattcaatctggactgggatctttaaacatctcctcttgccttgatacgtgatctgttaactttcttacttacaccttttttagatgggtctagccagaactcgtcactaattcgtgatagagcttgaactgctttcccaaatactatggagaaaaagaaaggtgatgcttatattctttccctctaacaataaaaacaaatcacaagactagttcagcattcagaggactcaagagaaattcaaaaataacagtatcttacagactaatgctacattactttaatacagtataatacccttggcaaaatgccagacacatagtcagggctcaataaatttgtagtgtgtgaaatgataaaattgaccgaaatttgtccttctatatgtttacagtgttgcatggagctactgtgcaaaccaatttccatactaatgtattttacaacttgatttagataaatgtatttgaccccccaaaaactgtgaaaacagtgcatggagaagataatctgaagtggttttaatagcttgatagccaagtcacaacaagtcatgagagagaaattaggggtatccaacatacatctctgatgtttgagggcagccagatttccccaccacagaacacatttagggctggaaaacacactagtctgatcccgtacgacattgttaatgttctttttattttttattttttttgagacagagtctcactctgacactcaggctggagtgcagtggcacgagctcaactcactgcagcctcaacctcccgggctcaatcgatcctctcgcctcagccttccaagtagcttgggattacaggcgcccaccactaagcccggctaatttttgtatgtttagtagagacggggtttcatcatgttggtcagggtggtctcgaactcccgacctaaggtgatccacccgccttggcctcccaaagtgctaggattacaggcgtgagccactgcacccggcctaacttccattttgaaagcgccgtttacaacactaatagttcttgtacattccatctattactgggctctttacacgcatttccatttcattgcctccaaacaaactctgtgacgaaggtgctgtcattacccctgtttccgttttagaaactgagccccaaagagatttagtgacttttccaagttcatacatttttaaaaatggtagaatctggggaaaaaaaaaaccaggttaatgctgttctcttggcacaaaaatacttttactgtccaagcattatttttttctctcaactcttccccatgcagtcctcagcatcccgagtttgtggcccgatggtacaactctatttcccggataccacccatattacatctgcctctaagtcacacgagatgggtcctcatcctcccctcagaagttaacagggacttgagtgggtggggctgtggccagggcgtgcgtcctcagtcattgcgcaaaaaggcaaagaggaaaaattagacaatggtagggacgacctattaacgtctgcttttctctctgctaaatgggaagacaacaaaggccgctccacctttcacctgactgccgctcatcacgcacttcagcatggctgccatccgccctaaaaagcaggctcggaaggcgcgcctcagctcgacggcccaggtgcccggatgttgcccgcgcttttcaaagcttcgcgatctcgtctctgcactctaccaccccgcctccacaagttcccaaacggctttacggcggagaagggtccgtgcgggcctccgtacggcaatttctgtctccctctgctctcattggttgcggttaagtgggcgggtcgccgaggagcctgaggaagagggcggcgacggtggtggtgactgagcggagcccggtgacaggatggtgagggctgcagttgcggcgaccaaggcctggctctcgggtggggtgctgcgttgttgggagccgtggggaggccgagggcgaggaattgggaaatcccggaggcctcggcgtcagggcccaggcgctggcctgggaaaggcccagaagaggtctagggaaggaagggagcggccacctctgggtgcggctggcctaggtctcgtatcccggccccaaggggccagaggccatccaaggggtaaaaaggcccctctagcagcccgacctgtcacgagacacgcacgcccgagccagggaaggcctttggtcctatacctcgaatgttccggggataggggcacggtcctccgtttccagacggttcctactcgtttcccgcaaaaagcacctcccgctggttggggtgtagtggtggaagctggcctctcgaatgcagaacaggaagtagcgagcagaatttcgtacccgtttaactttgccatctagggaaagggaataaaccaccctcctcgctcctgaaataacatctagctgccattgagatgagcaggtgtgctctcagagggcgggatttggcgcttgcaattgctggaactgtttctttccacgggttgctacgcctctttagggtaggattccttaatgatgtgtgaactcattgaaactgttgggaaatttttgtgaatatacacatttttctggggagagtgccggtgttggagacttacctagtctcccccagccaccttcaagcaatcaccccttcacccccagtagtttggtgcccctcagaccttcctacataaaaactgggggcctctactagagaggactcagagctgtaatcatattttctttctttctttttgagatggagtctcgctctgtcgcccaggctggagtgcaatgccgcgatctcggctcactgcaatgccgcccgggttcaagcctcagctc

SEQ ID NO: 2765 - DNA, 6000 bp, Homo sapiens
agtagctgggactacaggcgtgtgccaccatgcccagctaatttttgtatttttagtaaagatagggtttcaccatgttggccaggctggtctggaactcctgacctcaggtgatccacctgcctccgcctcccaaagtgctaggattacaggcatgagtcaccacgcctggcctaatttaaaaatttcaagatttgagaaacaacattaatttagccatttaacagaatactgttagaaagatcatttaaaaatagtatctgtctggctgagtgcggtggctcacacctgtaatcccagcactttgggaggccgaggtgggcagaatacttgaggtcaggagttcgagaccagcctggccaacatggtaaaacactgtctttactaaaaagaaaaatacaaaagttagctgggcacggtggcaggcgcctgtaatcccagccaacttgggaggttgaggcaggagaattgcttgaactcaggaggcggaggttgcagtgagctgagatggcactggcactggcactggatgccactggcactccagcctgggcagcagagtgagactctgtctcaaaacaaacaaacaaaaaaatagtatctatcctccaaaggacaacagaatcgattttttttttttttttttgagatggaattttgctctcgtcgcccaggctggagtgcaatggtgcaatcttggctcactgcaacctctgcctcccaggttcatgcagttctcctgcctcagcctcccgagtagctgggattacaagcgctctccactacacccagctaatttttgtatttttagtagagacagggtttcaccgtgttggccaggctggtctccaacatctgacctcaggtgacccacctgccctggcctcccaaactgctaggattataggcgtgagccactgcgcccagcccaacagaatcagtttcttcatgttgatcagtataagcaccttcattctatacaaaatgttttcctttacagatattgcatgcataaatgtacatgccctttaactgcttttaaaggcatgactattctttaatattatcaaagaaaccattaaatagctaataggataaaacaaaatagttttgccactgcagactttgtaaatgaaaattaatcaaacaaacaaaatgtatgaaattaaaatgattaccaaaagaagcttgatttatcttgcaacaaaaattaaaattattgcaaagaaaaggaaccgttaccaggacacagagttatcgggacatagtttgtaatctcaaagtaacacaaggttatgaaattagcacactttaaaattgttaagtaagattcttctttataaagactagtttcagcaggtatttgttgtatgacctatattaattgtttcaatgcagatctcagtggacaaaacatctgtaaaactaaaaaccactatgaagtttccaccctcactggtaatcaacataaaagtacctggatatagaacaatcttcattttagagggggattccttctgatatggattgaagtacatagttagtatgggaatcttgctttgagaaaaaggtaaaaataatagatttctatatttaaaagaagaagaagaacaacaacaacaaccaccaccccaaactcataaaagggtatatgtctacaacaggttgaaatgtttggtactaataatgaatgagctgttcaatctgaatgtaccagaaagaacattagtaagacatggtactttataatgattgatgacctaattctataaagtactgtggattatctccaagactcaagactattagcagtctaaagatataactgtatgaatgaccacacaatcatttcaaattagtagggatccttactaggacagaatcctctggtttcctgctgatgacaaagttatggggaaatagtgttacataacacgtgtcatactttgaaacatgttcccgcccaaattccacactttgacaaatcgggatagacatagatgatagagtcctttaagaaagcaaaagatcctggaaatggcagtcttattaaattaaaataaagagccaacccaatcaaagcatgggaattcggttacttcctttcaacagaccttaaaagggtaagaaatccagtcagtaaacagccacccaaccaccactgttagtaggagctaagtgaagaaacttactctgtgcccagccttagtggaatgaagaagttgattgcagacaggggggatgaaaaaaaaagggtgaaacatgaccaatgttaaaagaaagcaacaaaaagaaaccaaaaaaaaaaaagagaacaaaaaacccataccaaatgagcaaacaattgttaatgatttctgagtgttatgaaagaaaatgttaaaaatcagctgtgctcaaaacaataccaaaataaatatttgctttatttttgaacatgacacacacactttttaataaatttgtcttgtcagtttctcctacttttcctaatcttgttctgtacatcgacttccatctctgttttccattctgtttagatttttataagattttataaaataatgaatttggatttctacaagacactgtggaaaatttatcatcagtaatagctgaaaggctaacattttctggattcttagggtttaattattcaagtatatggatgttaattatcttacattcaaaattctagtagctggaaaattatgctgcggctaggtgattttttgtagctgatgcaacacagcaccatgaatacattatcaagtgttgaacaaatcaactaaaggtgaagacaaaataataaaaacaaacacatttattcaggtaaaactggacctttcccacacttgaatttgctgcccacagactctggacactgtactgagtgttgaacgtctgtatcctttgccaaataaaatgcttttaatcatgaaagaactggctaatgctaaatttttcccagttctatttcatatgaaaaatgatgttccagtacaactaccctaaataagagggatcacttctcaaacaacttgagaaacattaatattttgaaaccatggcaagtaattatgtcttctcccatggataggtgtctcgaaattactgtaaacggattactttaaattggagtctgtttagaagcaaaaattaaaagtgagattaaagattttaaagaagcatgcaccataaatctctggctgccatgtctgtaagtccccctcttgaaaaggctgtttgtcatgcaatagtaataatcttaaaaatgcatagcttctttggtttccttgtaaaaataaaaaagaatgcaataaatgcctgtcagaggtagacgtccctttacagccaacctccatcaacacaaatatgaagataatcacagctccatttcaaacaattgattttttttttttttttgagcagcagcaagatttattgtgaagagcgaaagaacaaagcttacacagggtggaaggggacccgagtgggttgccccaaacaattgactttttaagagtcaaaggcacctttgaaaatatgattacaggccgggcgcggtggctcacgcctgtaaccccagcactttgggaggccgaggcgggtggatcatctgaggtcgggaggtagagaccagcctgaccaacatggtgaaaccccgtctctactaaaaatacaaaaatttagacgggcttggtggcgggcgcctgtaatcccagctactcgggaggctgaggcaggagctgaggcttgaacccgggcggcattgcagtgagccgagatcgcggcattgcactccagcctgggcgacagagcgagactccatctcaaaaagaaagaaagaaaatatgattacagctctgagtcctctctagtagaggcccccagtttttatgtaggaaggtctgaggggcaccaaactactgggggtgaaggggtgattgcttgaaggtggctgggggagactaggtaagtctccaacaccggcactctccccagaaaaatgtgtatattcacaaaaatttcccaacagtttcaatgagttcacacatcattaaggaatcctaccctaaagaggcgtagcaacccgtggaaagaaacagttccagcaattgcaagcgccaaatcccgccctctgagagcacacctgctcatctcaatggcagctagatgttatttcaggagcgaggagggtggtttattccctttccctagatggcaaagttaaacgggtacgaaattctgctcgctacttcctgttctgcattcgagaggccagcttccaccactacaccccaaccagcgggaggtgctttttgcgggaaacgagtaggaaccgtctggaaacggaggaccgtgcccctatccccggaacattcgaggtataggaccaaaggccttccctggctcgggcgtgcgtgtctcgtgacaggtcgggctgctagaggggcctttttaccccttggatggcctctggccccttggggccgggatacgagacctaggccagccgcacccagaggtggccgctcccttccttccctagacctcttctgggcctttcccaggccagcgcctgggccctgacgccgaggcctccgggatttcccaattcctcgccctcggcctccccacggctcccaacaacgcagcaccccacccgagagccaggccttggtcgccgcaactgcagccctcaccatcctgtcaccgggctccgctcagtcaccaccaccgtcgccgccctcttcctcaggctcctcggcgacccgcccacttaaccgcaaccaatgagagcagagggagacagaaattgccgtacggaggcccgcacggacccttctccgccgtaaagccgtttgggaacttgtggaggcggggtggtagagtgcagagacgagatcgcgaagctttgaaaagcgcgggcaacatccgggcacctgggccgtcgagctgaggcgcgccttccgagcctgctttttagggcggatggcagccatgctgaagtgcgtgatgagcggcagtcaggtgaaaggtggagcggcctttgttgtcttcccatttagcagagagaaaagcagacgttaataggtcgtccctaccattgtctaatttttcctctttgcctttttgcgcaatgactgaggacgcacgccctggccacagccccacccactcaagtccctgttaacttctgaggggaggatgaggacccatctcgtgtgacttagaggcagatgtaatatgggtggtatccgggaaatagagttgtaccatcgggccacaaactcgggatgctgaggactgcatggggaagagttgagagaaaaaaataatgcttggacagtaaaagtatttttgtgccaagagaacagcattaacctggttttttttttccccagattctaccatttttaaaaatgtatgaacttggaaaagtcactaaatctctttggggctcagtttctaaaacggaaacaggggtaatgacagcaccttcgtcacagagtttgtttggaggcaatgaaatggaaatgcgtgtaaagagcccagtaatagatggaatgtacaagaactattagtgttgtaaacggcgctttcaaaatggaagttaggccgggtgcagtggctcacgcctgtaatcctagcactttgggaggccaaggcgggtggatcaccttaggtcgggagttcgagaccaccctgaccaacatgatgaaaccccgtctctactaaacatacaaaaattagccgggcttagtggtgggcgcctgtaatcccaagctacttggaaggctgaggcgagaggatcgattgagcccgggaggttgaggctgcagtgagttgagctcgtgccactgcactccagcctgagtgtcagagtgagactctgtctcaaaaaaaataaaaaataaaaagaacattaacaatgtcgtacgggatcagactagtgtgttttccagccctaaatgtgttctgtggtggggaaatctg

SEQ ID NO: 2766 - DNA, 6000 bp, Homo sapiens
ggtgccaggcgcctgtaatcccaactgctagggaagctgaggcaggagaatcacttgaacccaggaggcagaggcttcagtgaaccgaggttgcaccactgcactccagcctggatgacaaagcaagactccatctcaaaaaaaaaagaaagaaagaaaaaggccagtattcaaaaaaccagatttacagcaaccaatccaaaagggcctagtcaagttgaacaagcataacaatgtctcctctgctttaatcttataaggaaagtagctttgaaatgatcagttcactttctagcctgtgtttctgccttctttagttcttctgcatacaaaacccatcccttgctcagctcgctggagcacctttctgttttacagatgggatgctgcccaattcatgaattgaaaataaaagatggctgggcacggtggctcatgcctgtaatctcagcactttgggaggctgaggtgggtggatcaacggaggtcaggagtttgagaccagcctgcccaatatggggaaaccctgtgtctactaaaaatacaaaaaattagccaggcatggtggcaggcacctgtagtcccagctactcaggaggctgaggccggagaatcgcttgaacctgggaggcagaagttgcagtgagccaagattgcccaactgcactccagcctgggcaacaagagtgaaactccatctcaaaaaaaaaaaaaaaaaaaaaaagcagaaaataacagacaatgagatcattaaattcaatttgataaaattttgtttttagacagcatccattgtgtttcttagaaagtgaagtcctgcggctgggtgcagtggttcatgcttgtaatcccagtatgagccactttgggaggcaaaggtgggtggattatttgagcccaggtgttcaagaccagcctgggaaacatggcaaaaccctgtctctacaaaaaatacaaaaactagccgggcgttgtggcatgcgcccacattcccagctactagggaggctgaggcgagaggaccacttgtgccctagaggtggaggttgcagtgagctgcgatagtgtcactgtactccagcctgggtgacagagtgagatccctctctcaaataaataaataaataggaaatcaaattcctggagtgcttgaggactgagaagcagggtagtatagtgatatgactctcaaacctgagcgattcagaatcccctcaagggcttgtcacaacacagatggctgggccccagctgtgaagtttaagatgtcttgggtttgaggtggtgggaagaataattagaatgtctaacaagttcccaggggctgctgttgatgctgttgtcccagcatgggctatatagaatcagactatattagcaagatccagttctgccccttacaagtgagaacctaagcaaggtacctaacatatctgcaaaatggggccaatgatagtaacttgggcttcttgtaacaattgagtgatcataataaacgtaaagtgcttagaacagtgtctcggccatagaaactgcctaatggatatgagccattttcattcattcattcatcaaacagttatgagttgagtacttcctttgagccaggcaatgtttcaggccccagaagtacagtggtgagtaagtcaaggttctcctccaatgagcttacattccattgggaaggcatacaatagatgactttgcaacatataatctaatgtcaacacaggagaattctacattccaagttaacggaacagcagatgcacacagagttttatgataagttgttctgttcttttttgaatcttccagctcaaggaggtggcagcatcatgcttctaatgcaaaggtccttagaaggatggttcttaccatgaatggctcgtaccatgatggtaaggatggccttaaccatcaataagggcagattatggcatagttccactagccaatcctttgggttttgtttcagaggacaaatttgaaaccagaacagtttgggtggagagtgttaggagggaagggaagagtagggtggcgatgtattggatgctgcacatttgttctttcatttaatccttacaacaatctttgagtaaatattattggataaggagagaagaaacctgcccaaggctaagtggaaaaagtggcatcccaccccaagggtacctaatgcttggcaaggagcaaaaccactgaagggagaacaaatcatgaacaaagagagaaggatccagagtccacgtggccatcttcaaaagtttgcctttgccttgcaacttaaattgcctttctcatgagaagcaaaaacattcaaatgcaccattttcctggcatgtaggaatgctttggtctacatgttcactgcactgattctaataattctttagcctttataattcttttcattctcctggaacacttgaggatttggggacttgcttaggtttctctccataggctgtgtaaagatttttagagttgaactgattcgaggcaggtcttctgacacccaaagcaatgctttcttgatgacttctcctttagtttcaaaagccactgtattagtccattttcatactgctataaagaaatacccaagactgggtaatttataaaggaaagagatttaattgactcacagttctacatggctgggaaggcctcaggaaacttacaatcatggtggaaggcgaaggggaaacaggcaccttcttcacaaggcggcaggagagagaagaaagagtgaagtaggaagagctctttatcaaaccatcagatcttgtaagaactcactgactatcacaagaactgcatgggggaaaccgctcccatgatccactcacctctcttcctggacacctggggattacaattcaagatgagatttgagtggagaaacagagccaaaccatatcagccaccctttaggattttaccccagtgtgaagcctgcgtctcaacaattagatcgttggtgaggagggtatagcaccatttatttctttagtaatctttcataattttgcttagttattgtatcagttgttttctaaaattgtatcagctgttttcctttatttttatacccatcacttgtattttatgccttttaaaaaacagaagtgggctgggtgtagtggctcatgccaataatcccagcactttaagaggcccaaggcaggcagatcacttgagccggggagttagagagtgtagtgagccgtgattgtgccactgcactccagcctgggtgacatagtgagaccttctctcaaaaacgaaacagaacaaaaccccaggagtgttcaaagaccccagaatttggcaatacatgacaaatatttaatgtgtttctataactttaattcagaggcatctatatctcacctcagcatgtgtcagcaaattaattgtaaacatgtgctgatttttagccttagtatttaagaaaaacttgttaatcatttatgattcccttcctggagataaaaatgaataaaaccagttttatcttaaaagaaagaaagaaaagtttaaaaatggcatgctaatgatctaagcccccagtgttaaagtttcctgggagcaagcagagtaggggcactgtcacatcacaagccctagctgatccccttcttcggggtccccaggcaggggctagggtgaagccataactgccatcacatacttgccactgtccctctgctgtgttcctgaagcaggtgacagtgatgtaatcctatgcaaagagtattgctacctcctaatcagaacactgctgaccccaggccagcctcaaaaatcctccaggatttttgtcttcctcatcatgttaaaagaaaaaaaaaaagaaaagacttcaatatggatgctttgcatgctcattgctggaaaatacagaccaggccaggcgcagtggctcacgcctgtaatcccagcactttgggaggctgaggcgggtggatcacttgaggtcaggaattcgagaccagcctatccaacatggcaaaatcccatctctactaaaaatacaaaaattagccaggcgtggtggcgcgcgcctgtaatcccagcttctccggaggttgaggcagagaatcgcttgaacccgggaggcagaggttgcagtgagccgagatagcgccactgcactccagcctgggtgacagagcaagacaccaaaaaaaagaaaagaaaatacagaccaacaaaaaagaagaaaataaaagtgatctagaattctcctcgcctcaggaaaaaaacctaaaatgttgatatcgattctcctcagtatctcagatcacaaggaccttgtcctctgtgttcatgaactagaccttccagcgacacagattaacccaactggaagtttctgtttgtttttctctggagtcgttttctggaggttggttccctaaactttttgggcgaggggcacggattccggagataggtaggttgcagttgtgtttgtttggggttgttttcatttccaaatattcacctcccagcttgggggccgagaggtatctcaagccttctttcgcaaaggcatctatattcaagacccagccgttttactcggtgttgttttttttcttagatttttttttttttttttgagccccggcagcttttgttcctttgaatttaagtgtttgaagcttggcgatggcaggaattggctttggccttgagatcttaatatgtaatgatgactggggctgcagggggccctgcctctcccgctgccctgctctggaagcgcctgggtatctgagagttcagagcaggctggaggggcggagcttggagggacgctggcggcccgcgcctccggtaacctagcaaccgacgccctagcaacgcgagggggcgggaccgagggaggaagtcggaaactggtggccgcgtctcgcgagagttgcttttgcgcgcgaactgtaagtgccagggtctcagggtcaggtcgcggctggtcactgtgcaggcgcttgggtgacgcgacgatctcagcggatctggtcaccttcgtctccccgccatggagacctcagcactcaagcagcaggagcagcccgcggcgaccaagatcaggaacctgccctggtaggaggaggccgagcggcggcggtgggcagagggggccaggcggccgcgcggggaggaggtggctggggtggcaggtgaccggaccccaacccgacctcttcccgtcgtctccaggcctgcagccgggaccgacctgcagaggtttcccccgacaccccccagctacccagactcgtccgttctgtttagggcttttgccagttctcaccctttcacccccagctccatttgccgaagaagaaggcggctttcgcacctggtgacagcacaggggttcgatcccgcgtctcctgacgcctgcaatggcctccatgccaaaatgccctcttcccactcttcaaaacctgcgatgcgactattggtcacattttaaactagtaataacgctccctggtcaacttttattgaatggcatattattagattagcagacgccctgttagatgttcgatccttacaaagaccgtaggaggtaggcaccgcttcaaattttacacaggaggaaactgcattttagaaagatgtaatgacttccctatggtccaagggagaaaattggcttggaggtgaatctaggaagtctgaattcagatcttgtactcttaaccatcctacttaaacagctatgttctcgcaatgcttccaagactttgaagcaatttggcttggcttcgaaaagctgcaagttgtcattgtctagtaactagttcaatttgtctttattgtggttaaaaaaaacccagaagattgacagttgtaactattttatgtatttacgtattttttttttttagagacagggtctcgctctgtcgcccatgctggagcgcagtggtgtgatcacagctcagtgtaacctcaaacattggggttcaa

SEQ ID NO: 2767 - DNA, 6000 bp, Homo sapiens
ttctcctgcttcagcctcccgagtagctgggattacaggcgcctgccaccttgcctggctaattttgtatttttagtacagatggggtttcaccatcttggccaggctggtcttcaactcctgaccccatgatccacccacctcagcttcccaaagtgctggaattacaggtgtgagccaccgcgcccagtctacctttttttttttttttttgagatggagtcttgctctgtcgcccaggctggagtgcagtggcgtgatctcagctcactgcaacctccgcctcctgatttcaagcaattctcctgcctcagccttcagagtagccgggattacaggcatgcaccaccatgcccggcaaatttttgtattttttaagtagaaacagggtttcgccatgttggccaggctggtctcgaactcctgacctaaagtgatctgcctgcctcggcctcccaaaatgctgggattacaggagtgagccattatgcccggccaagtcagggcttttatagctaagatgcctactacctaaaacatttaagcaacttggcctcctgcaaagaaggatggtgagaagaatggccattatgccatcaactaggtggtgacccaagagtacaccattaatattcacaagtgtatccatggagtgggcttcaagaagtgtgcccctcaggctcttaaagagaccggaaatttgcaatgaaggagatagaaaactccagatatgtgtattgataccaggctcaacaaagctgtctgggccaaagtagtaaggaatgtccatactgtgtccatgtgcagtggatggtccagaaaacataatgaggttagaaattcaccaaataagctctatactttggttatatacttgttaccactttcacaaatctacagtcagtgtggatgggaactaactgctgatcatcaaatacatcaaatgaagttataaaaactacaaaaaaataaaaaataaaaggtttaatacttgtcttcactttacattctgtgtgttcaaagcattaaagtcctacagatgtcacattaaaatgattaatgggaattattaacccaaactggtttccaaatttatgaaaaacagtacagatcactgaatacgaggttgagatgctagctactggatccaaattcctcatcttttttcacgaccttttcccttattaatgatggttatatttctttgtatttaccctctagataacttggggaaattctgatgactctgtgcttctagtccctcctttcctagagatattaataaagaacactgggaccgggcatggtggctcatgcctgtaatcccagcactttgggaggccaaggtgggcagatcacctgaggtcgggagtttgagaccagcctgaccaacatggagaaaccctgtctctactaaaaatacaaaattagctgggcgtggtggcgtgcacctgtaatcccagctacttgggaggctgaggcaggagaatcgcttgaacctgggaggcagaggttgtggtgagctgagatcgcgccattgcactccagcctgggcaacgtgagcaaaactctgtctctaaaaaaaaaaaaattcattaaacatttactgtggccgggcacggcagctcaaggctgtattcccagcactttgggaggctgaggcaggcagatcacctgaggtcaggagttcaagacgagccttgccaacatggtgaaacccctctctactaaaaatacaaaaattaaccaggcatggtggtgcatgcctgtaatcccgggtgctcgggaagctgaggcaagagaatctcaaacccaggaggcagaggttgcagtgagccgagatcacgccactgcctccagcgtgggcaacagagtgagactccatctcaaaaaaacaaaacaaaacaaaacaaaacacatttactgaatactcagtgccaaccactgagaacatgataaggaaaaacagacatgctgtggaaggtgggtgagcaggagaggggcagagactcaacacatcccttaaatagatgtataaacgcatgtataaatcagcccttttggatatcacgagagccacaggtagagaacctaagtatagccaggcacagtggctcacgcctgtaatcagcacctttgggaggctgaggtgggcagatcacgaggtcaggagatcgagaccatcttggctacggtgaaacctcatctctactaaaaatacaaaaaattagccaggcgtggtagtgggcacttgtagacccagctacttgggaggctgaggcaggagaatggcatgaacccaggaggcggaacttgcagtgagccaagatcacgccactgcactccagcctcagcgacagagcgagactcttgtctcaattaaaaaaaaaaaaaaagaacctaagtataaaagaatgaagacttgtggctcacgcctataatcccagcactttgggaggccgaggcgggtggactgtgaggtcatgagttcgagaccagcctggccaacatggtgaaaccccgtctctattaaaaatacaaaaattagctgggcgtggtggcgggcgcctgtagtcccagctactcgggaggctgaggcaagagaatcacttgaaaccggaaggtggaggttgcagtgagctgagattgcaccactgtactccagcctgggtggaagagtgaaactccgtctcaaaaaaaaaaaaaaaaaaaaaggaatggacttttttggccagtgcagtgactcatacctgtaatcccagcactttgggaggcgaagatgggcggatcacttgaggccaggggttcgagaccagcctggtcaacatggtgaaaccctgtctctactaaaaatgcaaaaactagctgagtgtggtggcgggtgcctgtaatcccagctactccggaggctgaggcacaaaaatcacttgaacctggagggtggaggttgcagtgagccaagatcatgccactgcactccagcctgggtgatggggcaggactccacctcaaaaaaaaaaaaaaactttcttgaggaagtgggaggctgaggcaggaggattgcttgagaccaggagtttgagaccatatggggcaacatggcaagaccccgtttctacaaaaattttaagtattagccaggtgtggtggtgcacacctatagtcccagctatttgggaggctgaggcaggaggatctcttgagtctagaagtttgcgaccagcctgggcaacatagtgagaccccgtcccaaaggaaaaagaaaattgcaaagtagagaagacatttgaaagaatcaaacacggccaggtgctgtggctcatgcctgtaatcccagtactttaggaggctgagatgggtggatcacctttgctcaggagtccagacaagcctggggaacatggcaaaatcccgtctctatcaaaaatacaaaaaattagccaggccaagtggcacgcgcctgtggtcctgtacttgggaggctgagatgggaggctctcttgagtctgggaggtggacattacaatgagctgagatcatgccactgcactctaacctgggtgatagagtgagactccatctcaaaaacaaataaaataaaaattcaaggcaggaataaaacagtaactacataatgagctcacattttaataaaagagatataacaaatgaacaaaagtccattaaaatgttagggaaaaaacccaataggatgagttactaactagaaggggagaagggatttggagtggttaggagagccctttctgagaagataagctgagacctgtgccaagagggaggcagccatgcaaatactgagaggaaggaaaaaaacgaagggccagtgcagagatctagagaggaaaagaacttgtcttgctggagaagcagtcaaggtagccaaggagagtactgagaagagtacgttggagtgagtaggtagggactctatggagtagggccttaaaggcgatgattaggccaggcgcggtggctcacacctgtaatcccagcactttgggaggccgaggcgggtggatcacggtcaggagttcaagaccaacctggccaagatggtgaaaccacgtctctactaaaaatacaaaaaaaataagccgggcctggtggcagtcgcctgtaatcccagctactcgggaggctgaggcagagaattgcttgaacacgggaggcggaggttgcagtgagccgagatcgagccactgcactccagcctaggcaacacagcgagactccgtctcaaaaaaaaaaaaacaaaacaaacaaacaaaaaaaaaaacaaaggcagtgattagcagttcgggttttgtttccacttacactagcgagagcatcagtaatgaacaaggggaagagtgaagccactgactcgcgaggtgactgtgggcaagttcctgaatcttgctaacactctttaaccccctggaaaactgttcgctaatcgtcacattaaacggctgcgaacgggccacggtcaaggcttcggggctgcagccgcgagtttacctgtcctccaggaccgattccatgggctccaccccgtctgtgtccacggcgcgtagccggtcggcgaaggcgatagctttctccagtcgcgccactgcctcgcggctgccgaagtccacaagcgctagacgctccaggtgctcgatcaccgcagccgtgatccggccactgccctggaggagggatgaggcggggagtgtgggtcaccggcgctccgaagtgcctcccggcttgctccgccacccgcctagatggccctggcctttacctgaggatccgccttggaggtgaagccctggcgcccgcccagaggggcccgaaggcccagccacaccaaccgcgaccacatttcttccttccttggcccccgcagtgcgcccgcgcgtaacgccgagcgacgcgcctgagagtgatgacatcagagtgcgccgtcgtcgccgccgccaccactgtcgccatgaacagtgtgggggaggcatgcacggacatgaagcgcgagtacgaccagtgcttcaatcgctggttcgccgagaaatttctcaagggggacagctccggggacccgtgcaccgacctcttcaagcgctaccagcagtgtgttcaggtgagccctcccgcctctgttcccaggccctgcattctcggcgctgtgtcccaccacactcatcgtattttacggggattgggactggactggaagggtggagaaaagtcgcagtgaggccagtggcaggagctcgctcccctaccatcaccaccgaggccacttgggtgtctctccgaatgacaaatattggggcagtgcttttcaagaagcacagtcacatcctttggttcatttggtgttcaccctaaactcgcaaggtgggcatagttactcatattttatacataaaaaactaacacccagaaataggaagtgattaatccgagttcactagcatcaggtttccttggttctttcgcaggtggtgcacttttccactattactgctggggtctgggcgggattatacttcagaattcagactggagggtcacatttttttgttgttataaacccttcgttagcctgtttctctctcttgaccagtccccgcaactgcagccaggaaatgtttattctggcccaatggatgtggaactgctttgaattgttaagaacagcaccgggcaaagcacttccaataagttaacccaacacatcctcacagcaattccccgaggtagttgctgtcttcatcccatttacagttagtcacatagccagtaagtcctggaacccagatttgaacctaagtctttcactaacacaaagtgatgattatttttcaaatttcacttaattttaacggttccctcacaactccttttccagtctccctcaggtcttacacttgatttattcattatggtacttctggtttttatttatttttgaggcagagtctcactctgtctcccagcctggag

SEQ ID NO: 2768 - DNA, 6000 bp, Homo sapiens
ctctctgttgcccaggctagagtgcagtggcacgatctccactcactgcaagctctgcctcccaggttcaagccattctcctgcctcagcctcccgagtagctgggactataggcacccgccaccacacccagctaattttttgtattttcagtagacacagggtttcaccatgttagccaggatggtctcgatctcctgacctcgtgatccacccgcctcagcctcccaaagtgctgggattacaggcgtgagccaccgtgcctggcctcgaatgtgtcaagttcttactttgaggtaatctccttcagggctggtagggtcagaaatcttaagagaaacaaagggagcgtgacacatttctgcttattggcttttctgtggaattaaaactatcctgctttaatggatagtaaatggtagtagtagtagttacaaaaccactctgagagggcaattattattattattattattattatttttttttttttttttttttttttgagatggagtctcgctctgtcgcccaggctggagtgcagtggcgggacctcggctcactgcaagctccacctcccgggttcacgccattctcctgcctcagcctcccaagtagctgggactacaggcgcccgccactacgcccggctacttttttgtatttttagtagagacaaggtttcacatgttggccaggctggtcttgaactcctaacctcaggtgatctgcccacctcagcctcccaaagtgctaggattacaggtctgagccactgtgcctggccagagctggtttattttattttattttattttttgagacagagtttcgcttttgttgcccaggctggagtgcaatggcatgatcttggctcaccacaacctccacctcccaggttcaagcaattctcctgcctcaccctcctgagtagctgtgattacaggcatgtgccaccacacctggctaattttttgtattttaagtagagatggggtttctccatgttggtcaggctagtctcaaactcccaacctcaggtgatctgcccacctcagtctcccaaagtgctgggattactggcgtgagccaccgcgcccagccagctggtttattcttaaggctcaaaggaacactttcgtggtaaggttcaagaggcaacaaggtatttcatattatattacattaaactggtaacgcaaaagtaaggcatatacagtacggaatagagaatctcattgtctttgccattttgtaataattaacggaatagagaatctcattgtctttgccattttgtaatattacagcctgcacttctgagtccctatagagctgttttggttgtggccagtctgagtttaggacagatgcattatacttcagcttgctgcctggcctcccttggctgggttccaaacatcttttataatccttggataatggaccctagccagtcataaaatataaatgaagaatgttttgaaatgacattaaggacaagtcacattaaatatgatgtagcaattggtaaagtggagaaaagacaatagaattagggccttctataaatcaagtttcttggtttatttttcagacagggtcttgctgtgtcacccagcctggagtgcagtggtacaatcacagctcactgcagtctccacctctcaggctcaggtaattctcccacctcagcctttagagtagctgggactacaggcacacaccaccatacccagctaatttttttgtagagacagggtttcgctatgttgcccaggctggtctcaaattcctgagctcaagtgatccgcccatcccagcttcccaaagtgttaagactacaggcatgagccaccatacccggcctgtaattcaagtttcatactactttgggtatctaataaaaccaaattactcaattaattgtggggattacgtgacattctgaggtaagtaagtgctctcctgatccttttttggtaccgtagtgtatttgtatagcctattgtggaaattttagaaatcagtgaggttttggctgggtgcggtggctcatgcctgtaatcccagcacttcgggaggtcaagagttcaagaccagccaacatggtgaaaccccatctctactaaaaatacaaaaactagctgggcatggtgatgcatgcctgtaatcccagctacttgggagactgaggcaggagaatcattggaacccaggaggtggagtttgcagtaagacaagattgcgccactgcactccagcctgggtgacagaaccagactgtctcaaaaaaaaaaaatgtgaggtttctgattgccatactgtaccacctagcttaagacaagtcactttttcttcacctttaagttacaaaacacaaaactctccccactgtatatatgaggtttgtagggtaacagggtaatagttccataaaatgcactgagttccagaggcaaataatgatagaaactaaatgttacaatttattccatcttcaggattacagacattacagggcaggatgagtaaacaaggcaaatgaagcgagcaccttcagcttcccccctaccccgacatttaaccagatgcagcattttgacatttttaggatatgcaggttgacaattcactgacttgggttgagagctggcaatagcagatctttgcaatttaggttcttcctccacagctattccaagtatcttaattcctgaactgcacactgagagctctgaaatggtgttcactgcaacattcttgcagctttcacatcttaatctgacacctcttgtgaaggcagggaactgtgttaaaagctgtcttcctctttgctaatccaggccaccatcaatcttaaccattagttactatataaaaataaaagtgtgctcaaaagcactcactgaaactgttgtgcccagatcccttttcagagcattagttccctgagaggaaaaaaagaggtcctaaccaattgctttcataaatagtgaccccagtacagtgtatatgtcttttgcagcagaaatcaagaggtcaggcagctctgctcatcctgactagtttatcatcgtttgcatacaaggtatatttatgtaaagctgattccacgccaagtattgcaaccataatctcaaaaaaattgttcaattttagcacacagttcctgcaagataccacagcaggtgagaaatcatctcaaagagttcatcttttacaactgagaggaaaacatcgaaggaggaaataaaactcctctctcctaagttcctcatcaaatctgatggctatgttcacagagttagttgacaaaaatccagagtcctcaatttctggacttgcgaaatccttcaaggtgactgtcaaggtcaagaagaattttcaggcttttctttgccatggcccatgaactccagtccttcaataggaatctctttctcctttattgctttctggtaggaggagaaaacacattataaagacctacatgaagcttaagttgcaagctttgtaaataaaatatgacagtacaaaagtaaaatcaagctgattataaagacttataaccatgattcaaaccacatactttttaaaaaacaagtaccggtcaggtgtggtggctcacgcctataatcgcagcattttgggagaccaaggcaggtggatcacttgaggccagaagttagagaccaacctggccaacatggcgagaccctgtttatactaaaaatacaaaaattagctgggcatggtggcgcatgcctgtaagcccagctactcgggtggctgaggcatgagaatagcttgaacctgggaggcggaggttgcagtgagctgagattgtgccattgcactccaggctgggagacagagtgagactctgcctcaaaaataaataaaaaccagaagtaccataatgaataaatcaagtgtaagacctgagggagactggaaaaggagttgtgagggaaccgttaaaattaagtgaaatttgaaaaataatcatcactttgtgttagtgaaagacttaggttcaaatctgggttccaggacttactggctatgtgactaactgtaaatgggatgaagacagcaactacctcggggaattgctgtgaggatgtgttgggttaacttattggaagtgctttgcccggtgctgttcttaacaattcaaagcagttccacatccattgggccagaataaacatttcctggctgcagttgcggggactggtcaagagagagaaacaggctaacgaagggtttataacaacaaaaaaatgtgaccctccagtctgaattctgaagtataatcccgcccagaccccagcagtaatagtggaaaagtgcaccacctgcgaaagaaccaaggaaacctgatgctagtgaactcggattaatcacttcctatttctgggtgttagttttttatgtataaaatatgagtaactatgcccaccttgcgagtttagggtgaacaccaaatgaaccaaaggatgtgactgtgcttcttgaaaagcactgccccaatatttgtcattcggagagacacccaagtggcctcggtggtgatggtaggggagcgagctcctgccactggcctcactgcgacttttctccacccttccagtccagtcccaatccccgtaaaatacgatgagtgtggtgggacacagcgccgagaatgcagggcctgggaacagaggcgggagggctcacctgaacacactgctggtagcgcttgaagaggtcggtgcacgggtccccggagctgtcccccttgagaaatttctcggcgaaccagcgattgaagcactggtcgtactcgcgcttcatgtccgtgcatgcctcccccacactgttcatggcgacagtggtggcggcggcgacgacggcgcactctgatgtcatcactctcaggcgcgtcgctcggcgttacgcgcgggcgcactgcgggggccaaggaaggaagaaatgtggtcgcggttggtgtggctgggccttcgggcccctctgggcgggcgccagggcttcacctccaaggcggatcctcaggtaaaggccagggccatctaggcgggtggcggagcaagccgggaggcacttcggagcgccggtgacccacactccccgcctcatccctcctccagggcagtggccggatcacggctgcggtgatcgagcacctggagcgtctagcgcttgtggacttcggcagccgcgaggcagtggcgcgactggagaaagctatcgccttcgccgaccggctacgcgccgtggacacagacggggtggagcccatggaatcggtcctggaggacaggtaaactcgcggctgcagccccgaagccttgaccgtggcccgttcgcagccgtttaatgtgacgattagcgaacagttttccagggggttaaagagtgttagcaagattcaggaacttgcccacagtcacctcgcgagtcagtggcttcactcttccccttgttcattactgatgctctcgctagtgtaagtggaaacaaaacccgaactgctaatcactgcctttgtttttttttttgtttgtttgttttgtttttttttttttgagacggagtctcgctgtgttgcctaggctggagtgcagtggctcgatctcggctcactgcaacctccgcctcccgtgttcaagcaattctctgcctcagcctcccgagtagctgggattacaggcgactgccaccaggcccggcttattttttttgtatttttagtagagacgtggtttcaccatcttggccaggttggtcttgaactcctgaccgtgatccacccgcctcggcctcccaaagtgctgggattacaggtgtgagccaccgcgcctggcctaatcatcgcctttaaggccctactccatagagtccctacctactcactccaacgtactcttctcagtactctccttggctaccttgactgcttctccagcaagacaagttcttttcctctct

SEQ ID NO: 2769 - DNA, 6000 bp, Homo sapiens
gtggcacaggcctgtagtcctagcactttgggaggccaagacaggcagatggcttgagctcagaagttcccaagaccagcctgggcaatatcgcaaaaccttttctctactaaaaatataaaaattagggccgggcgcggtggctcatgcctgtgatcccagcattttggaaggccaaggaggggggatcacttgaggtcataagttcaagaccagcccggccaacatgttgagccaccccatctctactaaaaatacaaaaaaaaaaaaaaattagctgggtttggtggcaagcacctgtaatcccagctactcgggagactgaggcaggagaatcacttgaacccgggaggcggaggctgcagtgagccaagattgcaccactgcactccagcctgggtaacagagcaagacttcatctcggggaaaaaaaaatagccgggcatggtggcacatgcctgtagtcccagctactcaggagggtgaggagagaggatcgcttgagaccgggaagtcgaggctacagtgagccatgttcctgccaatgcactccagcctgggagacagaatgagaccccgtctggaaacaaacaaacaaacaaacaaacaaacaaaaccacctactgcattctgaatgcctggtcaaggacagaaggcactggttaactagtagtaggaatcccagtggtagaatttcaggagcaaaaaattaaagggaggcgtagctgtcaatttggcccgtactcatcaaatcatgtagcagcaaggccaatcgtaattaagagtcactttttaaaaggtaaaaaaaccaggctgggcgcccatcccagccctttgggaggctgaggtgggcagatcactgaggtcaggagttcaagaccagcctagccaatatggcaaaaccccgtccctactaaaaatacaaaatattagccgggcatggtggtgcacacctgtaattccagctactcgggaggctgaggcaggagaatcacttgaacctggcaggcagaggttgcagtgagctgagatcttgccactgcactccagcctgggtgacagagtgggactctgtctcaaaaaaaaaaaaaaaagttaaaaaacagagggaaaagcaattcctacgtcaagattttactgttaagaggaattctattctctaaactaaacaggctaccacaacacattaatcattcatttggatttttgttttttgggttttttttaagagatgggggggtctcaataaattgcccaggctggtcttgaaatcctgggcttgtgatcctcctgcatcagcctccccagtagtaaggactacatgcacgcaccaccccaaacacattaatccttcaacaaactttcacactaccagtgttaggtgttggggatactgggtccaacccctcaaagagactatactctaattgaggtgacagacagacatacaaacctgtgagtatacactgttatgaaaggcccaggatgctcatttatttatttatgtatttttaaacaaatttttgagacaaggtctcaaggttggagtacagtgccacgaatatagctcactgcagccttgacctcctgggctcaagtgatcttcctgtctcagtctcccacacagctgggacaacaggcgtgcactaccacatccagctaattattattttttttttttgagacggagttttgctcttgttgcccagggtggagtgtaatggcgcgatctcggctcaccgcaacctccgcctcccgggatcaagcgattctcctgcctcagcctcctgagtagccgggattacaggcatgcaccaccacgcccagctaattttgtattttcagtagagacagagtttctccacgttggttaggctggtctcgaactcccgacctcaggtgatctgcccgccttggcctcccaaagtgctgggattacaggcatgagccaccacacccagccacttggctaatttttaaatttttgtagagacagggtctcactttgttgcctaggctggtctcgaactcctgggctcaagtgatcctcccacctcagcctcctaaagtgttgggattacaggcatgtgccgccgtgcccggctctaggatgctcatttaatagcaaagagcagtaatgcctttcctccctccgtactttgcttcctgcagtcctgtcttctacattaggagaatctctaccccatctttgatttctgtgtattcaaatcccaattactcctcaaagccccaaaccagcgcaaactctttcttcttcatgactcccctatctcagagcagaaggaatgccagcctcctctgcactaagcaccggaatctgcaatcccaaaatcccattccaccctgacaaccacccagcaaaggacattttcctgccatttttcatcaattataagatgacccccaccccttgttttttacattgaatagttgttgacatctggatggtatctttatcattaagattagcagcattttttctttcttaatggtatattaaataagggcacatctcataatcaatattatcttagattagctgaaatatgatatatggtattcgtattctgcaaatgaaagtaacttgtcctaagtcacatatggcctgctaacaagtggcaaggccaaagccctgttctaaagacagatctgcttgactataaagactgtggctcttcactgccccactgcccacctctgacaacccacagctctctcttctaatgacacttagcacttactattttattttacagttagttgtgcttctgatctctcgtcccagtcctgcccacttaagactgtggacttcttaaaaaatgatggaatttgctaatcctaggataaaataatgtgtgtaaatcagaactggtgtagtggctcacgcctgtaatcccaacactttgggaggtcgaggcaggaagattgcttcagcccaggagtttgagaccagcctgggcaaaacagtgagaccttatctctaccttttttttttttttttttttgcgacggagacttgctctgtcgcccaagctggagtgcagtggcacgatcttggctcactgcaacctctgcctcctgggttcaagcaattttcctgcctcagcctcctgagtagctgggattataggtgtgcgccaccttgtccggttaatttttttgtattttgagcagagacggggtttcaccatgttggccaggctggtctcgaactcccgacctcaagtgatccacccaccttggccttccaaaatgctgggattacaggcgtgagccactgtgcccagccactttttttcttttttaatagaaaaacaaaacaaaaaaatgtgtaaatcacacaacaaagcacctaggacagaagcacttaatacaactgtgtctgccagacagaaaaagcgttgcctgtaaagaaaggtgtgcatctatacacatgcaatgaccctgtgaatttccttctttagttcgctacctcatttgtagacaggagcaatgccaggcctgcctccctcacagggttgtggtatggtttcacatcaattaagagaggatggacaattattacagttcctgaaaggactcccctatctctattcttgctccccacagtccattttccacacaacagccacagtgatcttttaaaattgcaaaccagatcataacactttctggcttaaaactctacaatgtctttgtattgcacctaaaaataaaggccaacttctctatcacggccaataaggccctgcatgacctgaaactggctggttctctgatctcatccctctagcctccttttaaatcttcaagacatctgactctgtatgtggtagtttaatgtatgaatgagtctccccaccatcctctacccgcaagctctccatttctcccttctcagtgtaacttggtggctcaatctgccacagggcccatgcacttaaagtgcacttcccccagaacttcacataatcattcaagtcggtttcaatatcctgcacttttcctaggcccctatctaaaacagctcctcctcaatcctagtcacaatgtactattgtaactaggaccgtactgttacatcatcttcatagctcttttcatcctttgaaaaataatttattttttaattttttattgacgaggtcatgccctgtcggccatgctgggtgcagtactgccataatagctcactgaagcctcgaattcctgggctcaagtgattctcccgcctcagcctcccgcgtagctgggaccacagacacgcgctaccacgcccggctaatatttcattttttttgtagagatggggtctggctgtgttgcccaggcaggtctcgaactcccggcttcaagcgattctccctcctcggcctcccaaagtgctgggattacaggcctaatccaccggggtgcgacccggccgaaattatttttatttattgtcatctgtttcacccagtagactgtaacctccactaaggcccctgtctgtcacgatctctgctaaaatccagaaaataatgcctgtacacaggaggcgatccaaaactatttactgaatgaatgactgaatgccttggctactcctctaaagaccaaacggattctatccagcccaaaagacacattccatctggccagtcgtagccggaccgagacagccgagccccggagtcgaagtcccgccctgcagggtcctcaccgtctgaaaccatggctgtcccagcacctcagcgcagagcaagtggtggtcaggggagcgtctcaaatcctgcgcagcccaacgtccggcgccgccaagtgacgcacgaggtgctgtgactcgtgccagccccctaatctgcggaagtggagtgcggggagtgcgccggaagaggggtacggaagtgcgccggaagtggggtgcggaggtgtgcagcgcgctgtcagactggctcgcaggcggcgcggccggcggacccgttcgagacagcgcgggcggctcgggtcccctggggctccgcagcaggaggacgccatggacgacaagggtaaatcaagacaggccagggctgctaggctacagcagcgccgttcaggggtccccccaacctctcacatccaggctgagctcccgaagagatttcttttgaatttcaggctgctccgctggttgtgtttccagagtcacaactaaatccctcgcgctgctcttgttttcagggatgcgccctggcagtatctgcaggcatccctcccacacatacgctccttcccagtgccagtctccttcctgccttgttggatctgtcattaaaattagaatgaataaggcatatttgatgtgctcatctagtatggttattaagtgaaaaacaagggcaaactaatacacttttcatgtaaagaaataaaggggagtgggtggaactccatgtataatatttgtaacatatatgtgtatgtgaatagacatgtattagcatagactgtctggaggggtgcaggagaaattggcaagatggttgactctgggatcctctcagattttaggaccaaagaggctgaagagagaatgacttttcatcatcatttactcgggcttaatttttaggccttgcacaccagtagcttttttttttttttttttgagacggagtctcgctctgtcacccaggctggagtgcagtggcgcagtctcggctcactgcaagctccgcctcccgggttcacgccattctcctgcctcagcctcccaagtagctgggactacaggcgcccgccactacgcccggctaattttttgtatttttagtagagacggggtttcaccgttttagccgggatggtctcgatctcctgacctcgtgatccgcccgcctcggactcccaaagtgctgggattacaggcgtgagccaccgcgcccggccaccagtagctttttcaaaataaaaaagagctcttgcaaacagcaaagtggtattttctctattccc

SEQ ID NO: 2770 - DNA, 6000 bp, Homo sapiens
tgagcagctctgctataaattttgtctaaatcagtcctgagtaggtgactgcaggtaaagtacatacataccacactacactagagcaaacgaaacccgcacaatactgacggcacagcaggtctgtggaaggagaaggccccagcgagaggaagtcacaaccttgcctccacttgcccaaaaaaggcttcgtttgcaactggcttttctacaagtttcactcacatctattatgccatttatttaataacatacttcaaaggttgggaaggggctaataaaatggaggacaagatttaagagtcaaaatgcaagtaaatgattttatgatcaggggaggcctaggtggcaaaaggacgtatgctggtgggaggggcattatgatagtttcattacacctttactggaagatggttcaacttgcacctcctgtctttcctcacttataaacactgcgtggctttacatctctgtaatagcatctaaaatgaagttaaaaagaaaatttccctcaatttccctctattgctaaccttcactaagaaagtcctcagtgttaaccagtgacaagagctgttctgttaattcagatttactacacatacaatcataaaaatacttctttagtaaaacactgtattaaatcaagaatcagggccaggtgcggtggctcacgcctgtaatcccagcactttgggaggccgaagcgggtggatcacaaggtcaggagatcgagaccatcctggctaacacagtgaaaccccgtctctactaaaaataaaaaaaattagctgggcttgctggtgggcacctgtagtcccagctactcgggaggctgaggcaggagaatggtgtgaacccaggaggcggagcttgcagtgagctgagatcgcgccactgcactccagcctgggtgacagagcaagactccgtctcaaaataaataaataaataaataaaataaatcaagaatcacacgtgctgtcccactgtccctctctgcctgtttacaatgacaaccatctctaataacaagacctacattcatgcagcacttactaagtgccaggcacaataccaagccctcacaccccttgccccttacatgtcttgcctcatttaatcctcacaacaacccaaggaggtaggtactattgtcatccttatttaacagatgagaaagctgcacagacaggttaagttacttgttcaagtctccacagcaagtgagtggcagagcccggattttaccccaggcagtcggactcgaaaccgttgctcctccttaccaccatgatgattatccactcaccgctccatctttgatgaaagtatggcacagatctgcaattttgtttcttgacagtgatattctcctgagaaaaagttctccccgctcaatcatgatctttttacatttggagtaatcctaggaagaaaagagcaaactgaggggacagggaagatccagttaatgctgagaatgtctgtcactaaacagagaagtggaaaggtaaccccagggagaacaggcacttacggagtattccagggaggcaagactgatgaagcggaggaagagctccccgccagaggacactgccacagaggagtccacaccacacagggtttctatggcactggtgagattcgccctcagaccctggattgtctcccctggaatgatccaacaaggaatgtgatgttcacattagggccacagccccgacctgtatcttcaattcattcattcattcagtgaatatttactaggtacatactatataccaggcactattctagatgctagggatacatcagtgaacaagacaggtagggttctgctgtgatggagttttgattgtaatagaggaagcggatagtaaacaagcacacatagaaataaagctgggtggctgggcatggtggctcacgcctgtaatctcagcactttgggaggctgaggcatggaaagacattaagtagcagcggcagatgaggtctgcaaggtggtatgggtgaggctaaggttgtttggatgttattttaagaacaatgggaagacactggaggttgccttaaagacatgtgtctctaggcaagcccttcagattaaaggctgcattattattttgcttatacaagatttcatgctatacccagatgcttacatttagggtgctgaattaggggatcacaataaataatactaataccagaatttattctggaatattccctgtagcatctgtacagaatctggcacaaggtggaggcctaataaacacttataaagctgaactgctactgaaatttacgcatcatggttaacacaatataacatagtcactctcgattcaaagtctgtttcacttatgaaagggatccttttcatgacaacgtaagagctctctccagattgaaaggtctgaaatgaaggcagaagctgagcttggagctgtattactactttatgcaggcaaacatgcatctctcactttctacatttctaagagtcattagaagactttcctggccgaacatggtggctcacgcctgtaatctcagcactttgggagggcgaggcggacggatcacctgaggctaggagtttaagaccactgtggccaacatggtgaaaccctgtctctactaaaaataaaaaaatttggccgggcccggtggctcacgcctgcaatcccagcactttgggaggccgacatgggcggatcacgaggtcaggagatcgagaccattctggctaacaaagtgaaaccccgtctctactaaaaatacaaaaaattagctaggcatggtggcgggcgcctgtagtcccagctacctggaggctgaggcaggagaatggcatgaacctgggaagcggagcctgcagtgagccaagatggcaccactgcactccagcccgggtgacagagcgagactccgtctcaaaaaaaaaaaaaaaaattttgccaggcgtggtggtgcatgcctgtaatcccagctactcagaaggctgaggcaggagaatcgcttgaacttgagaggcagaggttgcagtgagccgagattgtgccattgcactccagcctgggagacaagagcaaaactctgtctcaaaaaaaacaaacggccgggcacagtggctcacacctgtaatcctagcactttgggaggccaaagcgggcagattgcctaagctcaggagttcgagaccagcctgggtaacatggtgaaaccctgtctctaaaatacaaaaaaattagccggacaaggtggtgcacacctataatcccagctactcaggaggccaaggcaggagaattgcttgaacccaggaggcggaggttgcagtgagccaagatctcgccactgcactccagcctgggtgacagagtgaggctccgtctctttaaaaaaaaaaaaaaagaaaagaaaaaaaagactatcctaagtcccagagtgttaacagatgactctctatatacctttatctctcttcaagaactccagcaacgtccggatggcagccactgctgaggccatgtcaggatcttctttcatctgagacttaaagtattcaattaactctggaaaaagggaaaaaagtgattcacctaattcatttagcagcctataaggcaagagagcttgttaatgactgttgactttaagaagcaaacaatttaaaaaatactttctttttagggtatttggtttcagggatgcaataaatgttgatgggaatagagaaaataccactttgctgtttgcaagagctcttttttattttgaaaaagctactggtggccgggcgcggtggctcacgcctgtaatcccagcactttgggagtccgaggcgggcggatcacgaggtcaggagatcgagaccatcccggctaaaacggtgaaaccccgtctctactaaaaatacaaaaaattagccgggcgtagtggcgggcgcctgtagtcccagctacttgggaggctgaggcaggagaatggcgtgaacccgggaggcggagcttgcagtgagccgagactgcgccactgcactccagcctgggtgacagagcgagactccgtctcaaaaaaaaaaaaaaaaaagctactggtgtgcaaggcctaaaaattaagcccgagtaaatgatgatgaaaagtcattctctcttcagcctctttggtcctaaaatctgagaggatcccagagtcaaccatcttgccaatttctcctgcacccctccagacagtctatgctaatacatgtctattcacatacacatatatgttacaaatattatacatggagttccacccactcccctttatttctttacatgaaaagtgtattagtttgcccttgtttttcacttaataaccatactagatgagcacatcaaatatgccttattcattctaattttaatgacagatccaacaaggcaggaaggagactggcactgggaaggagcgtatgtgtgggagggatgcctgcagatactgccagggcgcatccctgaaaacaagagcagcgcgagggatttagttgtgactctggaaacacaaccagcggagcagcctgaaattcaaaagaaatctcttcgggagctcagcctggatgtgagaggttggggggacccctgaacggcgctgctgtagcctagcagccctggcctgtcttgatttacccttgtcgtccatggcgtcctcctgctgcggagccccaggggacccgagccgcccgcgctgtctcgaacgggtccgccggccgcgccgcctgcgagccagtctgacagcgcgctgcacacctccgcaccccacttccggcgcacttccgtacccctcttccggcgcactccccgcactccacttccgcagattagggggctggcacgagtcacagcacctcgtgcgtcacttggcggcgccggacgttgggctgcgcaggatttgagacgctcccctgaccaccacttgctctgcgctgaggtgctgggacagccatggtttcagacggtgaggaccctgcagggcgggacttcgactccggggctcggctgtctcggtccggctacgactggccagatggaatgtgtcttttgggctggatagaatccgtttggtctttagaggagtagccaaggcattcagtcattcattcagtaaatagttttggatcgcctcctgtgtacaggcattattttctggattttagcagagatcgtgacagacaggggccttagtggaggttacagtctactgggtgaaacagatgacaataaataaaaataatttcggccgggtcgcaccccggtggattaggcctgtaatcccagcactttgggaggccgaggagggagaatcgcttgaagccgggagttcgagacctgcctgggcaacacagccagaccccatctctacaaaaaaaatgaaatattagccgggcgtggtagcgcgtgtctgtggtcccagctacgcgggaggctgaggcgggagaatcacttgagcccaggaattcgaggcttcagtgagctattatggcagtactgcacccagcatggccgacagggcatgacctcgtcaataaaaaattaaaaaataaattatttttcaaaggatgaaaagagctatgaagatgatgtaacagtacggtcctagttacaatagtacattgtgactaggattgaggaggagctgttttagataggggcctaggaaaagtgcaggatattgaaaccgacttgaatgattatgtgaagttctgggggaagtgcactttaagtgcatgggccctgtggcagattgagccaccaagttacactgagaagggagaaatggagagcttgcgggtagaggatggtggggagactcattcatacattaaactaccacatacagagtcagatgtcttgaagatttaaaaggaggctagagggatgagatcagagaaccagccagtttcaggtcatgcagggccttattggccgtgatagagaagtt

SEQ ID NO: 2771 - DNA, 6000 bp, Homo sapiens
ccatacaaaaggggagagggagcatgccagagctgggaaatgaggcagggagaggactggtggaaagaggcagggaggcagttgggagccgggagcagggtcttggcagagagacagtagcccaggcctgaaaggtagaaggagtccaacagcagatacccaaactgccgctctggagaatgtggggtttgccaaattattgaagagtttgtgatgaaagggagttttaggaatgggacttggacctctgtaggttctcttgtaacattctgttcttgaccccattgaagttcccgcttcttcagtagggtgatgtgcagttttggaatcctttagctgaattggggttccagtaccagagcagctggcatctctgccccatgggaagtgaagggggccagacagggcgtgtacagtgcactggccaatgcctagctgtctggcctgtgaccagggccccccggaacgggaaacttgtttacactggcacacgcccttgtggcttttgtgtgacctgtgtctaggtaccacctgcctgaccattgcttcggtgtaggggcccagccttgtgttccccctagtgtcgtagggaagacccagcccagggcagcccctgcctcttcagagggaaggcacaaaatcagtcaccaccacaatagggaacaagtgcaaagatgtgttccttacagctcctgggcagggagggtgccgtgagtagggaggccatcctccatccctgggtcctgcaaggcaggactgaagagtcagacagggagggtgcccagggcagctaggcgtgtgagggaatggggtgtaggcatgtgttagttcacgggcgagcgcctgaatggtccatttaaaggaagtggcgggaaggcagggcccagcctgctaggcgggagagaggcctctaagttcttgtttctgaccagctggggccatgtgggtatggtgatgttttgttttgttttgttttgttttgttttgttttgttttgtttttgttttttgagacagtctcactctgtcacccaggctggaatgcagtggcaccatcttgggtcactgcaacctccacctcccgggttcaagcgattctcctgccttagcctcccgagtagcaggattacaggcatgcactagcccagctaatttttgtatttttaatagagacggggtttcaccatgttggccaggttggtctcaaactcttgacctcaggtgatccacctgcctcggcctcccaaagtggtgggattacaggcgtgagcctctgcatccggcctagtgtggtgttctgatgtctaggcagtggctttgctgtgtccttcctgtcagggtccccggcccgtcacacacttgctgctttgtactgtgctgccctcccgtcctgctttagaacacacagagtttgggatgcggtgaagcctgaacaagtttaaggaatgaaatgggaagaaacagatgaggcatgagggtgaagggatgaaatttggaccgtgacttaaggtggggacagtgagaaggggaggcgacagtgacggatttggacccagccgtgtagggaaaacctgtgcccatttcagttggagcgtcccgcgtggcagcagcgtgggaggctgagggtacgagggtgtcgtgcaccttctctttcaggatcctgaagagcatggtcgtgggctgggtgaaggagatcacccagtaccacaacatctatgcagacaaccaggtgatgcacttctaccgctggcttcggtcgccatcctctctgcttcatgaccctgccctgcaccgcacactccacaacatgatgaagaagctcttcctgcagtgagtgctcctcctccctgggctgtccaccgcgtcctcagctgggctggtcccttactccccagaaccagagacatggccagccagtgcctctgggataagtagtgtatttctgagtttgtggagcataacaatccaaaggatcccagagaaacacgcagctgctgctgcagcgtcgcctgcacatcctgcagagaacactaggtggcacctcctctcctgcccctttcctgcacaaagtcatgctacacattgtattgctgtgtgccttgttgttttagtgaaaatatgcctgtgtcaggagatctgtgtgaggacatgccatatgaaagaacatttagcctctctccagccttgtgccgttgttacaaatagcaaatcagtgagaggcttcatgcatgagctcatgcagatagatccgtggggtaattgctggggcgtagccctcttgcaggcctcagaggtgttgtaactcgggatgaatcctgatttgatggacttcaccagagcggccccacagaggccccttgtggacacttcttccctggccgcgcctcaccaacatggccggggattattacccaactgctgggataaaagtgcttcttggtgcagtcttaacttaggattcttacaatgaatgaagtcgaattttctcttctagtcctttgtctatttttctgtagttttggtggttcttctcttattaaatatcgaatgagttgtctccatacaaaaagttgccatttttctgtgataagaatttgctaattttttcctgtttttggttatcttttgcctttgtttgtggtggatttttgccatgcagaaatctttgctcttcattagcttctgggttctagtgtatctcggaggcttttctgcttcaggaccctcagctcttttccctcttggattttctgggtgccctctggctctccatgactgtggcgtctccaccacggactctcaacttgctccacaggctcatcgctgagttcaagcgcctggggtcatcagtcatctacgccaacttcaaccgcatcatcctctgtacaaagaagcgccgtgtggaagatgccatcgcttacgtggagtacatcaccagcaggtgcggctggctggtcctggtgacgcagcactgtggctttgagagggatgctaaaatgaccccctgaggtgccagctctcctcctgggtgggctgggaggtcgttagaagtgcaggactcaccatggtgaatctgagcagcgtgaaaagggggttaccgccacctgtgcgcggtagcagatcggaggccactcagctgtgcagcttgagttgggcaagttcaggaagtggcctgcctttgctaagaaggttccacagtgatttttgtttgtttgctttttttccccatggatattcagggcacagattcaaggtgccctgaatatatgcaccccgtaagtgttgacgttgtaagccttttcatagacgtcagtgttggcgagtggagtggtgtggttcccgggtgctcaggtgtgcacagctctcagctgtcagagcctggtgtggttttgacttcctgccttccaggccatgttcctgaggttccctcctaggccttgctgtgcttctcacacactcagcactatttaaatctaaatagaagacaaagcaacagaaaaatctccaccagcaacttttgttcaactgatagtaggaagctccctcctaggtgcgctcaccctggggatgaatgcagccctttctgagcacagaggggagttgcttgtggaggcacagagagtctgcatgggtctgatctttgcatggttacaggggtagcatctgggggcgctgcagaaaaggctgacactaaattgataataggccttatcactgagaagtaggaaggtagagcttataagactttcattcctaatcaaaccatatgcactggattaatttgaaacacaaaagcactgttgtcctcctgcagacccactgtggccccttatgtctatccaagatgagccttgatggtcagtggtcacgctgtgtgcctgggaaagctggcttgggctagaattgtatttcggagcatggctgagataatgggaaggatgtgcctctccccacgttggccatgggcagctccaggggtgccctgtacctgaggaggccggggttgctcatgtcgagaaacaggctgctattcttccttagcgcgaagagcagagttagggagaacataaagttctcctgcaggagctgcgatgtgggctactcagctgcattttgaaactgtgatttaggatgttcctccttccttcctctctttctttgtttattcttccattttttggggttttgtttgttttttaggagatggggtcttgctctgtcacccaggctggagtgcagtggtgcagtcatggctcactgcggcctcaaactctgggctcaagctatctgcccacctcagcccactgagtagatgggactagaggtgcatgccagcatgcccagccaatttttgtattttttgtagagacagggttttgccacgttgcctggggtggtcttgaactcctgaactcaggcgatcctcctgcctcagcctcccaaagtgctaggattacaggcgtgagccaccgtgcctggcctgttctttttttttttttttttttttttttttccttaaatggatctaatgtgcagaggattgggtcagcgctagggaggcttaaccgaggagtgacaaggatgacgatagcttaaaagagcttggcagtgggaagcactgtggttggttaccagcaggtgcaggtcacctaaggccgcagagcagaggcagaacaccctgtgggccatccccagcacgaggaggcacccagctctctttgtggcgccagctcccaggggcctggtgggcctccttagttttacgtttaccacatttccccaggaagcctgagggatgatgtggtctgaatgaactttcaaattcagtgttaagtaagtggagggtacagatagatacaaggggaaataaaggaaagttgagaacaaggtcgatttcactgaagcagcgtcttcaatgcttcctctgcagcatccattcaaaggagaccttccattctctgacaatttctttctctcgatgctgggaatttcttctctggatggatccatctaactatggcggaatcaaaggaaaagtttcatctcgtattcactgtggactggtaagcgagctgcagtgtggcacccgagccagctttgggggtcgcgttcattcctgcagcaagtgctgagtgctcagggccccggcgggcctggccgtgagcagcagacactgcacccgcatcctgccctcatgaacacggggagggaccatgcgcagacaagcacgtcagtgtggagtgtggcgtcagccctggtgatggcaaggcttgccgtgggcaacagggaggtggaggcccatgaggtggtgacagggaatccgagagctgatgaagtgcaccatagttgtgcgagcataaggcgcctccagcggatggacaccagggaggcaaagcacaagtcagtggagcagtggttgcagatgcaggcagagagctgacagagccaggcaacttgggcatggcagggcagggcctcggctttcgtggggatgggagcttctgtgtgggtgatgttggagctttcttggccccatgtggataacccaccattggagggcacaggcaggtaaagccggttagtgcctgtgtcagggagatgctgggcagcgaggttggtgagaagggcctgggtgggctttgaagtggagccaaggggccagcggatcggatgtgtgtaaatgcccaggtgcgggccaggctgtgggtgagtggaggtggctgtcgggagcagtctggggaaggggtcacgtctggctggggctcatggtgtttgcaaggttgagacgtgggtggtcagctggtgcaggagtggccagagagtggctgggtgggttgagaggaggcctgtgtcctccacaggggccctcatagtggactgagaggaagctgtgggtaccagagccaggggctcagatgtcagagggaaagccctttgtaaggacgcagacgcttctgggagctggcaggatgaagccaagactgcccaggacacctggatg

SEQ ID NO: 2772 - DNA, 6000 bp, Homo sapiens
tcctgacctcaggtaatccatccacctcggcctcccaaagtgctgggattacaggttgaaccatggcgcccggccccagaatttttttttttttttttttaaaggaagaaagaatgttgaacaaaatgatgttatttgaggacctgctatacattacttcacttaaccatcacagtttccaggaatccattgatgttaagtgaggacttactgtaatttacatatagttaagtgcagatttttaaatgtgcagttgattgggtttttggacacatgactatgcctgtgtcacccacacccccacccaggtgcagaacgtttccatcacccgggagggtgctcttgtccccctgtgcaaccttctgctggcctgatttctgtatttctgtaactgtgtgcatgtgactttctagaacttcatattaatggaaccagacagtagactctttggtggtcaatatcttcttgagactcaaattatcccaaattgggctggccagatcccttcaagctggcacctgagtccttttgacatgccctgttggtctttgaaaacttccttgctttttggccactaagagaggccaggctcaccttgaacttccagacgtggaattagctgttcctctaaagagcctgagcctcgttgagaggttatgttgagaaaccaagcttagagctcaaggggtatcatttcatctagattccttcagtgaacagccaggaaatatatacattttaaaaagtgcaattacactaattgttccagttcatatttaccagaacataatttttcatttctttgattttgtgtgtgtgtgtgtgggtgtgtgtgtgtgtcggtctaatttcatgttactggaaaaatctaaccctactggttctcttctcgcttgagaattattcagattttcctggttgttgttacgccaaataacgctttattgcaacctggacattttacatatttgagactttgggtatttttaaaaatcctttagcgtgtcaggtttttttgtttgtttgttttagcaacaaccaacacggttaattccagtgcccaagctcttccttgcctctttgtgcaaagcttccaatgtcagctcagcctccagagcctctgctgcgttgttttgggtcacctgtgcaagtgcagctcgtagtgagcctgggacttgtgctgctggttcatgcatgaagctagggtgctcctctccaggattcccccagccccccacacacgaagctagggtgccccctctccagctctcctctccaggattcccccagccctccacacagggagctagggtacccctctccagctcgcctctccagaattcccccagccctccacacagggagctagggtgccccctcttcagctctcccagaccccccaggaccccacacaggaagctagggtgcaccctctccagctctcccagaccccccaggaccccacacaggaagctagggtgccccctctccagctctcccagacccccccaggaccccacacagggagctagggtgcccctctccagctctcccagacccccccaggaccccacacaggaagctagggtgccccctctccagctttcccaggcccccccaggaccccattcacgaagctagggtgcccctctccagctctcccagacccccccaggaccccacacaggaagctagggtgcccctctccagctctcccagacccccccaggaccccacacagggagctagggtgccccctctccagctctcccagacccccccaggaccccacacagggagctagggtgcccctctccagctctcccagacccccccaggaccccacacagggagctagggtgccccctctccagctctcccagacccctccaggaccccattcacgaagctagggtgcccctctccagctctcccagagccccccaggaccccacacacacactctggctcccccaggggctctctttccgtttctctgactaggaaaatgtgatttctctcagtttttgccatctacaccctcaggttaaacccatgagagaatggaggaagatgaactgggaacctccccagatcagtgttgactgctgtattctgacagctcttgtctattctcagaggctgcaggttgcttttcaaaattgcgtccagaggccaggcatagtggctcacacctgcagttccagcgatttgggaggatcacttgagtccaggagtttgagaccagcctgggcctcatagtgagacctcctttctacaaaaaaaaaaaaaaaaaaaaaaagccatccgtggtggtgtgttccttgtcccagctactcaggaggctgaggctggaggaccacttgagcccaggagttggaggctgcagtgagctgtgatcacactgctgcactccagcctgggcaacagactaagaccctgtctgtaaaaaataaataaataacataaaaattacatccagagtttttagttgtaatcattgagagaggtggactgtggcgtggtgggtgtaccccgtcgctaggggcaccagaagtctaggactccgaatagcgtgtgctttgtgtgtgtaccacagacattaccacttacgcccagtgacgagatcatcgtcgtattctcgccaggtaaatcgggtccttcctcgctccaacatggtctacaatctctatgagtattcagtgccagaggacatgtaccaggaacacatcaacgagatcaacgctgagctgtcagcgccagacatcgagggcgtatatgagactcaggtgactccccagccaccctcgactgaactgggggaggctccagcagggtggtatggaggaaagaaacccgcccagggtgtgggctggggaacagcagcgacagtggactcgttcccacaggtgaggtgaatgtcagcagtgtgtctgccaaaagtggcctttgggcagtgggccgggcagctgcaggggcacagccacatcccgggcagaagtcacgtgggcagccagagcccccaccatccagcccttgccggcctgtctgcccgattcttccaggttccgttactgttccgggccctggtgcacctgggctgtgtgtgtgtggtcaataaacagctggtgaggcacctttcaggctgggaagcagagacctttgctcttgagcacctggagatgcgctctctggcccagttcagctacctggaaccaggtatggcctgcaccagccgcccatcatgtgcctgcctcccacacatctggggtgacggtcttgtttccttctccagggagtatccgccatatctacctgtaccaccacgcacaggcccacaaagcgctcttcgggatcttcatcccctcacagcgcagggcatccgtctttgtgctggacactgtgagtcctgggccctccatggcagcacattggctggggcagggtttggggaaggaggacatctcccagggtgcccaggccctccaggtcttgtcctcaagggcctttgcccatgagtgcttgtcgtgattgaattggcagtgccgtggcagtggtggagtctgccccagggctgcccccacttcctcctgcgcagggggaggctgacgtggcctgcgttggtctaggtgcgcagcaaccagatgcccagccttggcgccctgtactcagcagagcacggcctcctcctggagaaggtgggccctgagctcctgccaccccccaaacacaccttcgaagttcgggcagaaactgacctgaagaccatctgcagagccatccagcgattcctgctcgcctacaaggtgagagtggttggggtcttgctgtgtgagccccatcttctttgaggctgggtccacccaggtcttttcttccattttgccttgacccaggaggagcgccgggggcccacactcatcgctgttcagtccagctgggagctgaagaggctggccagtgaaattcctgtcttggaggaattcccactggtgcctatctgtgtggctgacaagatcaactatggggtcctggactggcagcgccatggagcccggcgcatgatccgtcactacctcaacctggacacctgcctgtcgcaggccttcgagatgagcaggtgagcacagtactgtcgttgtgggccagtggtccccaggcagagccggcctcggtggtctctgtgacccggcgatgtgccccggtgctgacctgtgccctggtgcaggtactttcacattcccattgggaacctaccagaggacatctccacattcggctccgacctcttctttgcccgccacctccagcgccacaaccacctgctctggctgtcccctacagcccgccctgacctgggtggaaaggaggctgatgacaactgtcttgtcatggagttcgatgaccaagccactgttgagatcaacagttcaggctgttactccacaggtaagtgggcgggaggacgaggcccatgagacctggctggtgtttctgccattctgtgacatcttctcaaggcaatagtgccgaggatgggctcagagttcgaccgcgcaggtcagagctgaggctgcaggagacggtcctggggtcaaggtccaggtggggcctcctgtgccctcgggaatctgaatagcctggcaggtgtgaggatgggtgtgggcaggtctgttgctggttctggaggtggtggtggctggagtcaggcccagggggctggtggtgctggagctggcaggatgctggctgagcatggcgtcttcctgtgcagtgtgtgtggagctggaccttcagaacctggccgtcaacaccattctccagtctcaccatgtcaacgacatggagggggccgacagcatggggatcagcttcgacgtgatccagcaggcctccctggaggacatgatcacgggtggtcaggctgccagtgccccggccagctacgatgagacagccctgtgctctaacaccttcaggtgccaccctctctgggaaggagtgttactaatagaagggtcttatcctttgcccttaatttggaaagctaaggtctaagacagggtccattgggcttcccttagtcttaatggcagagccagagaccactgtgtggcgagttttccatagtctattgtctttaccactgtgggggtccggcctggtccctggcgactgttcagtgtgctgcctctgacctccctgtggccagaggtacttcacacagagtctttctaaccagggccacttttcgatgtgaccaaaggtacatcacagggatctccagccagctctactgagtatgatgtgtgaggcatcagcacttaggtgtcaggagccgtcggtctgctgcagagggcgtggttgagggtcaggagccatcagtctgcggagagcatggttgagggcagctactcgcattacccaccagcggtggttcatgctgggcaatgcttgctgtgtaccaggaggtgggccgagcacttcgcattctgcctctgtccccacatcagcccagggacggggagcggttattgtctgtttttcagataaggaaactgaggtcagaggggctgcctttgtggtcataccacaaatgaatggaagggtaggtgctcaaaaacaagtctttgtaattccagagcctgtactcagctgtagttttaatgactccatacaaaaggggagagggagcatgccagagctgggaaatgaggcagggagaggactggtggaaagaggcagggaggcagttgggagccgggagcagggtcttggcagagagacagtagcccaggcctgaaaggtagaaggagtccaacagcagatacccaaactgccgctctggagaatgtggggtttgccaaattattgaagagtttgtgatgaaagggagttttaggaatgggacttggacctctgtaggttctcttgtaacattctgttcttgaccccattgaagttcccgcttcttcagtagggtgatgtgcagttttggaa

SEQ ID NO: 2773 - DNA, 6000 bp, Homo sapiens
cagtgttttttcccacccagtcatagggggttatgtggcctatgcagggattctcagtggggaaggggactgaagtcctgtggatgggaaaactgtacttggatgaggcctgctaggtgatctcatcacctgcccctcttggggggattactgctttaaatacagtatggaaaaatccatgatgactcaagttagcaagcttggaagtataaaaatgatcttcaggaattctgaattaaagaaaacatcactgtagttggaaaatacttcacattactgttggccgagagctcacggtggattaaattggtaaaactcttgaattactgtgcttttgcaactcagaaagtggttcagaaactggacatttttcagggtaccgaagcatttattttctggatgtttacactatgaaaataacaatagaggccaggcactgtggctcgcgcctgtaatcccagcactttgggaggccaaggtgggcggatcacgaggtcaggagatccagaccatcctgtgaatggtgaaaccccgtctctactaaaaatacaaaaaattagccgggcgtggtggcaggtgcctgtagtcccagctactcgggagactgagtcgggagaatggcgtgaacccaggaggcagagcttgcagtaagccaagatcgcgccaccgcactccagtctgggcagcagagtgagattccgtctcaaaaaaaaaaaaaaaaaattaaaataacaatagaaactaactggtcaaattggagtcagttttccctttccatgagcccagtctaggacgctttcagggtttttgaatcctgaagtctgactttaggttaagttgagttacttgtcctcaggtttgcctctcagcccaattaagacagtcacccctacccatccaattaaaaagaaacatgataaaaccacaaatgtgagcctgtactcctagcactgtaatcccagcactttgggaggccaaggaaggtggatcacttgaggtcaggagttcaagaccagcctggccaacatggtgaaaccccatctctactaaaaataacaaaaattagctgggcatggcggtgtgtgcctgtaatcccagctatttgagaggctgaggcaggagaatcacttgaaccagagaggcagaggttgcagtaagcctgggtgacagagtgagactctgtctccaaaaaaaaagaaaaaacaaaaaaaaccacgtatgcgtatatatgccatacaaactatatgaaccattcgagttttttcccatgatgattactacaatggtttttaaaaaattatatttccaaataagagtactccaactactcggttttggtgcccagcttggttgcactcagcggctacaaggtaaacccaccccttgtatggcactcacccgtaaacggcatatctcagaggcccaccgacatccagacttctagagttttcttttttccgcttcttctcaatcatctgggccaggaagttcccaagtgctgacaaaatgccactgtggagagggaggtcatcagaaaacagcagtgaccagcaggagggtgtccctttcccataggtgaattagcagggccgttctgaggccatgcagcagatgggcggggggtaggaattcttgttaaagcggctgcaatgtatagttcttgtatcaaaaggtggagacggtggacttaaacacacaggtaaggacaagtggctttccagtatctatgtcaacatcctggctgtgatgttatactataatttggcagtttgggagttgggaagctgtgtggttatgaacgggcaacaggacagccctatcatgacgctgttctgcattttgactgtggtagtgaacacaagaatgtacagatgtgataaaactgtacagaacagatacagctacaagaaaaatggagaaatccgaataggatctgtggactgtgtccacgcaatgccctggtcgatactgcactacgtttcacagaatgtaaccaatgggggacactgggaaggtgtgcaaggaatctctccatgttagtcttgtaactgtttgtgaatctacaattatcacaataaaaatttccataaaaaggtggaacaggcccagtggctccctccaggccttggtttgtatttgccttctgagaagctctctggactataaaatccaaaattcctagcacggacctagacaccttctcgatcagatccctggcgattcccttcacatctcctgcctcttgctcagggttcactttctccacacacagatcttccctccctcgggactgagtccaagctgcacctctctccgcctttctttaacgccggccttcccttcaaaacctaacagagacctttgccctgctgttccctgtgccaggagagcctctgctccacttctttacacagcctgttcaatgtcaccttctcaaaacaccttccctggccgtgtctccacccgcgccgtgcggacccgcgccccgcagactcgctcccttggccctgtctccacacgctccatgtggacccgctcccctggccctgtcttcacccgcaccacgcagacccgctcccttggccctgtctttacccgtgccccgcagacccgctcccctcgccctgtcttcacccgcgccccgcagacccgctcccttggccctgtcttcacccgcgccccgcagacccgctcccttggccctgtctccacccgcgccatgaggacccgctcccctggccctgtctttacccgcgcccccaagacccgctcccctggcgctgtcttcacccgcgccccgcagactcgctcccttggccctgtctccacacgctccatgaggacccgctcccctggccctgtcttcacccgtgccccgcagacccgctcccctggccctgtcttcacccgcgcccccaagacccgctcccctcgccctgtcttcacccgtgccccgcagacccgctcccctggccctgtcttcacccgcgcccccaagacccgctcccctcgccctgtcttcacccgtgccccgcagacccgctcccctggccctgtcttcacccgcgcccccaagacccgctcccctcgccctgtcttcacccgtgccccgcagacccgctcccctggccctgtcttcacccgcaccacgcagacccgctcccttggccctgtctttacccgtgccccgcagacccgctcccctcgccctgtcttcacccgcgccccgcagacccgctcccttggccctgtcttcacccgcgccccgcagacccgctcccttggccctgtctccacccgcgccatgaggacccgctcccctggccctgtctttacccgcgcccccaagacccgctcccctggcgctgtcttcacccgcgccccgcagactcgctcccttggccctgtctccacacgctccatgaggacccgctcccctggccctgtcttcacccgtgccccgcagacccgctcccctggccctgtcttcacccgcgccccgcagacccgctcccctcgccctgtcttcacccgcgcccccaagacccgctcccctcgccctgtcttcacccgcgccccgcagacccgctcccctcgccctgtcttcacccgcgccccgcagacccgctcccctcgccctgtcttcacccgcgcctgcggacccgctccccttgccgtggcttccccgggcgcgcggggcccctgttgggtccttgggtggaacctcagcgccgacccccgggtctgggcgggccctccacgcgctgggagggcgggatccgcaaggcgcctcacaatcgctgactgcggacgcgggtgtcgccgcgggaagttcagcgccgggtcggagggcgcccgctccgggggttctgacccgggcgcgcccccagcctggtcccggcccggcgctcccgtccaggccccgcgccgctgcggccgacctggggccggggcggcgtccgattcccgcgcccccgctcacctggtggccgccttggtgagcaccgggtagagccgcaggaagagcaggtactgggcgagcgcccgccgcggcagcgccccgagcccggcttcggcccgcagcctggacgcggccggcgccatcgcctccccagcgccgtgccgccgggggcaccgaccccacctcaggctggccgggcgcggagcccgaggcgccgagagcggagtggggaccgcctgacatttccggccccaccgcggcccgcagcgccgcccggtcccaaccccacggtgcgccgcgcgcgcctaccacacacttttccccggtccctgccggccacctcccccgccgggcgccggcgccaattggagcgcctcggggggcgggggaggggcggagcgcgcctcttgatggacggcggcatttccggctctcgcgagtctgggtgggagcgcgccaaatttctcccctgaagcagaggtggtagccaacggctccatgtctctgaggagcggcgggcggcggcgcgcggacccaggcgcggatggcgaggccagcaggtgaggggcgccctcctgaggctctcgggccggccctccggagggtgccatggggccgtcctcggctggcgccgccgaggcgggagggaggcccggttcccgcagccgcccgcactcgccgcgcctgactggggtagggcggcgcgccccgaccgccgacggaggggctcggggcgggcggaggcgctacgggcgcggcttctttgcggggaaacgaggcgggccgcgcggcctttccctgctcggctctttctgaggtttttcgggcctcgccttccgcgcagctgcgtttgggacctgccgcgcggcgggggcgatgagagcggcgggacccgggccaggccctgcggggtggacgcgcggctggggagggtgcggggaggggcggggccggggaccctgcctgggggcctagcgctgggggaggccgaggcgggcggatcgctggagcccaggatcctgttctagatcagcctgggctacagagagagacctcgtctcctctgttttatttttttgggcagggagtcccgctctgtcgcccaggctggagtgcagtggcgcgatctcggctcactgcaacctctgcttcccgggttcaagcgatcccgctgcctcagcctcccgagtagctggaattacaggcgcccgccaccaggcccggctagtttttgtatttttagtagagaccgggtttcaccatgttggccaggctggtctcgaactcctgacctcaggtgatccgcccgcctcggccttccaaagtgctgggattacagacgtgagactccgcgcccggcccttctcttgtaaaaacaagaaaaattagacaggctggtggtgcgcgcccgaggtcccagctattaatactcccgaatccgagccggaggttcacctgagcccggcaggtcaaggctgctgtgagccgggatcgcgccaccgcactccagcctgggcgacggagccagacccagtctcaaaaaaaatagagcaaggataagacgcggctgcttggtggccagagcaaacggtaaacatgaccggaggactggcctgccataagcagaaaacggatgaggcccggcgcggtggctcacacctgtaatcccagcactttgggaggccgaggcaggaggatcacctgaggtcaggagttcgagaccagcctgaccaacatggagaaatcccgtctccactaaaaaaatacaaaattagcggggcgtggtggcgcatgcctgtaatcccagctacgcaggaggctgaggcaggagaatcacttgaacgcggcaggcggaggttgcggtgaaccgagatcgcgccattgcactccaggctgggcaacaaagaatgaaactctgtctcaaaaaaaaaaaaatagaaaaaacgtgtgagaacgtgaagctttttacagacacttagctgaacaaaattcttcccagaggagaaaccaagtggtaaggatccctaactgctgttgtg

SEQ ID NO: 2774 - DNA, 6000 bp, Homo sapiens
tcactaattaactggcaagggagctcactaactaactggctaagggagctcactaactaactggctcagggagctcactaactaactggctaagggcgctcactaactaactggctaagggagctcactaactaactggctaagggagctcactaactggcaagggagctcactaactaactggctaagggagctcactaactaactggcaagggcgctcactaactaactggctcagggagctcactacctaactggctcagggagctcactaactggcaagggagctcactaactaactggcaagggtgctcactaactaactggcaagggagctcactaactaactggcaagggcaggacctggtgcagcactctaggttgtgtgcgttgctactaatcattcccctgtgtgtttgggagagaatggaaccagctgccacatctactgggacaagaggcctgcagttccataaaattcagcaacaaaaagaggggtctttcaacttgtgacgttgacagtctttagataagtggttctcagtgttttttcccacccagtcatagggggttatgtggcctatgcagggattctcagtggggaaggggactgaagtcctgtggatgggaaaactgtacttggatgaggcctgctaggtgatctcatcacctgcccctcttggggggattactgctttaaatacagtatggaaaaatccatgatgactcaagttagcaagcttggaagtataaaaatgatcttcaggaattctgaattaaagaaaacatcactgtagttggaaaatacttcacattactgttggccgagagctcacggtggattaaattggtaaaactcttgaattactgtgcttttgcaactcagaaagtggttcagaaactggacatttttcagggtaccgaagcatttattttctggatgtttacactatgaaaataacaatagaggccaggcactgtggctcgcgcctgtaatcccagcactttgggaggccaaggtgggcggatcacgaggtcaggagatccagaccatcctgtgaatggtgaaaccccgtctctactaaaaatacaaaaaattagccgggcgtggtggcaggtgcctgtagtcccagctactcgggagactgagtcgggagaatggcgtgaacccaggaggcagagcttgcagtaagccaagatcgcgccaccgcactccagtctgggcagcagagtgagattccgtctcaaaaaaaaaaaaaaaaaattaaaataacaatagaaactaactggtcaaattggagtcagttttccctttccatgagcccagtctaggacgctttcagggtttttgaatcctgaagtctgactttaggttaagttgagttacttgtcctcaggtttgcctctcagcccaattaagacagtcacccctacccatccaattaaaaagaaacatgataaaaccacaaatgtgagcctgtactcctagcactgtaatcccagcactttgggaggccaaggaaggtggatcacttgaggtcaggagttcaagaccagcctggccaacatggtgaaaccccatctctactaaaaataacaaaaattagctgggcatggcggtgtgtgcctgtaatcccagctatttgagaggctgaggcaggagaatcacttgaaccagagaggcagaggttgcagtaagcctgggtgacagagtgagactctgtctccaaaaaaaaagaaaaaacaaaaaaaaccacgtatgcgtatatatgccatacaaactatatgaaccattcgagttttttcccatgatgattactacaatggtttttaaaaaattatatttccaaataagagtactccaactactcggttttggtgcccagcttggttgcactcagcggctacaaggtaaacccaccccttgtatggcactcacccgtaaacggcatatctcagaggcccaccgacatccagacttctagagttttcttttttccgcttcttctcaatcatctgggccaggaagttcccaagtgctgacaaaatgccactgtggagagggaggtcatcagaaaacagcagtgaccagcaggagggtgtccctttcccataggtgaattagcagggccgttctgaggccatgcagcagatgggcggggggtaggaattcttgttaaagcggctgcaatgtatagttcttgtatcaaaaggtggagacggtggacttaaacacacaggtaaggacaagtggctttccagtatctatgtcaacatcctggctgtgatgttatactataatttggcagtttgggagttgggaagctgtgtggttatgaacgggcaacaggacagccctatcatgacgctgttctgcattttgactgtggtagtgaacacaagaatgtacagatgtgataaaactgtacagaacagatacagctacaagaaaaatggagaaatccgaataggatctgtggactgtgtccacgcaatgccctggtcgatactgcactacgtttcacagaatgtaaccaatgggggacactgggaaggtgtgcaaggaatctctccatgttagtcttgtaactgtttgtgaatctacaattatcacaataaaaatttccataaaaaggtggaacaggcccagtggctccctccaggccttggtttgtatttgccttctgagaagctctctggactataaaatccaaaattcctagcacggacctagacaccttctcgatcagatccctggcgattcccttcacatctcctgcctcttgctcagggttcactttctccacacacagatcttccctccctcgggactgagtccaagctgcacctctctccgcctttctttaacgccggccttcccttcaaaacctaacagagacctttgccctgctgttccctgtgccaggagagcctctgctccacttctttacacagcctgttcaatgtcaccttctcaaaacaccttccctggccgtgtctccacccgcgccgtgcggacccgcgccccgcagactcgctcccttggccctgtctccacacgctccatgtggacccgctcccctggccctgtcttcacccgcaccacgcagacccgctcccttggccctgtctttacccgtgccccgcagacccgctcccctcgccctgtcttcacccgcgccccgcagacccgctcccttggccctgtcttcacccgcgccccgcagacccgctcccttggccctgtctccacccgcgccatgaggacccgctcccctggccctgtctttacccgcgcccccaagacccgctcccctggcgctgtcttcacccgcgccccgcagactcgctcccttggccctgtctccacacgctccatgaggacccgctcccctggccctgtcttcacccgtgccccgcagacccgctcccctggccctgtcttcacccgcgcccccaagacccgctcccctcgccctgtcttcacccgtgccccgcagacccgctcccctggccctgtcttcacccgcgcccccaagacccgctcccctcgccctgtcttcacccgtgccccgcagacccgctcccctggccctgtcttcacccgcgcccccaagacccgctcccctcgccctgtcttcacccgtgccccgcagacccgctcccctggccctgtcttcacccgcaccacgcagacccgctcccttggccctgtctttacccgtgccccgcagacccgctcccctcgccctgtcttcacccgcgccccgcagacccgctcccttggccctgtcttcacccgcgccccgcagacccgctcccttggccctgtctccacccgcgccatgaggacccgctcccctggccctgtctttacccgcgcccccaagacccgctcccctggcgctgtcttcacccgcgccccgcagactcgctcccttggccctgtctccacacgctccatgaggacccgctcccctggccctgtcttcacccgtgccccgcagacccgctcccctggccctgtcttcacccgcgccccgcagacccgctcccctcgccctgtcttcacccgcgcccccaagacccgctcccctcgccctgtcttcacccgcgccccgcagacccgctcccctcgccctgtcttcacccgcgccccgcagacccgctcccctcgccctgtcttcacccgcgcctgcggacccgctccccttgccgtggcttccccgggcgcgcggggcccctgttgggtccttgggtggaacctcagcgccgacccccgggtctgggcgggccctccacgcgctgggagggcgggatccgcaaggcgcctcacaatcgctgactgcggacgcgggtgtcgccgcgggaagttcagcgccgggtcggagggcgcccgctccgggggttctgacccgggcgcgcccccagcctggtcccggcccggcgctcccgtccaggccccgcgccgctgcggccgacctggggccggggcggcgtccgattcccgcgcccccgctcacctggtggccgccttggtgagcaccgggtagagccgcaggaagagcaggtactgggcgagcgcccgccgcggcagcgccccgagcccggcttcggcccgcagcctggacgcggccggcgccatcgcctccccagcgccgtgccgccgggggcaccgaccccacctcaggctggccgggcgcggagcccgaggcgccgagagcggagtggggaccgcctgacatttccggccccaccgcggcccgcagcgccgcccggtcccaaccccacggtgcgccgcgcgcgcctaccacacacttttccccggtccctgccggccacctcccccgccgggcgccggcgccaattggagcgcctcggggggcgggggaggggcggagcgcgcctcttgatggacggcggcatttccggctctcgcgagtctgggtgggagcgcgccaaatttctcccctgaagcagaggtggtagccaacggctccatgtctctgaggagcggcgggcggcggcgcgcggacccaggcgcggatggcgaggccagcaggtgaggggcgccctcctgaggctctcgggccggccctccggagggtgccatggggccgtcctcggctggcgccgccgaggcgggagggaggcccggttcccgcagccgcccgcactcgccgcgcctgactggggtagggcggcgcgccccgaccgccgacggaggggctcggggcgggcggaggcgctacgggcgcggcttctttgcggggaaacgaggcgggccgcgcggcctttccctgctcggctctttctgaggtttttcgggcctcgccttccgcgcagctgcgtttgggacctgccgcgcggcgggggcgatgagagcggcgggacccgggccaggccctgcggggtggacgcgcggctggggagggtgcggggaggggcggggccggggaccctgcctgggggcctagcgctgggggaggccgaggcgggcggatcgctggagcccaggatcctgttctagatcagcctgggctacagagagagacctcgtctcctctgttttatttttttgggcagggagtcccgctctgtcgcccaggctggagtgcagtggcgcgatctcggctcactgcaacctctgcttcccgggttcaagcgatcccgctgcctcagcctcccgagtagctggaattacaggcgcccgccaccaggcccggctagtttttgtatttttagtagagaccgggtttcaccatgttggccaggctggtctcgaactcctgacctcaggtgatccgcccgcctcggccttccaaagtgctgggattacagacgtgagactccgcgcccggcccttctcttgtaaaaacaagaaaaattagacaggctggtggtgcgcgcccgaggtcccagctattaatactcccgaatccgagccggaggttcacctgagcccggcaggtcaaggctgctgtgagccgggatcgcgcc

SEQ ID NO: 2775 - DNA, 6000 bp, Homo sapiens
atcctggctaacatggtgaaaccccgtctctactaaaaatacgaaaaattagccgggcgtggtggcgggcgcctgtagtcccagctactcgggaggctgaggcaggagaatggcgtgaatccaggaggcagagcttgcagtgagctgggatcatgccactgcactccagcctgggcgacagagcgagactccgtctaaaaaaaaaataaaataaaaaaagaacaagataaaaaaagaaaggaagacccttcctttgtctgaaggtattccttggatcaccttcaactcaagagcagaatgaccatattccaagactaggatccttacttctcatgaaagattataaccacttgtggtaggcaggcaggatgacaccccccatgaaagacccacatcctaatcccccaaacctgtgaatgttatcttacaagacaaaagggtctttgcagatctgactaaattaagggccttgagattctgcttagctgggtgggcgcagtgtaatcacaagaatccttgtagagtgaggcaggagagctagagtcaggaaggagaaagggatgggagagagagggtaggggggagaggagatgcaacccttggttctgaagatgaagaagcagcaaggaaacagattctcccccgggaaccatcacaataaatataaccaaccagacactttcatattacgacttctgacttctaaaaccgtaagagaataaatttatatagtcactaagtgatcatgtgttactgcagcaataggaaactgatacaccaccatactgtataataaaggtttaatcttttaaatagttgaatgcacccgtaatcaaaaacacagaaaaactatattccaaatcttgctagagaacagcctcagttctgagtcccagatctttatcaaaatcaagagtgaatgaagtgctatttacgaggcatcacctcttaacaggggcgcacggccctctatgccagtcctccaaatatccttgcctcaagtaagttggattaagtagactagaaaactgctcactgggaccatatttcctcccaaaactgctttctctgagctgtgtatctcacttttaatccagggacagtaagaaatctgaaaaatggggataagtgtcacacagggagctaccatcgactggttactatatcacaccgtcccagtactccacacaggctctcattcacagagagctaccattgactggttactatatcacaccgtcccagtactccacacaggctctcattcacagagagctaccattgactggttactgtatcacaccgtcccagtactccacacaggctctcattcacagagagctaccactgactggttactgtatcacaccgtcccagtactccacacaggctctcattcacagagagctaccattgactggttactgtatcacaccgtcccagtactccacacaggctctcattcacagagagctaccattgactggttactgtatcacaccgtcccagtactccacacaggctctcattcacagagctaccattgactggttactatatcacaccgtcccagtactccacacaggctctcattcacagagagctaccattgactggttactgtatcacaccgtcccagtactccacacaggctctcattcacagagctaccattgactggttactatatcacaccgtcccagtactccacacaggctctcattcacagagctaccattgactggttactatatcacaccgtcccagtactccacacaggctctcattcacagagagctaccattgactggttactgtatcacaccgtcccagtactccacacaggctctcattcacagagagctaccattgactggttactgtatcacaccgtcccagtactccacacaggctctcattcacagagagctaccattgactggttactgtatcacaccgtcccagtactccacacaggctctcattcacagagagctaccattgactggttactgtatcacaccgtcccagtactccacacaggctctcattcacagagctaccattgactggttactatatcacaccgtcccagtactccacacaggctctcattcacagagagctaccattgactggttactatatcacaccgtcccagtactccacacaggctctcattcacagagagctaccattgactggttactgtatcacaccgtcccagtactccacacaggctctcattcacagagagctaccattgactggttactgtatcacacaatcccagtactccacaggctctcattcacagagctaccattgactggttactatatcacaccgtcccagtactccacacaggctctcattcacagagagctaccattgactggttactatatcacaccgtcccagtactccacacaggctttcattcacagagctaccattgactggttactgtatcacaccgtcccagtactacacacaggctctcattcacagagagctaccattgactggttactgtatcacactgtcccagtactccacacaggctctcattcacagagagctaccattgactggttactgtatcacaccgtcccagtactccacatatgctctcattcagttttcatgacaacccctacgagggaggccactggtgtccccatttcacacaagaagaaacgcaggcaaacagcacccactgcctcctggggcacactcacctcccaggactgttttaaggatgagatgaggtaacccacataaagcatgtaaggtaaaagccatcacttgtacttatcccagcagcagccttccccctgcctggaggccatcactgagcttggggcagggcagtggagtggagcacgtgagtgcagtcctgtgtcctgaagcagggcagtcagtaaccgtctctaagctccaagttccaacacaccatgtagaccctaagggtacctgcctctctagggcttgcctgatatggacagacagcgatgagcacaacagcagttagggatccttaccacttggtttctcctctgggaagaattttgttcagctaagtgtctgtaaaaagcttcacgttctcacacgttttttctatttttttttttttgagacagagtttcattctttgttgcccagcctggagtgcaatggcgcgatctcggttcaccgcaacctccgcctgccgcgttcaagtgattctcctgcctcagcctcctgcgtagctgggattacaggcatgcgccaccacgccccgctaattttgtatttttttagtggagacgggatttctccatgttggtcaggctggtctcgaactcctgacctcaggtgatcctcctgcctcggcctcccaaagtgctgggattacaggtgtgagccaccgcgccgggcctcatccgttttctgcttatggcaggccagtcctccggtcatgtttaccgtttgctctggccaccaagcagccgcgtcttatccttgctctattttttttgagactgggtctggctccgtcgcccaggctggagtgcggtggcgcgatcccggctcacagcagccttgacctgccgggctcaggtgaacctccggctcggattcgggagtattaatagctgggacctcgggcgcgcaccaccagcctgtctaatttttcttgtttttacaagagaagggccgggcgcggagtctcacgtctgtaatcccagcactttggaaggccgaggcgggcggatcacctgaggtcaggagttcgagaccagcctggccaacatggtgaaacccggtctctactaaaaatacaaaaactagccgggcctggtggcgggcgcctgtaattccagctactcgggaggctgaggcagcgggatcgcttgaacccgggaagcagaggttgcagtgagccgagatcgcgccactgcactccagcctgggcgacagagcgggactccctgcccaaaaaaataaaacagaggagacgaggtctctctctgtagcccaggctgatctagaacaggatcctgggctccagcgatccgcccgcctcggcctcccccagcgctaggcccccaggcagggtccccggccccgcccctccccgcaccctccccagccgcgcgtccaccccgcagggcctggcccgggtcccgccgctctcatcgcccccgccgcgcggcaggtcccaaacgcagctgcgcggaaggcgaggcccgaaaaacctcagaaagagccgagcagggaaaggccgcgcggcccgcctcgtttccccgcaaagaagccgcgcccgtagcgcctccgcccgccccgagcccctccgtcggcggtcggggcgcgccgccctaccccagtcaggcgcggcgagtgcgggcggctgcgggaaccgggcctccctcccgcctcggcggcgccagccgaggacggccccatggcaccctccggagggccggcccgagagcctcaggagggcgcccctcacctgctggcctcgccatccgcgcctgggtccgcgcgccgccgcccgccgctcctcagagacatggagccgttggctaccacctctgcttcaggggagaaatttggcgcgctcccacccagactcgcgagagccggaaatgccgccgtccatcaagaggcgcgctccgcccctcccccgccccccgaggcgctccaattggcgccggcgcccggcgggggaggtggccggcagggaccggggaaaagtgtgtggtaggcgcgcgcggcgcaccgtggggttgggaccgggcggcgctgcgggccgcggtggggccggaaatgtcaggcggtccccactccgctctcggcgcctcgggctccgcgcccggccagcctgaggtggggtcggtgcccccggcggcacggcgctggggaggcgatggcgccggccgcgtccaggctgcgggccgaagccgggctcggggcgctgccgcggcgggcgctcgcccagtacctgctcttcctgcggctctacccggtgctcaccaaggcggccaccaggtgagcgggggcgcgggaatcggacgccgccccggccccaggtcggccgcagcggcgcggggcctggacgggagcgccgggccgggaccaggctgggggcgcgcccgggtcagaacccccggagcgggcgccctccgacccggcgctgaacttcccgcggcgacacccgcgtccgcagtcagcgattgtgaggcgccttgcggatcccgccctcccagcgcgtggagggcccgcccagacccgggggtcggcgctgaggttccacccaaggacccaacaggggccccgcgcgcccggggaagccacggcaaggggagcgggtccgcaggcgcgggtgaagacagggcgaggggagcgggtctgcggggcgcgggtgaagacagggcgaggggagcgggtctgcggggcgcgggtgaagacagggcgaggggagcgggtcttgggggcgcgggtgaagacagggcgaggggagcgggtctgcggggcgcgggtgaagacagggccaggggagcgggtctgcggggcacgggtgaagacagggccaggggagcgggtcctcatggagcgtgtggagacagggccaagggagcgagtctgcggggcgcgggtgaagacagcgccaggggagcgggtcttgggggcgcgggtaaagacagggccaggggagcgggtcctcatggcgcgggtggagacagggccaagggagcgggtctgcggggcgcgggtgaagacagggccaagggagcgggtctgcggggcgcgggtgaagacagggcgaggggagcgggtctgcggggcacgggtaaagacagggccaagggagcgggtctgcgtggtgcgggtgaagacagggccaggggagcgggtctgcggggcacgggtgaagacagggcgaggggagcgggtcttgggggcgcgggtgaagacagggccaggggagcgggtctgcggggcacgggtgaa

SEQ ID NO: 2776 - DNA, 6000 bp, Homo sapiens
aaccttgcaattaagaaaagcaacaaagctgatgacttccttcaacattttctcttttatccccagtagtgactccaccccacaaaggcttctccacagtgacaaaagtattttttccctttattaggaagtgatgtttaacaaaatcatgaaatatttatttatttctttatttattcatttatttatctttttaagacagagtcttgctgtcgccgaggctggagtgcagtggtgcaatctcagctcactgcaacctccacctctcgggttcaagctattctcatgcctcagcctcccgagtagctgggattaaaggcatgcaccaccatgcccaggtaattttttgtatttttagtagagatgcagtttcaccatgttgcccagggtggtcttgaactcctgagcccaggcaatctgcccgcctcggcctcccgaagtgttaggattacaggcatgagccaccatgcccggccaaaatcatgaaattttttaaattccaaagtgaccttcacatagatttaagtaacagtatatttagatgctgcttctgtgcagacagtgtgggcacggcagagctgcagctgcctaactcctattccacgtgtgagaacatgcaggagtcaactctgcagccctgcaatcagcacattagacctggagcacccacacagacagtgatgcgaatgatctgagctgttccctagttatcaaaacccgccctttagattatccttaaaattttggtatcattggttgatggaatacaggctgacttttccttctggcatgatctcagctcactgcaaccaccacctccccagttcaagtgattctcctgcctcagccacctgaatagctgggactacagatgtgcaccaccatgcccagctaatttttgtatttttagtagagatggggttttaccatgttggctaggctggtgtcaaactcctgacctccagtgatccaccgcctcagcctcccaaagtgctgggattacaagcatgagccaccacacccagccaagagttcacaacttttcattgttggtctgatggtagcaagtgtccactctgtccagagaggacatgtcaggtgcagtggcttacacctgtaatcccagcactttgaaacactgaagtggatcattcgcgcccagaagtttgaatgttagccaggcatggtggcatgcacctgtagccctagctacttgggaggctcaggcaggaggatcacttgagcccaggagtttaaggttatgatcacaccactagactgcagcctgggcgacagagtgaaacccccaactcttaaaaagaaaaaagagagaacataagtgctagcctggccaagggatgatccccaagcccatgtcttccaggccagaaaggggaattctaacaggttgggaagatgcactgagagatgcatgtgtctggcctctaggcaaacccaagaaaacccacatcctccttcacctgcaggaagagtgaaggagttcttcaccaaggcctgaaacctcagatttccagaattacttctggaaagtttctaacaacaaccttgggtgctgagagacattttttaaatcttggcagtttgatataggtaaatctattgctggtgcattggacttacaacaaaacatcctggaaacctaatgagtctatacagcaaagggattatcacatccactacattctagaatgcctgaccaatgatgaatgaagttgaatagatagtaaaggatttctagcttgaatctttgttgtaataagagcagaacaataccataatagttgtcacacctgtatttttgctttcttcaaaaatagcaataattatatagtagttggatggttcttcaagcattctataggtttttattacacattttttttagatgggatgactctatcacccaggctggagggcagtggcacaattacaactcactgtagcctcaacctccaggtctcaagtgttcctcctgcctcagcctcctaggtagctgagatgacaggcacatgccaccatacctggctaatttttgcattttttgtagagatgggttttcaccatgttgcccaggctggtcttgaactcctgggctcaagcaatccacctgcctcagcctcccaaagtgccaggattacaggcatgagtcaccgtgcctggcctatcatttcttggaggagagttttaacagatatagaattcatggttgccggtttgtttgttttctttcagcactttatatcatcccactgccttctggctcccatggtaatagattggctgttaatcttattcaagttcctttgtatgtagtgatcatttctgtctagctgcttttaagcttctctctgtctttggctttcaacagtttgattattaatataactctattgtggactttttgagtttatcatacttgaagttcatggagcttctctgaagtgttacattatgtattttaacaaattggggactttggagccactgtttcttcagatactcttcctgccaccttcaccctcatctttctttctgggaccccctttatgcatatgctgatacacttgatggtgtccacaaatcttttggactttgatcttcattcttctactttctgctcctcagagttaataatttcaacagttttatcttcgagtttgctcattccttctcttacctgctcaaatctactctggagcatcacttgtgtatttttcatttaagttattgtatttttttctttttcttttcttcttcttttttttttttttgagacaagatattgctctgtcacccaggctggagtgcaggagtgtgatcttagctcactgcagccatgaacttcttggctcaagtgatcctcctgccttagcctcctgagtagctagggccacaggcatgcaccaccatgcccggttaattttgtaatttttttgtagagaggggatctccctatgttgccaaggcaaactcttggtctcaagcgatcctcccgccttggcctcccaagacactaggattacaggcatgaaccaccatgcctggtcctattgtactttttaactacacaatttctttttggttcttttcagttccaaaatgtgtttggttccttttataatttctatctctttattaatattccttatttgttttttaaataatttcaacttttattttagattcagagggtacatgtgcaggcttgttacctacatataattcgtggtgctgaggtttggggtatgactgagcccctcacccggggactgagcatagtacccaatagtttttcaacccttgcccctccccctccctccctgtctagttgtccccagtgtctattgttgccatctttatatccatgagtacccagtgtttagctcccacttacaaattagaacatgtggtatttggttttctgttccttcattaattcacttacgacaatggcctccagttgcagtcacgttgctgtgaaggacatgattccattcattctttttatggcttcgtagtattccatggtgcaaatgtaccacattttctttatccagtccattgtcgatgagcacctaagttcattccatgtctttcctattgtgaagcgtgctgtgacgaacatactagtgcatgtgtctttttggtagaatgagttctcttgttttgaatatgtacccagtaatgggatagctgggttgaatagcagttctgttttcagcactttgagaaatcttcaaactggtttccacagtggttcaactaatttacattcccactgacagtgtataagcatttccttttcaataaagccttgccagcatctgttgttccttgactttttaataataaccattctgactggtgtaagatggtatctcattgcagttttaatttgcacttttctgataattagttatgctgggctttttttcatgcttgttgaccatttgcacatcttctattgcatattctctatttattgagactttgttctcctggttgtttctttcagttatttttctatgtttcctttcactttttgtccatgtttaagacagtttatttgaagtatttgtctaataattcctatgtctgtgcttcctcagctcagggacaatttctgttcatttcttttttcctttgaattggccattttttcgcctttttttttgcatgcctcataattttttgttgaagattggacattttgagcattacgatgtggtaactctaggaatcagtctctctcctcccccagaatctcttgttgtttcttagacaaccctatagagtaggttgtaatgatgaaacttggtaaattaccttgtccccagcccccttggtaataaattgtggagtcaggattcaaccccataccctttccactgtattctctactctatcctttctattctcattttattcagtatcctaaaaatctgaatcttccccattgctttattcccatttcagtgaatctcagatctgtatctccagccccctgcctctcttgaatggcagataaatatatttccaactagttacactgtcacgaatttcaaacgcaggaaggcttaaagtaaatttattatctcactctcctgtttccacgaactttcccgaaattttcttctttcccggccttgtgaatcccttccatttctcagttaaaggacagcaccatccacccacctctctcaaagccgagctttgtattaatcctcattgacaaaatccctcctgaaatatgaaactgaaagccctgaaccctccggctgatcttggaagagaaaccccgccagaggccggggacccgctccccacctggcggacccgattccgggcgcgttccggctatcgtccctgcttgggacgctgcgcccgcctggtgcggggcggggttccggcgcagtggcgcccgcccagccccgggggcagggagagcctagattacggaagtaccgcgagcaaggagcgcggaatcggggagcgtccggagctagctggatcctctaggcaggtgcgtgggcgctgcggggtggggggctgcaaaggtccctgtagtcctagccaggaagtggcccgcgtactactttcccgccagtggctgcacccttgccctgcgcggcgttggcgctgtgggcctgacggcgctgctaggctcgggagtggactagctagtgcagccagcgccctcggggagggatattgcggtcgttccgctctgccccgcggcgcagccctggtgacgagaaaccgggtgcggtggggggcgcccaccggagccgacagtcacaccaagtctccgcaccccgtgcggtgcggttcgcagtagcacgcgttgtttcttgtttccagtatgccaaacggccttctttcctaaagttaggtttcgaattgtgcaaaaagtaaggtggtttggtgagtaatcaggaagtactatctgacctcgtgagtcattgggaacaccgtgatagaaacaatgtgtttgttgaggtccaaagttgaaaacctctaactcagttaagtaattcctgctaggagggccgaatggttcacccagggatcgagttggtagatcacaggttctagaaaactaaggcgctgctaaatattcaagcccaagcactttcaattctggactgctggatgacaacaattatatgacaatatccaagcatagtgctatgataaaggggaagttcgctctgagatgtgcgtgttgcagactcattacatctgactttatcatttattaagtaaacattaggtcttgtttgtgtgcgtagagctactgtatatcatgtaggagtgaaataaaagtagtacctttgttgtttaagggtttaataaacccattagggaggtgcattactgatgccatttgagtccaaaatgcaaatagtgtcagaaggcttttctgtaatcctgggctttaatggatacgtgagagtttttagtaagcaagcttttatt

SEQ ID NO: 2777 - DNA, 6000 bp, Homo sapiens
gttcaggcctcttcgactggatgactttgtaatttgggataaaacacccaataacttggccgggtaccagggctcatgcctgtaatcttagcactttgggaggctgaggcgggcagatcacttgaggtcaggagttcaagaccagcctgaccaacatggtgaaaccgtctctatcaaaaattcaaaattacccaggcatggtggtgcatgcctgtagtcccagctactcgggaggctgaggcacgagaattgcttgaacccgggaggtggaggttgcagtgagctgagatcgtgccattccactccagcctgggcaacagagcaagaccctgtctcataaaaacaaaaacaacaacaacaaaaacccaataactgtaaagtaaaatatgtcaacttgtgactaaggattcatgtggaagaagaaaagcgtctaatatcataaaggaacatcaagattgtggggttagagctagaagatgttggttttattttaaaatttctgtcttttttatgttcttccctgcctatatcacagaaaatcaaatataagaaatgaattgcctgcaagtggtggtttttaaactcttctctctgatatagtctctgttaaacttgggaataaataaaggtaccatcaccagactaggggaagattagcattgtttgaggttaggatttaaaaaaaacaaaacaaggccgggtgcagtggctcatgcctgtaatcccagcactttgggaggccaaggtgggcggatcacctgaggtcaagagttcaagaccagcctgaccaacatggtgaaaccccgtctctactaaaaataaaaaattagccgggcatggtggcgcatgcctgtattcccagctactcgggaggctgaggcagaagaatcgattgaaccaggaggtgtaggttgcagtgagccgagattgcaccgctgcactccagcctgggcagtaagagcaaaactctgtctcaaacaacaacaataacaacaacaacaaaaaattcactagatttgcaatcactgccttcatataagattaaaatatgaagaaaaactcaaggttaactgcacttgaggttttctaaattatgggattgaaggggtctatataattttaaacattaaaaaaagtttaatctttacaaccctgtggtcccctccattttatagctgagagaattgaagcatggaggtttaaaaacatgcccaagatcatacagctagtaagtagcagagctgggatttgcacccaagtctattcaattccagtgcctattactcaccatatcatcctgtcaaaatagaaaccttgtgtgggcccattgctctcaagatgtcctgtggccataaatgcaccctggcaggagcaagctggtatagacaaccagtaaagtgtatggccgtgccagtacaaagccaacactgctcctggaaaatattgatagtgccatattcaactaatcgtcaaattttaatatcatcgatgccactgaaagtatcttaatcattctcatgaatattttgtaatatgagacattgagaagataagacagtattgaaataaatatctagatttaaaaaatataaaatttgaatgattagtagagggaagcagaggatagtaaatatgtgtgaaaataataacataaaagttaactttagatatattatctttaaacactgcatgtgcagtataccaatttatatcctctttaatattatagtctttttcatgtgcatgtgtgatatattgtccattcaccaagactataatccctgagtccgatagtgtattttcttttaaaaagaaatcaacattaaaacaggaaagattatctaagcttactctcaagtagtttaatacatttgaggaaataaattaggttatggatgcttataagcgatataaaaaatcaaattaacacgatgtaggtgatttattccaaatttgatctgttacatttggaggaattggttgttggatttagaagtgtacaaaataccattagagagtgaaaaaaaagggaagtctgttataactgaataggggcgtggtctgctcaggctaaaaggaatagatagtagtttcataaaggactgatataactgtagagtcttcagaactggccactacagccagcacattttctctacagacgtaagtatgtctattaataccagccagcttggtgagttagagaaaccacagcctgtggatttgggcacatgcactctctgcctgcatctaatccttcgggtaaccatatacctacaactcctgtaatcctagagcagttacatggatgcactaagtggtgtgatgggagggaaagatagcatcacaaggattcgtttgattgtaacagtaatccacaccaagtcaaataaaatagccaaacagtttagaatgtggtctctaatgaatttgctaattctaccagggcctcacaaacatttcctgctagagtaccccatatcaaaccaagtggctgttctttaattacatggaataattatttgatttccaggaagttaagacagtgctttgtatttaaataaaaagttctagacatgctgtgaaactcgatcaaaccaagaaaaagggtgaaactgaatgcctgctcactgactcaagatttcagctgctcagcgagcctgacgtgacggcttatgagcccagaaaaggggtattttaaacccggctggctggatcatgtcactttcttatagaagccctgcctttccagagacctaaagtgtaacgcaatcagagacctttgaggggctcgaggctcggcggcttccgcccctcagcaccagcagagaccccagttttcaggggacatgatcccatagtgtcgccctcacttttgaagggccattaaaagcctggggcctcttatctcaacggctttgggcgtgaatgtggggcaagaagggggggggagacctgtgggtgtctcttttgcctgaggagttggagacacttgtggaaaagtcaggcccttttcgctccggcggccgctccggtgtggggctggcttgggttagacacatgcacacatacaccatagagctctgctttcccgtagcagctgctgcctctgcctctgcctctcccgcctcagcctctttgcccggcatacacacacattcagatttgcgcgctgtttcaatccttgatgacgtgtccccggagacagccaatagcaaacgggctctggtcaggacaatgggaggtatcgggccaatgagcgagccccgtgagttggcggtagccaataggagccgcgctggctggagagtaatgttacagagcggagagagtgaggaggctgcgtctggctcccgctctcacagccattgcagtacattgagctccatagagacagcaccggggcaagtgagagccggacgggcactgggcgactctgtgcctcgctgagggtgagtctggggcagcgccgcggcggggagagcgcctccggcagctccccagcccgcgcggcggccggatccccgcggccgggagccggcgggtcaggatccacacaaaggcaaatgaggggggaccgtggggggaactgcgcacggagcgagcctctgcccgggcgccgggaacgctgccccgcgccggtgccccggccctcaggcagcctgaggcgccgggagccccgcgccccgcgagtttccacccccggcggcgtccgcgctgactggcgcaaaaaaaaaaattttttttttaattaaaaaaattttgaacgtgttttgggccctcgggccgggcgttcgggcgggcggcgtgcgcggagcgcggccggggcggcggggccggcgcggctcggcggcggcggcgggagggcagcggcggcgcttccccgggctgcattggccgccgccgcagcgagccgggcgctggcggggagcgcggccagccgggcgggcggcggggcgggcggggcgccgcggcgggcgagggcggcgcgggggcctgggggcggcagtgcgggcccggccggcctcggcccggtcgcggcggcggcggcggccgggcggcggggggagcggcgccgctgcgctcgctggaacatggctgactcgggcccggcgctgctggctggagagaaaacaaggcgggcgggcgggggagctgggcgcagcagttccgaggcaactttttttttcctctctcttttcacagccccgcgttctccgtgcgggggcggcggggcgcgcggcccgcgcggagggagacggggagtggcgggcgggtgggccctcgggcggcccccaccgcggcggggggaggggagcggcgcggaggggagggcccggccgcgcgccccccgcccctcccccggccgtaatggccgagtgtgtgcgccagagcgcggctcgcaccccgcccgccgccgccgccgcgcccgcaccctcgcactcacacactctctcatacacacacacacacacacacacacacaaagggaaggagccatattctcgctcgcgctcgccctcgcggcggcggcggcgcaggcggagaagacgcgcagcggccattccgtgcgcgccggccccggcggccgcgggcggagccagcccccatttcgagcggggcttctccctgcgccgagcctgacaaaatgggggcggcggcggcgcgggcctgcagggcctgccgggcgcacgtggcggcctcgggcctgggagccgggccgcgtcctctctcctcggccgcgcggccaccggcgaagttctaggggcggggggctcgccccgcgcaggagtcaccccaactttcacggctccaaaaaatacttcccgagttgggggagggggccaccgagccacgagcaggagtggcttttgtccctcatccttgtttactcggagaaacttcagaccggacgtgtttagtcagaacagaaatacatctcagggccaaaccgataggaaacgaggctgcctcgcggtggcaccgccaccccccaaccgggttccgagcaccggagctggctgctgctccctctttggagcaaagttttatgcaaagagggtgttttttgaaactttcggtgcacggtgattttttttttttaaggtcccataattaggaagagtcgactcgcttaggcccttgtttattccctatctagtgcaaagccacgaattggcagcatgttttctgacctttggtttggttggtttaaaatggtgttctagattttaaaatcgtttaagtgaccagttagatactcattcagagcagactcgggcggatagatagggaatactgtatgggtatatctttgtgtctagactttttgagatcgccctgaaggactgtttttgttttgttttgtttgcttggcatagccccttcaaggaatttaatctctcggccatattcttgtctgattttacggaggttgatgtcgctactgtgttaaataaccagtactttggttttcattcccttactaagtactttaaggtcttatatgtcataattttattgctaacatcaaatatttattttattttttagaaaaataactaaacatgggcaaaggagatcctaagaagccgagaggcaaaatgtcatcatatgcattttttgtgcaaacttgtcgggaggagcataagaagaagcacccagatgcttcagtcaacttctcagagttttctaagaagtgctcagagaggtggaaggtaagagggcttaaaacatgctaacaaggtaattaaaagacagtttccaattgaggatgcaaaaaaaagcctagttggcattctcgtagtgggacgctattacatagcaaaagacattggttttgaggataatttacttaaatgttacaacttaaacttacaaataattattttgtagaccatgtctgctaaagagaaaggaaaatttgaagatatggcaaaagcggacaaggcccgttatgaaagagaaatgaaaacctatatccctcccaaaggggagaca

SEQ ID NO: 2778 - DNA, 6000 bp, Homo sapiens
aggagtttgagaccagcctgagcaacatggagagaccctgcctctacaaaaaaaaaaatagccagcaccaggcacggtggttcatgcctgtcatcccagcactttgggaggccaaggtaggaggatcacttgagcccatgagtttgagaccagcctgggcaacatggagagaccttgtctctacaaaaaataaaaataaaaataaattagctggggctgggcacagtggctcatgcctgtaatcccagcactttgggaggccaaggcgggcggatcacaaggtcaagagatggagaccatcctggccaacatggtgaaaccccgtctccactaaaaatacaaaaataagctgggcgtggtggcacgcgcctgtagtcacagctgttcgggaggctgaggcaggggaatcacttaaaccaaggacgcagaggttgcagtgatccaagattgtgccactgcactccagcctggtgacagagggagactccgtctcaaataaataaataaataggccgggcgtggtggcactcacctgtagtcctggcttcccaggaagctgaggtgggaggatggcttcagtcccagaaagtcaaggctgcagtgagccgtgatcatgccactgcactgcactccagcctgggcaatacagccataacctgtcttagaaaaaaaaaaacaaaaaatacagagttcttgcctttaaggtgtacagtgcagtgggacaagcagatacaactggagaaccacaattgtgattgcagtaattaatatacacaatattacaggattacagaaaagaggtacgtcccctatcctagaggggatggaggaagggcataaagtacattaatgacgatctgtaattcagttgtttaaattgagcatgggagagggtgttcaggcctcttcgactggatgactttgtaatttgggataaaacacccaataacttggccgggtaccagggctcatgcctgtaatcttagcactttgggaggctgaggcgggcagatcacttgaggtcaggagttcaagaccagcctgaccaacatggtgaaaccgtctctatcaaaaattcaaaattacccaggcatggtggtgcatgcctgtagtcccagctactcgggaggctgaggcacgagaattgcttgaacccgggaggtggaggttgcagtgagctgagatcgtgccattccactccagcctgggcaacagagcaagaccctgtctcataaaaacaaaaacaacaacaacaaaaacccaataactgtaaagtaaaatatgtcaacttgtgactaaggattcatgtggaagaagaaaagcgtctaatatcataaaggaacatcaagattgtggggttagagctagaagatgttggttttattttaaaatttctgtcttttttatgttcttccctgcctatatcacagaaaatcaaatataagaaatgaattgcctgcaagtggtggtttttaaactcttctctctgatatagtctctgttaaacttgggaataaataaaggtaccatcaccagactaggggaagattagcattgtttgaggttaggatttaaaaaaaacaaaacaaggccgggtgcagtggctcatgcctgtaatcccagcactttgggaggccaaggtgggcggatcacctgaggtcaagagttcaagaccagcctgaccaacatggtgaaaccccgtctctactaaaaataaaaaattagccgggcatggtggcgcatgcctgtattcccagctactcgggaggctgaggcagaagaatcgattgaaccaggaggtgtaggttgcagtgagccgagattgcaccgctgcactccagcctgggcagtaagagcaaaactctgtctcaaacaacaacaataacaacaacaacaaaaaattcactagatttgcaatcactgccttcatataagattaaaatatgaagaaaaactcaaggttaactgcacttgaggttttctaaattatgggattgaaggggtctatataattttaaacattaaaaaaagtttaatctttacaaccctgtggtcccctccattttatagctgagagaattgaagcatggaggtttaaaaacatgcccaagatcatacagctagtaagtagcagagctgggatttgcacccaagtctattcaattccagtgcctattactcaccatatcatcctgtcaaaatagaaaccttgtgtgggcccattgctctcaagatgtcctgtggccataaatgcaccctggcaggagcaagctggtatagacaaccagtaaagtgtatggccgtgccagtacaaagccaacactgctcctggaaaatattgatagtgccatattcaactaatcgtcaaattttaatatcatcgatgccactgaaagtatcttaatcattctcatgaatattttgtaatatgagacattgagaagataagacagtattgaaataaatatctagatttaaaaaatataaaatttgaatgattagtagagggaagcagaggatagtaaatatgtgtgaaaataataacataaaagttaactttagatatattatctttaaacactgcatgtgcagtataccaatttatatcctctttaatattatagtctttttcatgtgcatgtgtgatatattgtccattcaccaagactataatccctgagtccgatagtgtattttcttttaaaaagaaatcaacattaaaacaggaaagattatctaagcttactctcaagtagtttaatacatttgaggaaataaattaggttatggatgcttataagcgatataaaaaatcaaattaacacgatgtaggtgatttattccaaatttgatctgttacatttggaggaattggttgttggatttagaagtgtacaaaataccattagagagtgaaaaaaaagggaagtctgttataactgaataggggcgtggtctgctcaggctaaaaggaatagatagtagtttcataaaggactgatataactgtagagtcttcagaactggccactacagccagcacattttctctacagacgtaagtatgtctattaataccagccagcttggtgagttagagaaaccacagcctgtggatttgggcacatgcactctctgcctgcatctaatccttcgggtaaccatatacctacaactcctgtaatcctagagcagttacatggatgcactaagtggtgtgatgggagggaaagatagcatcacaaggattcgtttgattgtaacagtaatccacaccaagtcaaataaaatagccaaacagtttagaatgtggtctctaatgaatttgctaattctaccagggcctcacaaacatttcctgctagagtaccccatatcaaaccaagtggctgttctttaattacatggaataattatttgatttccaggaagttaagacagtgctttgtatttaaataaaaagttctagacatgctgtgaaactcgatcaaaccaagaaaaagggtgaaactgaatgcctgctcactgactcaagatttcagctgctcagcgagcctgacgtgacggcttatgagcccagaaaaggggtattttaaacccggctggctggatcatgtcactttcttatagaagccctgcctttccagagacctaaagtgtaacgcaatcagagacctttgaggggctcgaggctcggcggcttccgcccctcagcaccagcagagaccccagttttcaggggacatgatcccatagtgtcgccctcacttttgaagggccattaaaagcctggggcctcttatctcaacggctttgggcgtgaatgtggggcaagaagggggggggagacctgtgggtgtctcttttgcctgaggagttggagacacttgtggaaaagtcaggcccttttcgctccggcggccgctccggtgtggggctggcttgggttagacacatgcacacatacaccatagagctctgctttcccgtagcagctgctgcctctgcctctgcctctcccgcctcagcctctttgcccggcatacacacacattcagatttgcgcgctgtttcaatccttgatgacgtgtccccggagacagccaatagcaaacgggctctggtcaggacaatgggaggtatcgggccaatgagcgagccccgtgagttggcggtagccaataggagccgcgctggctggagagtaatgttacagagcggagagagtgaggaggctgcgtctggctcccgctctcacagccattgcagtacattgagctccatagagacagcaccggggcaagtgagagccggacgggcactgggcgactctgtgcctcgctgagggtgagtctggggcagcgccgcggcggggagagcgcctccggcagctccccagcccgcgcggcggccggatccccgcggccgggagccggcgggtcaggatccacacaaaggcaaatgaggggggaccgtggggggaactgcgcacggagcgagcctctgcccgggcgccgggaacgctgccccgcgccggtgccccggccctcaggcagcctgaggcgccgggagccccgcgccccgcgagtttccacccccggcggcgtccgcgctgactggcgcaaaaaaaaaaattttttttttaattaaaaaaattttgaacgtgttttgggccctcgggccgggcgttcgggcgggcggcgtgcgcggagcgcggccggggcggcggggccggcgcggctcggcggcggcggcgggagggcagcggcggcgcttccccgggctgcattggccgccgccgcagcgagccgggcgctggcggggagcgcggccagccgggcgggcggcggggcgggcggggcgccgcggcgggcgagggcggcgcgggggcctgggggcggcagtgcgggcccggccggcctcggcccggtcgcggcggcggcggcggccgggcggcggggggagcggcgccgctgcgctcgctggaacatggctgactcgggcccggcgctgctggctggagagaaaacaaggcgggcgggcgggggagctgggcgcagcagttccgaggcaactttttttttcctctctcttttcacagccccgcgttctccgtgcgggggcggcggggcgcgcggcccgcgcggagggagacggggagtggcgggcgggtgggccctcgggcggcccccaccgcggcggggggaggggagcggcgcggaggggagggcccggccgcgcgccccccgcccctcccccggccgtaatggccgagtgtgtgcgccagagcgcggctcgcaccccgcccgccgccgccgccgcgcccgcaccctcgcactcacacactctctcatacacacacacacacacacacacacacaaagggaaggagccatattctcgctcgcgctcgccctcgcggcggcggcggcgcaggcggagaagacgcgcagcggccattccgtgcgcgccggccccggcggccgcgggcggagccagcccccatttcgagcggggcttctccctgcgccgagcctgacaaaatgggggcggcggcggcgcgggcctgcagggcctgccgggcgcacgtggcggcctcgggcctgggagccgggccgcgtcctctctcctcggccgcgcggccaccggcgaagttctaggggcggggggctcgccccgcgcaggagtcaccccaactttcacggctccaaaaaatacttcccgagttgggggagggggccaccgagccacgagcaggagtggcttttgtccctcatccttgtttactcggagaaacttcagaccggacgtgtttagtcagaacagaaatacatctcagggccaaaccgataggaaacgaggctgcctcgcggtggcaccgccaccccccaaccgggttccgagcaccggagctggctgctgctccctctttggagcaaagttttatgcaaagagggtgttttttgaaactttcggtgcacggtgattttttttttttaa

SEQ ID NO: 2779 - DNA, 6000 bp, Homo sapiens
atggtgaaaccccgtctctactaaaaatacaaaaattagttgggcatggtggcacacgcctgtgatcctagctacttgggaggctgaggcaggagaatcacttgaacccaggaggcagaggttgcagtgagccaagatcgcgccaccgccctccaacctggacgactgagtgagactccgtctcaaaaaaaaaataaaataaaacaataaaaagccaattggtaacaatctttgggcagacaatcttgcagttttctgtgataaagtctaatttggcttgccatagttcactgtatccaccaaggaataatcttggcctaattggaaactggtaaatgcttagactatatgtgtttctctacatttgagatcccctctcaccctccaactgtgcctctccctttttaagttacgtcaatgagatgtaattggcacctatcctcaatcttagtatcctaacattcgcttcttattctattttcctgccttttgatttagaaagacctaaatgcttttagatctaaagatagaagaggaaggttaaaacaataatttgcaatacgtactccttcagctattaattcatttatgcaacgggctttatttaatgcctgctgtatgccaagtactctgctaggtgcttgggattcaaagataggggctgggctcagtttctcatgcctgtaatcccaacattttgggaggccaaggagtttgagaccagcctgagcaacatggagagaccctgcctctacaaaaaaaaaaatagccagcaccaggcacggtggttcatgcctgtcatcccagcactttgggaggccaaggtaggaggatcacttgagcccatgagtttgagaccagcctgggcaacatggagagaccttgtctctacaaaaaataaaaataaaaataaattagctggggctgggcacagtggctcatgcctgtaatcccagcactttgggaggccaaggcgggcggatcacaaggtcaagagatggagaccatcctggccaacatggtgaaaccccgtctccactaaaaatacaaaaataagctgggcgtggtggcacgcgcctgtagtcacagctgttcgggaggctgaggcaggggaatcacttaaaccaaggacgcagaggttgcagtgatccaagattgtgccactgcactccagcctggtgacagagggagactccgtctcaaataaataaataaataggccgggcgtggtggcactcacctgtagtcctggcttcccaggaagctgaggtgggaggatggcttcagtcccagaaagtcaaggctgcagtgagccgtgatcatgccactgcactgcactccagcctgggcaatacagccataacctgtcttagaaaaaaaaaaacaaaaaatacagagttcttgcctttaaggtgtacagtgcagtgggacaagcagatacaactggagaaccacaattgtgattgcagtaattaatatacacaatattacaggattacagaaaagaggtacgtcccctatcctagaggggatggaggaagggcataaagtacattaatgacgatctgtaattcagttgtttaaattgagcatgggagagggtgttcaggcctcttcgactggatgactttgtaatttgggataaaacacccaataacttggccgggtaccagggctcatgcctgtaatcttagcactttgggaggctgaggcgggcagatcacttgaggtcaggagttcaagaccagcctgaccaacatggtgaaaccgtctctatcaaaaattcaaaattacccaggcatggtggtgcatgcctgtagtcccagctactcgggaggctgaggcacgagaattgcttgaacccgggaggtggaggttgcagtgagctgagatcgtgccattccactccagcctgggcaacagagcaagaccctgtctcataaaaacaaaaacaacaacaacaaaaacccaataactgtaaagtaaaatatgtcaacttgtgactaaggattcatgtggaagaagaaaagcgtctaatatcataaaggaacatcaagattgtggggttagagctagaagatgttggttttattttaaaatttctgtcttttttatgttcttccctgcctatatcacagaaaatcaaatataagaaatgaattgcctgcaagtggtggtttttaaactcttctctctgatatagtctctgttaaacttgggaataaataaaggtaccatcaccagactaggggaagattagcattgtttgaggttaggatttaaaaaaaacaaaacaaggccgggtgcagtggctcatgcctgtaatcccagcactttgggaggccaaggtgggcggatcacctgaggtcaagagttcaagaccagcctgaccaacatggtgaaaccccgtctctactaaaaataaaaaattagccgggcatggtggcgcatgcctgtattcccagctactcgggaggctgaggcagaagaatcgattgaaccaggaggtgtaggttgcagtgagccgagattgcaccgctgcactccagcctgggcagtaagagcaaaactctgtctcaaacaacaacaataacaacaacaacaaaaaattcactagatttgcaatcactgccttcatataagattaaaatatgaagaaaaactcaaggttaactgcacttgaggttttctaaattatgggattgaaggggtctatataattttaaacattaaaaaaagtttaatctttacaaccctgtggtcccctccattttatagctgagagaattgaagcatggaggtttaaaaacatgcccaagatcatacagctagtaagtagcagagctgggatttgcacccaagtctattcaattccagtgcctattactcaccatatcatcctgtcaaaatagaaaccttgtgtgggcccattgctctcaagatgtcctgtggccataaatgcaccctggcaggagcaagctggtatagacaaccagtaaagtgtatggccgtgccagtacaaagccaacactgctcctggaaaatattgatagtgccatattcaactaatcgtcaaattttaatatcatcgatgccactgaaagtatcttaatcattctcatgaatattttgtaatatgagacattgagaagataagacagtattgaaataaatatctagatttaaaaaatataaaatttgaatgattagtagagggaagcagaggatagtaaatatgtgtgaaaataataacataaaagttaactttagatatattatctttaaacactgcatgtgcagtataccaatttatatcctctttaatattatagtctttttcatgtgcatgtgtgatatattgtccattcaccaagactataatccctgagtccgatagtgtattttcttttaaaaagaaatcaacattaaaacaggaaagattatctaagcttactctcaagtagtttaatacatttgaggaaataaattaggttatggatgcttataagcgatataaaaaatcaaattaacacgatgtaggtgatttattccaaatttgatctgttacatttggaggaattggttgttggatttagaagtgtacaaaataccattagagagtgaaaaaaaagggaagtctgttataactgaataggggcgtggtctgctcaggctaaaaggaatagatagtagtttcataaaggactgatataactgtagagtcttcagaactggccactacagccagcacattttctctacagacgtaagtatgtctattaataccagccagcttggtgagttagagaaaccacagcctgtggatttgggcacatgcactctctgcctgcatctaatccttcgggtaaccatatacctacaactcctgtaatcctagagcagttacatggatgcactaagtggtgtgatgggagggaaagatagcatcacaaggattcgtttgattgtaacagtaatccacaccaagtcaaataaaatagccaaacagtttagaatgtggtctctaatgaatttgctaattctaccagggcctcacaaacatttcctgctagagtaccccatatcaaaccaagtggctgttctttaattacatggaataattatttgatttccaggaagttaagacagtgctttgtatttaaataaaaagttctagacatgctgtgaaactcgatcaaaccaagaaaaagggtgaaactgaatgcctgctcactgactcaagatttcagctgctcagcgagcctgacgtgacggcttatgagcccagaaaaggggtattttaaacccggctggctggatcatgtcactttcttatagaagccctgcctttccagagacctaaagtgtaacgcaatcagagacctttgaggggctcgaggctcggcggcttccgcccctcagcaccagcagagaccccagttttcaggggacatgatcccatagtgtcgccctcacttttgaagggccattaaaagcctggggcctcttatctcaacggctttgggcgtgaatgtggggcaagaagggggggggagacctgtgggtgtctcttttgcctgaggagttggagacacttgtggaaaagtcaggcccttttcgctccggcggccgctccggtgtggggctggcttgggttagacacatgcacacatacaccatagagctctgctttcccgtagcagctgctgcctctgcctctgcctctcccgcctcagcctctttgcccggcatacacacacattcagatttgcgcgctgtttcaatccttgatgacgtgtccccggagacagccaatagcaaacgggctctggtcaggacaatgggaggtatcgggccaatgagcgagccccgtgagttggcggtagccaataggagccgcgctggctggagagtaatgttacagagcggagagagtgaggaggctgcgtctggctcccgctctcacagccattgcagtacattgagctccatagagacagcaccggggcaagtgagagccggacgggcactgggcgactctgtgcctcgctgagggtgagtctggggcagcgccgcggcggggagagcgcctccggcagctccccagcccgcgcggcggccggatccccgcggccgggagccggcgggtcaggatccacacaaaggcaaatgaggggggaccgtggggggaactgcgcacggagcgagcctctgcccgggcgccgggaacgctgccccgcgccggtgccccggccctcaggcagcctgaggcgccgggagccccgcgccccgcgagtttccacccccggcggcgtccgcgctgactggcgcaaaaaaaaaaattttttttttaattaaaaaaattttgaacgtgttttgggccctcgggccgggcgttcgggcgggcggcgtgcgcggagcgcggccggggcggcggggccggcgcggctcggcggcggcggcgggagggcagcggcggcgcttccccgggctgcattggccgccgccgcagcgagccgggcgctggcggggagcgcggccagccgggcgggcggcggggcgggcggggcgccgcggcgggcgagggcggcgcgggggcctgggggcggcagtgcgggcccggccggcctcggcccggtcgcggcggcggcggcggccgggcggcggggggagcggcgccgctgcgctcgctggaacatggctgactcgggcccggcgctgctggctggagagaaaacaaggcgggcgggcgggggagctgggcgcagcagttccgaggcaactttttttttcctctctcttttcacagccccgcgttctccgtgcgggggcggcggggcgcgcggcccgcgcggagggagacggggagtggcgggcgggtgggccctcgggcggcccccaccgcggcggggggaggggagcggcgcggaggggagggcccggccgcgcgccccccgcccctcccccggccgtaatggccgagtgtgtgcgccagagcgc

SEQ ID NO: 2780 - DNA, 6000 bp, Homo sapiens
attctatactctctttagttcagagtatatatactggttttggactaaccaatttccaaaatactcttccaggtacattagaaattcataacttttcccatcagttgcaaagataaaccaaagagatgagagagtaactactatatgctaatagctaacaaggacctccaaaaggttaaaaaaaaagaaaaaaaccttgaaatgtattttctcctctcgcaaatcaaatggcaataaaaacgaacatctttacgcaaccaagtaaaggtaggtggaaaaataacattgtataccagacagacttacaaactgagattacatattaaaaatctagtctaaaaaacaaaaaatgagtaaacttttaaaacaattaataaaaaagcaaaagaaaaaagaaaaatcttatatatactatataagattaatactttacctgcagatcctcacacaaaaagatagattcttgaaaactaattcggtaagtctttaaggcttttaactttcccttctctctacaagcagggcaatactcatctgatggaactttagctgaatcaaaattctaaaagagaaataaagcaaattaaaatatagacattcctagaatatatcaaaatattaaaagttaaatggaaaggtaaccagaaaaaattataattttcaattacaagtatcctgacaaggtattttaaacatggcaaacaaaagaaatgcatataagcctttaaatacagctattattccaaaaagaattatgttatagttttaaatattaaattttatgtgttaagaatagtatcaattttatttgcaaggaaaaaagtaacatcaattacccgggagaatttatgtaccatattttcaaagaacagtaaatcataaggtctatgttttatttccactttcatgtatcaataaaacacagaaaggtaaacacattaaaacaatctttcgccattactgtaagatttccgtggaagacacaattttttagaagttaactggtaacatcaaaattgaatttaagtctcaaaaatagagaaaaaaaaaaaactttgcactcaggcaaaaaataagttcactaacttttcccaaataccccaccatgtggagtgaagatatccctatatcagtccctggtccaatcactggcaaaccatttccaatcttcggagaatccatcattccgagtcattggctaatttatgtcacttgagacatgtcaatatcactaaggattttttcaatgaaccctggaaaaaaaaagtcaatagacaattaaataaaaattctatttactataaaaaagaaccatgctattttataagacgtatatagtaagcagattttgagggctatatgtcctagaataaacatattctaaaattataatcttgaagtgaaaatgatacctatatttataaacccagcaaatttgtgaacagagggtagtgactggcaacaggaccggttttcatagcagactcatttgtcaacaaattaaataaaacttgtagtagaggcagctactatttaaagcaaactatattgaccagaatttgaaagcctaactttttagagtctatgtacaatttgaaacaaatatgccagcattatactgagaaaaaccccagatccattgtgccactatttgacaggaacaaaagaaccagtgaaccatatattccatacattcctattgttttcaactaccaacattaatacttcaccagttgggaaaaatactacttattaaaagctgctaacaaattattatttgtaaatgatctaatttacaccacatttaacttattttgttatctgaacaaaaatataaacactgtcctagtacaaattacatatgtggcaagcttgttttgagtgcagtcctatggtgcagaaccacatttaacagagtaaaaattacaagagaccggagctcagtgtaagcaaaaaataattaagagcattttaattgtgggttcacaatgataggaaaatcaaatacaggagacctttagggcagaggagaattaccacttagcagaaatgttgtaaaataattctaggcataagtctttcccaaatccaagaatccatgattctatgacacccatctcctgggaatcgatggctcacaattcactttaaaatctaattacgctattctggttcggctatataaacttcacaaacctttcaagccaaggaataatttcaaaaataaaactgctttttaaagaaagtatcggcgaatcttaatttcctattcctgaagaaataaccataagacagaaatttctcaactgcagcactacaaatatctttgaccaaataattgtttgtgaaggctgttctatgcactgacgatgtttagcagcgtcactgacctttaccctctagatccaacagccaaaagtttcctgacttgccaaatgtcccctggtaagcaaaatcaccccttctggtgagaactactgatgctaacttttttctttctttttaggcacagacaacttattacctttggctggttctatttataatctacttacaaaagagaactatgtaggagtcaaacttacgcttttcaggctttgtacctgcagatgttggtccagacacttacttgtaaaattagtttcttctaagaattaaatgagataaagcatgtaaaaagtttagcacctgacaaattaaagttactatttggtgctaattttatacttcattctgcgtagagaagcagtacacgtcgtatcattctgcggtactctcaaatgggaaactagtaggctatgtaccttgaataaactgtttttgatgaaaatttccatctacctgagggaacctagaaaactttttcaaatcaaacggttttctctttgtctctctcaattataaaatataaagagtctccaaatctgctctcctgattccatcacccaacatttcagcgggaaaaaccagataggttggtggttgaaatcccgaatatatagaatcccccaaaagaaaattcatttaataccagaggtttatttgtccatatgagggacataaaaaaaataccagaggtgggctccccagttcttcttccaaatacaattcactttgacttacatacaaaatcccgggggggattttacaacttaatttgaccctaagtaactgctcttcctcccttcaaaaacaatctgctcctccttcccatatctcacttaaatgtgggcgtctccatccttccaaacacacagactagaaagtcttgagttgttccctattctttatttccctcttcgcacagtaagtcaccaaattctgtggacagttctttggaaaggtctcaaatctctacctctttcccttccatatcactgtcaaaatgatgcctctacaagtctgagcctgtcaatgcttagtttaaaattctctatttactctagcctgattacagcaaactccgtccaaacagcccaatataacctaaaggtagtattatgacctaaagctcattgtactgtgaaaccaacctagctttccagttctgtcttcctcaactctacttcacccccagcatctttcttctaacatccccttttcatacttctgtgaaccacttatactccagaagccttaatgtgaattattagcccagcatgaacccagttagatagcacaatgaacgtgtcaaggtggccctgggaatcgcaaaaagtattcaattaaacttaattcacactcctgtgtgcaaaatggagaaacccagggaaacagctgttcgaagagggggccttaaacccacccatttgagctcgccctccgagagcgagtaggctcggcacgtgaactgtcaaaagcgaggccacaaccgacctggaagccgaggaacagggtcagctttctgcacccagccctgtcaggtaccaaacccaactgtcttgaatcagagacgaacaggaccaaaggaggtgagtttcaacacccaaactaagaagccgaaggaggcgcagggtccgttaaccctgcccatctccacgctccttggaaaacgaaaacaaactctggtttctcttcagcgttcacctctctgcgcccaaacggatctgtaagtccaactctataccttaatcatcaacctttcccacttgaaccccgtcccagcccagcccatcctttcagcgcgccgactaccccataggtcatcccagctctgtctcttttcccaatttcgagagcggaaagaaacccctccctcttctcccttacctgccgcgggcactccccttcttggtaccgggtcgatcggaactcctgttccagcttgatctccaccctagttgcaacgttcaacccacgttcccctcggactgctcctcccccactcgcgtctccactaggaaggcggcttccggcttgagtccgcggcaaaagagtcctccttcctgctgcacgctgggcctgaaaggacggtggcgtggcggggaaggtgaagacgtgagcacttccggtcgccctccgcagaggcgtggctgtccgccctgtggccgcagacgcagttgcgactgcggcgacgaggaggggcggggccggtggctgctgagcccgccatgtgtgagtggctgggtttggggaggcgacgtttctggaagctgctggaaagcgcccgagtggcggaggtggcgccagcggccagggggtggggcgtgattaaaactagtgcgcggctttctgcggagggattacgctgacgaaagagacctgcttgcgcgtcgctgttccgtggtccgcgcgagcgtggtcgggagccgctggttcctggggtgacccgcggaggtgggagagggaagggcttccgaagccggcgggggtgccatggaccctctccgccggcgcggccttcacagctgggccgcgccgggcatccgtagtccgctctcccaaagcctcggtggagctgaagctgccacagagtgcatgttcacaaagggtcatcacacacggagctgcccctccctgtctccctagagcccatcttcgaggccaggggcttttctaccaggattctggggtgtttctcctcctttcctccctcccagatcttctcacggtaaggggagcagcgaaagcgcagggactttgcattccacgacccgttctgactagtcaacagccgatctgtccctgctgctctaattccagctgccctgccttgttttaacttcagagaaagggggagttctcatttgataagtttaagcctttgctttcgtaggaaggtcatgtggcttaagggacatcgtgaccgcgtatgctatttctgcctgtgcattctaaatcttgggggcagcatattccagaagtccttttggtcgattggttctgtgtcctaggataacaatttgtagtttctgaccatttctttacagaaaaaccacaattggtattttggactgcggggttttttagtggtctcaaactaaatgattatattctggaataatgctgacaatttggatagggtggtgtggaggaaacaagtctcgtgtagaagaaattatttagtaaaaaggattttagtttttggtacttctgaatgcaaatggccaaggaatccagcagtttgttggggtttctccagacaaaaataggctggttagtttgtttacctttttctgttgctttactagattgttaatgtatttgtatatttaagatctagctagttaggtttttcttttttatgaattgtgattaaaattggagaaagtagtacttcctcctgaaatagacaaaactcagagggttgttttcttgttcaccactgctacttccatttttagaatggaatacactatttgtaaaaaacaaacttgctgagtattaactcataaattgaacaaaacaattggttcagttaaaatgtagctaaaattgtaagactgcaaaacaacatcaccaaactgaattgtattttttaaaacgttgtctgcaaagttg

SEQ ID NO: 2781 - DNA, 6000 bp, Homo sapiens
ccttgtttttgctgttttgtttttctgacagtatggtctctgtggtccaggctggagtgcagaggcacaatatcaggtccctgcagtctctacctcccaggatcaagccattttcatgcctcatcctcctgagtagctgggattacaggcatgtgccaccacaccctcgaactcctgacctcaagtgatctgcttgcctcagcctcccaaagtgctgggattagaggtgtgagccactgtgcctagccttacacattgttttcttactggtaaagtgggaatatctagaagttgcatgctacataaattcaaccatatattattggcaaaaaattttaaagaaaaacatcagcttaagagtactaattgagtacatgccttggaatgagcatgagctggaaagaacaaacctgttgttacatcactcattgctgttttcatatgctgctcattgtaaatcttgctcagtggcatgattttagtgtttaaagatttatttgtttgtttgtttaggacaaagtctctacacataatctacttgcttcatatatacatacttatgcatattatgtatgtacatacatgctctcagggctcacatgaaaaaacagccattcaggtgatgtgatttatctcatatgcttactttagagtcaacagggtgttgactccactatacaatactggcatggagaacacataagtcaaagtagacaggacccagccgtaccattggctagggcacaaatatattcacatatgtggagaatgatgtacgtagaaaggtcttcattgcacaatgctctttaataaagatctggaaaaaaaaaacacctaaatgttcaaaaggatagggtagatgaaataatggtacattataaaatggaagattatgcagccataaaaataaggaaataccttaaataataacagaacaacttttaaggtaagtgaacaaataaggtacataatcactatgcatagtatgtaccatttacatagaaaaagggaagaaaaataaaatatatatagtaatttatttgttcttacatgtgtaaaatttttctgaaaaatataccagaaactggtagcactggttgcttcctaggcagaaaatgactgagtatccttttgtaccttttgaattttgaaccacgtgaatgaatgtgttacctatgaacaaaatgacaagtttagatcagcaagacagcagtttgagatgaaatgggattacacccttagtaggaaaaactttttaaagcaggtggtacttctaagagcaaatacctgcacatggaatgttgaaactataaggaactctccttaagagatccatctattccaaacttctcattttatagatctgtaaactgagaccttaaaaattcagtgacttgcataaggtcacacagcagaagagatgggattagatgctagatattccaatatcaagtttagactattaaaaattcagtgacttgtgtaaggtcacacagcagaagagatgggattagatgtcagatattccagtatcaactttagactattatcacaccatcttctcattttctgggggcaaaacagaaccaagtaagtttgggctacattacgagttgtcatgtttttgtttttgtttttttgagatggagtcttgctctgtcgctcaggctggagtgcagtggtgtaatctcagctcattgcaatctctgacccccggggttcaagcaattctccctgccttagcctcccgagtagctgggtttacaggcgcctcccaccgcgcccggttaatttttgtattttttttttttttttttagtagagacggggtttcaccatcttggccaggctggtcttgaactcctgacctcgtgatccacccacctcagcctcccaaagtgctgggattacaggtgtgagccaccacgcccggccgagttgtcatgttttatctaaattttagagtctaatgtataaattaaccttaagccctgaaactactaatttcttgtttggatcactatacggctacacttaaaaatatgctgtgcatacctctatcattgcatgtatacaatatgatagatgcatgatatgacagacacacaatatgatacacgtatttttttctatcctaacacatctgaatttactgaaataactaaaatgtcttaagttacttttttaaatatacacatgcatagcacaagcgtgttgccaaaaatatgaatacaggtttacaattccttaactaaaacccaagggttggatgtgttttagaaataagaatttcatacaatttttaagtgttacagggtatataaaccattatataacacataccaggggccaagggcagcaccccataatcaaacatattaatatagtttcagcaaaacacatgggataaagactatatacagcttctcaatagttcaggtcatattttgctaccaaatgaattttgttgccaagcttaagaagtttttggttttcaccgctttctgaatgttagattgagatgtgggattacagactgtactcatagagtgcttctagaaagcagtcagtcacttcaactctcattttttttttatgagactaaaaaagaaatcatagcaagtagcttttatatcccaggtttgggccaaagacttgtattgtggttaaggaatctaacttagtagaaggtgcacgagctgacatcgtgagtggctaaaatgagagaaaaaaagagaaaatcctaatcatacagaagcactgaactactgcagctgttcgttagttattaatttaataaaagcttcctccctttaaatcatgtgagtttataactggaaataggtcaataaaatttctgtcccacactgctgacaagcgatggacgcaattagctttaatcccactggaaggtactgcactctctctgggaccaggatatgtagaaaaaagcatttcaaatatataggaataaccagaaatgtatacagtattctcaacttgggaccgttactctataatataaacgaaaggggttttctagtcaatctctgctgatctcctgtaccaaagttcttccctttataagtcttgtactaccttttacaagaggaaaaagctctagagcgaaaacacagaacacactaaaatcccttcctttctctttacaactcaagccccgcctccattttgtttctgttactaatttttcttctgaaaaaataccaaatttacactgaaagactaaaattcaactttgcagacaacgttttaaaaaatacaattcagtttggtgatgttgttttgcagtcttacaattttagctacattttaactgaaccaattgttttgttcaatttatgagttaatactcagcaagtttgttttttacaaatagtgtattccattctaaaaatggaagtagcagtggtgaacaagaaaacaaccctctgagttttgtctatttcaggaggaagtactactttctccaattttaatcacaattcataaaaaagaaaaacctaactagctagatcttaaatatacaaatacattaacaatctagtaaagcaacagaaaaaggtaaacaaactaaccagcctatttttgtctggagaaaccccaacaaactgctggattccttggccatttgcattcagaagtaccaaaaactaaaatcctttttactaaataatttcttctacacgagacttgtttcctccacaccaccctatccaaattgtcagcattattccagaatataatcatttagtttgagaccactaaaaaaccccgcagtccaaaataccaattgtggtttttctgtaaagaaatggtcagaaactacaaattgttatcctaggacacagaaccaatcgaccaaaaggacttctggaatatgctgcccccaagatttagaatgcacaggcagaaatagcatacgcggtcacgatgtcccttaagccacatgaccttcctacgaaagcaaaggcttaaacttatcaaatgagaactccccctttctctgaagttaaaacaaggcagggcagctggaattagagcagcagggacagatcggctgttgactagtcagaacgggtcgtggaatgcaaagtccctgcgctttcgctgctccccttaccgtgagaagatctgggagggaggaaaggaggagaaacaccccagaatcctggtagaaaagcccctggcctcgaagatgggctctagggagacagggaggggcagctccgtgtgtgatgaccctttgtgaacatgcactctgtggcagcttcagctccaccgaggctttgggagagcggactacggatgcccggcgcggcccagctgtgaaggccgcgccggcggagagggtccatggcacccccgccggcttcggaagcccttccctctcccacctccgcgggtcaccccaggaaccagcggctcccgaccacgctcgcgcggaccacggaacagcgacgcgcaagcaggtctctttcgtcagcgtaatccctccgcagaaagccgcgcactagttttaatcacgccccaccccctggccgctggcgccacctccgccactcgggcgctttccagcagcttccagaaacgtcgcctccccaaacccagccactcacacatggcgggctcagcagccaccggccccgcccctcctcgtcgccgcagtcgcaactgcgtctgcggccacagggcggacagccacgcctctgcggagggcgaccggaagtgctcacgtcttcaccttccccgccacgccaccgtcctttcaggcccagcgtgcagcaggaaggaggactcttttgccgcggactcaagccggaagccgccttcctagtggagacgcgagtgggggaggagcagtccgaggggaacgtgggttgaacgttgcaactagggtggagatcaagctggaacaggagttccgatcgacccggtaccaagaaggggagtgcccgcggcaggtaagggagaagagggaggggtttctttccgctctcgaaattgggaaaagagacagagctgggatgacctatggggtagtcggcgcgctgaaaggatgggctgggctgggacggggttcaagtgggaaaggttgatgattaaggtatagagttggacttacagatccgtttgggcgcagagaggtgaacgctgaagagaaaccagagtttgttttcgttttccaaggagcgtggagatgggcagggttaacggaccctgcgcctccttcggcttcttagtttgggtgttgaaactcacctcctttggtcctgttcgtctctgattcaagacagttgggtttggtacctgacagggctgggtgcagaaagctgaccctgttcctcggcttccaggtcggttgtggcctcgcttttgacagttcacgtgccgagcctactcgctctcggagggcgagctcaaatgggtgggtttaaggccccctcttcgaacagctgtttccctgggtttctccattttgcacacaggagtgtgaattaagtttaattgaatactttttgcgattcccagggccaccttgacacgttcattgtgctatctaactgggttcatgctgggctaataattcacattaaggcttctggagtataagtggttcacagaagtatgaaaaggggatgttagaagaaagatgctgggggtgaagtagagttgaggaagacagaactggaaagctaggttggtttcacagtacaatgagctttaggtcataatactacctttaggttatattgggctgtttggacggagtttgctgtaatcaggctagagtaaatagagaattttaaactaagcattgacaggctcagacttgtagaggcatcattttgacagtgatatggaagggaaagaggtagagatttgagacctttccaaagaactgtccacagaatttggtgacttactgtgcgaagagggaaataaagaatagggaacaactcaagactttctagtctgtgt

SEQ ID NO: 2782 - DNA, 6000 bp, Homo sapiens
ggcacgggggatgccaccaagatcaagacaggactatgacagccatgctccctcaggaatcagattcttccccgcttaccatccgtgcccaccccatcctcctctcacctcctactctttttatttaccttgttcgttccagaaatgcaccacacgtaagcactctcccacctggtcttacaatctttacagtggaaatagccatattttggttccaaaaactgaaaataaagaagaaaagtactttaccatcatgcaaggggaaaaaagccagatccttctttatgactttgtataaggaaaaaaaaatgacttctttaacctcacttgtatctattctcaagactacggcattgattcagtttctcatctctcttaaagattactctgggattcttcttgctgctgtcgtttgtacttttccaatccattttccacaatgctaccggcacaatcttcccaaaacgaaagtctgatttcatgtattacagactcgaagcccttcttcgtctccaaattctccaatagcagtggttgccagactgttggttttcacaggcttagtttgggttggcacctattttacccaaaacttaccaaacatacaggccacgtgatatacatattttcagagctccctctccttcaccaagtacatggaagaagagagagaagattttgctcttattgcccccatagatggaaaaggagggaggggatgaggctggtcgaggactaagaagagggaagagaggatctacctggaagttgggcctccggagcggctcggaggcggcgtctccaggcacctgcttgctcttcgtctcctgagggcacggggcgtctttctcccccgattcctccagctgcccgggctcctcctgcctgtcagctcctgacctccgtgatggtggctgcggctggctggcctccgcagggcccgggagcgccttgctctccgcttcgtccccatctctccgcaggcggatcaagcccctgcggccggtggcgggcgaagtgaccccacaggctggcaggggctcctgggggtctctgccgtcccagggggagcagctgctgagggtgcgaggccccagagagcactgcacagccttgtccacccgcgggctcacctgcacgcccacctccttggtgttgggcttgcacagccgcgggctcaggctggggttcatctgggagagaatggccttaagctgcgccctcttgtaagggtcaatgcagtagtcaggggcgttcgcgggcaccagcagccctggcctggccagaaaagtgggaggacccatattttgcctccagtcgggctgtttgtgccctgagagtccaggctggcccaaaggcactgtgctcccataaccctggtacaagccatagggaacacggacaaagcgctccatccgctctcaggtgctcaggcgcagtctaatatcctagccagtttgtttgggtccttattttgccttcctccttcatccgccccttctttctcttcatcaggttggttcagattcattcctggcttctccatttatttcagattctaatgggagctgctgcttattaccctgattgagggagagaagctctatctacagatgtctaattgccacctgattcctacctaattgcttttccctacctcttcactgttcgggaatctttttttcaaagctgtttttcatttccagcttattcacacatatgctttaattagtgattaattcatatattcctgtagtgaccattctaaagatcctttgtaaggtaatgtggtaatgttagataatgttttaaggtacagccattatggacaacagtatgaaggttccttaaaaaagttaatagaagtaccagataatccagtaatcccaccactgcgtatttacccaaaggaaatgaaatcaatatcctgaagagataccttcacttccttgttcgttgtagcattatgcacaatagccaagttatggaaacaatctaagtgtctgttaacagaaaaatggatagagaaattgtggcatgtatttatacaatggaatattattcagccttaaaacaggagatcctggccaggcgcggtggctcacacctgtaatcccagcagtttgggaggccgaggcaggcagatgacctaaggtcaggagttcgagaccaacctggccaacatgatgaaaccctgcctctaataaaaatacaaaaatcagccgggtatggtggcacgctcctgtaatcccagctactcgggaggctgaggctggagaatcacctgaacccgggaggcaaaggttgcagtgagctgagatcacactactgcactccagtctgggcaacagagagagaaagactccgtctcaaacaaacaaacaaacaaaaaacaggagatcctgccatttgcaacaacatgggtgaaactggggaacattatgctaagtgaaataagccagatagaaaaatactgcataaactcactgatatgtggaatctgaaaaagtcaaatacatagaagcagaaagtagaatggtggttaccagggacaggaagttggggggaatggagagagactggtcagagcctaaaatgttacagttaggtagaatgaatgagtctagagatctaatttacagcataacgactacagttaacaatactgtattttatactgaaaagtttcaaagagaaatttcaggtgctctcaccgcacacaaaagaaaggtaattatgtgaacagatggatatgttaattgcttgactatagtaatcatctcactgtgtacatatacatgttgtgcacattaaatatatacaacttttaggaaataatggttttttgggtttttgtttgtttgcttgtttgaaatggagtttccttgctctgtctcccaggcaggagtgcagtggcatgatttcggctcactgcaacttccgcctctggggttcaagtgattctcccacctcagcctcccaagtagctgggattacaggcacatgccaccacacccagttaatttttgtatttttagtagagacagggttttgccatgttggccaggctggtctcgaactcctgacctcaggtgatctgcccaccttggcctcccaaagtgctgtgattacaggcgtgagccaccatgcccagctggaaataatgtttttaagaaaaattaaagcatattgtaaattgaatacaaatagtaaattgagcagctgcactagaagagaataggtgagaaagtctattatggtggagctaataagttgcaagtccctggtacaaagagaacaagaaacataaaggtatggggggctgtataaaatgacagaaaatgttatttctgagacttgtgtgacatgccacgggttctcattagtccactcctagtgagacacccctcccccacaaaaaggggacaaagcatattgttctgatttatagggtaaataaatcacaggttagttaagtgtatgaagtcaaatggactagaattcaaacctgggccttactaccaggcacattacttaactacttgattcagtatcctcatctgacaatactgaccaatttacaggattactgtaagattaaacatggtattgcttgaaaacccaaagcagaatgcctaactcataaaatgtttggtaagtggcagctgttattagtaaggatcacagacgtatttctttgcgaattagacttagagcaaaagctttagaatctatctgcattagtaaggcctccttctacaactaaggattactgattatcaaactaaaatggtccctaaggaaccaagcggagcccacccttttcctaatccaaggttgcttctgtttactgctcaagcaccttctggaagcagcaaggcccccatgggagcaactctcactgaatccatttgaaggttttgtaggtcttacaacaaaccctattcagccttgtattaggcatgttacagaaccaacgaattcggagatgaagtcaggtcttccagttcagcctgcgaggaagacaggtgatccgaatcctaagaatgcaaaagatgggccgggtgtggtggctcatgcctgtaatcccagcgctttgggaggccgaggcaggcagatcacctgaggtcgggaggttgagaccagactgaccaacaacggagaaaccccgtctctacttaaaaatgcaaagttagccgtgcgtggtggcccatgcctgtattcccagctactcgggaggctgaggcaggagaaccacttgatccctggaggcggaagttgcggtgagcggagattgcgccattgcacaccagcccgggccacaagagcgaaactccgtctcaaaaaaaaaagcaaaagatactaccaagccctgcggagcaaggtacctcacacttcatgagcgagttaagatgggtttcacaatttttcaagcaaggaaacgggctcggaggtcttgaacacctgctacccaatagcagaacagctactggaactaaaatcctctgatttcaaataacagccccgcccactaccactaagtgaagtcatccacaaccacacaccgaccactctaagcttttgtaagatcggctcgctttggggaacaggtcttgagagaacatcccttttaaggtcagaacaaaggtatttcataggtcccaggtcgtgtcccgagggcgcccacccaaacatgagctggagcaaaaagaaagggatgggggacttggagtaggcataggggcggcccctccaagcagggtggcctgggactcttaagggtcagcgagaagagaacacacactccagctcccgctttattcggtcagatactgacggttgggatgcctgacaaggaatttcctttcgccacactgagaaatacccgcagcggcccacccaggcctgacttccgggtggtgcgtgtgctgcgtgtcgcgtcacggcgtcacgtggccagcgcgggcttgtggcgcgagcttctgaaactaggcggcagaggcggagccgctgtggcactgctgcgcctctgctgcgcctcgggtgtcttttgcggcggtgggtcgccgccgggagaagcgtgaggggacagatttgtgaccggcgcggtttttgtcagcttactccggccaaaaaagaactgcacctctggagcgggttagtggtggtggtagtgggttgggacgagcgcgtcttccgcagtcccagtccagcgtggcgggggagcgcctcacgccccgggtcgctgccgcggcttcttgcccttttgtctctgccaacccccacccatgcctgagagaaaggtccttgcccgaaggcagattttcgccaagcaaattcgagccccgccccttccctgggtctccatttcccgcctccggcccggcctttgggctccgccttcagctcaagacttaacttccctcccagctgtcccagatgacgccatctgaaatttcttggaaacacgatcactttaacggaatattgctgttttggggaagtgttttacagctgctgggcacgctgtatttgccttacttaagcccctggtaattgctgtattccgaagacatgctgatgggaattaccaggcggcgttggtctctaactggagccctctgtccccactagccacgcgtcactggttagcgtgattgaaactaaatcgtatgaaaatcctcttctctagtcgcactagccacgtttcgagtgcttaatgtggctagtggcaccggtttggacagcacagctgtaaaatgttcccatcctcacagtaagctgttaccgttccaggagatgggactgaattagaattcaaacaaattttccagcgcttctgagttttacctcagtcacataataaggaatgcatccctgtgtaagtgcattttggtcttctgttttgcagacttatttaccaagcattggaggaatatcgtaggtaaaaatgcctattggatccaaagagaggccaacattttttgaaatttttaagac

SEQ ID NO: 2783 - DNA, 6000 bp, Homo sapiens
gttccaggactcaaatcagtaacttggtgattacaaggtgctgaatgtgttggtaaccatatcgcaatacacctcaaggaaaaggttcagatttttatttttaaaatattttcatttttttcttgaattttatatccgtttgttcactcgtacatgcctagcctacagaaggggatatatattatgaaatggtcatttttctgaagagaatattttgcttgaaatgcaaaggactgaaagagatttgtaggttgttgattttgttacttcatactggaacttttaaaaagatttcatcaaataaagttttgttttctacttttaattatatgaatgtttttaaacctttgttttaggtagaaggtaccattgtgtctttgaagtacatgataatttgtcaattctgctcaactggtacattgtaagaaaccatcttgagccttttataattaatgaaacaatatgcattatgatgactgtaattttagatttctaatttaataggaaatagaaaatttgattcttttattagcttgaaccaaatgaagttgtcatctttgtaggtcaaaaatggttgaatattagcaatttcatacagttcaactgaatatttcagagaagacgtaggtaggaagaaccaagaggaaaggagaaaaatgcaaaataaaataagaaattaaaggatagggagacacctagaaaaacaggatgagttattcagactattgaccataatcaatttttataaaagtcttgatctgttctaagtttggcttccaagtttggctttccagttattaagagcacaatgaggtttgagtttagtgagattatctttcccgcagaagctgtaagcaagagttactgcatacttctcttagaagattagtaaaattcccttgatatttgatttcttggtcagctcttaggaatcctatagatacagtgaaagttcaaatactggctctgcacttacaagctatatcacctatagtgatataggcaagttaaggttaattttttttctgtgcctatttcctcattagtaaagtgggggtaatagtatctactttataaatgaatttgaagaataagctaatacatgtagtgtttagaacagtgctttgtagataggaagtgctatttaagagcttgctattattccaaaagatgtgaattttactattcagagtctttagagagagccctttagatagcatcttaaggagctaattccttttaaatcacatatgcaccccttagttgctgtttcttcaaaagaatatttcatattcaagaatgttgctttatttttttgagacagagtctcgctctattgccaaggctggagtgcagtggtgctctctgcaacctccgcctcccgggttcaagtggttctcctgcttcagcctcccgagtagctgggattacaggcatgcaccaccatgcccggctaatttttgtatttttagtagagactgggtttcaccatgttggccagggtggtctcgagctcccggcctcaagtgatctgcctgcctcggcctcccaaagtgctgggattacaggcgtgagccaccatgcccagcctttgctttggttttaaaagtacttacaatactcaaatgcctatgttggctatttatttttacccagctcacaggcagaaaaaaaaaagtttatttagatcaaattctgcagcaattcctttccctactgctattactgttaaagaactgtgtgccatcattaggccaagttggtgcagcacccaaaatacttgccaacttgtcttctcccagactggaggggctcaggcagctcttctaggatccatcacattctgcatctcaactttaccaataacactcccacccctcctgtaccagcgattcactcaacaaactaaattatacaccattaccaggtcagttcttaaatagctcagcagcaacaagaacaacaagatgttggtcgcattctaattttactggcagaaactgagggtttcattggtgaagaaacctgcctaggatcacagtgtcttagtttctcagggctaccataacaaaacaccacagacagggtggcgtaaacaacagaaatttgttttctcatggttctggaaactagaagtccaggagcaggcaggtttggtttcttctgaggcctgtctccttcacctgcagagggccgccttctcactgtgtcctcacaaggcctttcctctgtgcctatcatccctggagtctctccctgtggcccaatttcctctttctacaaagacaccagtcaaattggatttagggcctatcctaatggcctcgtttcaatttaatcatttttaaacgctgtgtcttcagatagtcacattctgaggtactcaggcttccacagatgaattttggaggacacaattcagaccataacacaaggcaacatatggttcagatgagatctgaatgaatgatcagcctaacctccaagcagattctttcagcagactgcaaggtgcactggagagctttagactagaggcttaagaggtcatttaggcaatatttacagaactgctaagtgccaggattgggggatgtagcagtcacgaaaatcgttcttcgtttcagtaagtttacagtttaccatggggaagagacaaatactgaacaggcagttatattactctcagtaaaataacaactgggaacagtttctggggattactttacatatggaggaaatgcaaaaaacactttgtcaggattattcctgtagcaaattagatgtgactaggtcaaccaaacatggccactgtgaaccatcttattgagcatagaagtggttttgctaaaaatggatttctccacggagcacggtggctcatgtctgtaactccagcactttgggagactgaggcaggaggattgtttgagaccagtttgggcaacaaagcaagaccctgtctcaaaaaaaaaaaaatcagggcgtggtggtgggggcctgtaatctcaactactcgggaggctgaggcaagagcatcacttgagcctgagaggtggaagttgcagtaagctgagactgcactactgcactctagcctgggcgacagagtgagaccctgtcaaaaaaataaaaaataaaaaaataaaaaaaatcaatttcccgtatacttctgttataaagaagtctttaaaaaattgcctgctcccttaagtcagccttttcactgagtttaaatttcgttccaatttgaacaaatatggatgctaatactatcctttatagttactagtgctaagtgcgttgcatgtaacaccttgaatacttactgaagtctgcaaggttggttttatgccctgattactgatggagacacaaattctgaacaactgtgacttcagggatgctaaacaccatagtgaggcacgatgcggggatttgaatcttggcctgagggttccagagctgtggccttttctggggttactctgttaattgatttctagtcctttctgatctacaagccgcggcattataacttttagatgctgaagaaaactaaactatatgtcaaggattaaggcttgtgaacccccaaaatttgggacaggtctcagttaatttagaaagtttattttgccaacgttaaggacgcgcagctgtgacacagccccaggaagtccagatgacatgtgcccaaggtggttggggcacagattggttttatacattttagggagacaggagacatcaatcaacatatgtaagtacactggttccttccagaaaggtggggacaactcggaagcaggaagggcttctaggtcacaggtagatgagagacaaaaggctgcatacgagtttctgataagcctttccaaaggagacaatcagaatatgcatctatctcagtgagcagaaggatgactgactagaatgggaggcaggttttgccctgagcagttcccagcttgacttttcccttttgcttagtaattttgggaccctaacattttcacaggctttaaattttattattctttagttactacgtgctagcatataaataaatagtacaaaaccaagaaggcatccaccttttggttgtctcttcacgtgtaaaacaacactttgtgttaagtatcttcacacacggcggcgcaaaggtagaaaccgatactaaaaaagcgtgtagaaaatagttcccagcctgggcaacacagggagacctcatttctacaaaaataattcgccaagcatagtggtgcgcacctgcggtcccagctacttgagaggctgagatgggaaagttgcttgagctcgggcagcaggagttccaggctgcagtgagctaagaatgcgccactggactccagtatgggcgacagcgtgagaccctgtctcaaacaaaaacaaaagcccgttactccaccaagaaggcgcttttgcacattgttttaatgcttaacgccttcaggatgccagcgtgacggaagcaagtaaccaccaaggcatcaccactggcgctaaacttctcacttccggagtgctgcaagcgcagaaaatatacgtcatgtgcggaggcggagcttccgccctgcgcgtcgtattagacggaaaccgagcgggcccatttttcatgggtttgcggacccaccagcgaaggcgggaggtgtcgcagggacatcttctggctgtttccgtcgcctgcgtggcccttgcaccccggtcttccattagcggcgcagacgtttgggcctaagcgctgggcgaggcgaggccctgcccctccccgccaacggccattctctggacctgtctttcttccgggaggcggtgacagctgctgagacgtgttgcagccagagtctctccgctttaatgcgctcccattagtgccgtcccccactggaaaaccgtggcttctgtattatttgccatctttgttgtgtaggagcagggagggcttcctcccggggtcctaggcggcggtgcagtccgtcgtagaagaattagagtagaagttgtcggggtccgctcttaggacgcagccgcctcatgggggtccaggggctctggaagctgctggagtgctccgggcggcaggtcagccccgaagcgctggaagggaagatcctggctgttggtatccttaacgccgcgttgggacttggggtgcagggattcggggctggattcctcgcggggctctgccttgggcacagtggcatctgcaggatgatggtcttgggtcggggtcggggtcgctatagaatctctgtcactaggttttctaagtacagtcgtccctcggtatccccggggctttggttccagcccctcctccgtataccacgatgttcaagttccttcaactcccttatataatggcgtggtatttgcatataaactacccacttccgtaatcttttaaatcgtttctagcttacttgtaatgccgaatgcaatgtaagtgatctgtaaatagttgttatactgtattttaaaattttttgtagtttttattggtatgttttatttatttatttttttccatcgcaaatatttttgatccgtggtaggttgattgcggaatcgggtgatgaggcgggccgccctgtctgctttccccagctttgcagtcttagcggcctgtgcatcctggtttgtcactttgtggcagtgctttatgttcctctctgccttagttctctcatctgcaaagtagaggtggtgatagtatctacacacaggattggaatgaggaataaagaaattgcctacatgagagaagtttagtgcgattaatacagtaaatcttaaagttattatcctgtccgggaggtcagtaaggagagcagagtagacttcgacgattagttttgcttgagtcttgccccatttatgtttcttagaggaaggatagtgtggacaggtgttttacccattttttaaattgactttttaaggactattgtttctgtacatgtttggctggtt

SEQ ID NO: 2784 - DNA, 6000 bp, Homo sapiens
tccttcaattactgatctttttgattctgaatttcttttttaaacaactctcaagatccacctctttgaataaggtaggaaagagaaatcctcaagacagtgaagttcaataaagtctcacctttccttcagaacccaccctctttttcaagtcataccccttgctccttgacaccctgtcttatttagtatctcattcaacaaatatcattgaaagctagatactgttccaggcattggttacagagcaggaaacaaaatacacaaagccctggctcacttggagcttacagtctattggagagagtcagatctcctaaaaattaaacaaatatatgttaagttgtaattagtactctggaaaaaaataaagcagagtaagaggctacaagtgataatgggagtgatgttatttatatcaaggaaggcaccactgctactaagaacaaagacctgaagaaagtcagggatcaatcttgttagctggaagaagagtagaccaggtagagagaacagaagcctgtagggagaagagtgactggtatgtttgagacaaagtggaaagaggccagagtgcctaacaggagtaagcaaagggaaaaatagtagcagatgaaatcaaagcactggggtaagaagcagatcatatagagcctggtcaagccacagcatttgagatggggagccactggaacaaaaatctaacatgatctaactttcattttatttatttatttttaaatttatcttattttttagacagggtcttaccctattgcccacactggagtgaagcaggggaattgcttgaaacccggaggcagaggttgcagtgagctgagatcacaccactgcactccatctgtaaaaataaagtaattctagataacgtgatgtcttatcagaaaatactatagcatgctttttttaaagaactttttttttccttttgagaaagggtcttactctatcacccaggctggagtacagtggcatgatcacagctcacagcagccttgacctctcaggctcaagtgataaattatacagctaatttttgcactttttgtagagtcgggtttcgccatgttgaccaggctggtcttgaactcctgggctcaagcaatcctcctgcctgaagttctgactgctgagattacaggcatgagcccccacacctaccctaaaggacattttaaaatcataactagaatatcattattttaaacctaactagaataccattataatatctaataaataattccctaaaatcatccaatttccagtccatatccacatatccccatttattgctggcttgttcaaaccagcatccaaacattgcatttggctgttaggcttcaaatgtctcttttactctaaaacagtcctaacaattttttttttacataatagtatgaagagagtaggccagttgtcctgtcgaatattaatttgtatttttcatactatgtgagcctgaatatcttttccatgcacttatttatcaaatgcaaactgtttattaatatctttcatccacttatctatagaggttttggttttaattatgaaaataaatttgttggtttcttccaggctttttttgtttttgtttttcagacagagtctcgctctcgtcacctaggctggagtgcagtggtgcgatcttggctcactgcaacctccgcctccccagttcaagcttctcctgcctcagcctcctgagtagctaggattacaggcacccaccaccatgcccagctaattttgtgctagagagggggtttcaccatgttggccaggctggtctcgaactcctcacctcaggtgatccgcctgccttggcctcccaaagaggtgggattacaggcatgagccaccgcacccagccggtttcttccagttattggtgacatgcttcagtactattttagttacacttgttctgtatttgactataaagaagttatatcttcacaatatattttcagtaattctcactctgaccaccataataactaaaaaagaaaaagaatcaataaaaactttaaaaatacatttttaaaaatgtgtgtgggatggtaactactgtcatgaaacagaatacattagcctagtagataacaacataatttggagtcacccagatctggccctgccttttaggaactgtatattatgagctgaattgtgtcacctcaaaatgtatgtatttgaagaactctcattatctcagaatctgcctgtatttggagataggacatgtaaaggggtaattaagataaaataaggtcatacgggttgggaataatccaatatcactgatgtccttataagaaaaggagattaagggccaggcaccgtggctcacgcctataatcccagcattttgggaggctgaggcgggtggatcacttgaggtcaggagtttgagaccagcctggccaacatggtgaaaccctgtctctaataaaaatacaaaaattagccaggtgtggtagcccacgcctatagtcccagctactcaggggactgaggcaggagaatcgctcaagaacctgggaggtggaggttgcagtgagccgagatcttgccactgcactccagcctgggcaacagagcaagactctgtctcaaaaaataaataaataaataaaataaaggagattaggacatagatgcacagagaggaaagacagcatccatctacaagccaaggagagagggaggcaggccttagaagaaatcagccatgtcaagacctttaccttgggcctctagccgccagaattacgacaatgtatgtagttatagcagccctagcaatacactgtgtgatcttgaataaattaaatttttctaaagctcagtttcctcaactataaatggagataataacatatgcctcatgaggttgttgtgagaattaaataatgtatgtaaagctcatagcatagtaagaactaaataaattctggctattattcttatgaagattaaatgaggttatgcatgtaaagcattagctcagcctctagtacacaagaaagttctactaagtattagctatttttaataaattttcatttcataaaggcttatatttttcctatctccaaagtatttccttttagacctagtctaatttatttgtgtcataattaagtcagatgtaacaggctttgtaccgctgaaacaggttaagcaatcctatccaacaacatttattgagcacttacattttgttagatttatttccaactacttgatatgctttggtgttattgtaaatgctaccttatccaaaaattttatttatagttgtttgaagctcttttataagcatggaatttattttcacacgctattttctatcagtcttgctaggctttgtattaaggtaaaatttttatcctgtagtttcttctagcttttaaaatattcataatcaaattacatgcaaataatgagattttgggttttttctttctaaactttacatcttttgatgaacaaaaattaaaatgtatcaatttttttttctttgtttttttcagacggagtctcactctgtcacccaggctggagttcagtggcgggatctcggctcactgcaacctccgcctcccgggttcaagcgactctcgtgcctcagcctcccaagtagctgggattacaggcgcccgcgaccacgcctggctaatttttcactttttttttttttttttttgtaatagagacgaggtttcgctattttgctcaggttgctctataacagatactatgctatcctaacaatatgtttctaaatgatattagtgccaaaaccaggattacccagtgattttgttaatacaggcttattgaatcggagggtctggggtggggaatttgcttaagtatgcagtccccatactcggtgattctcatgaagccaaacatttgggcgcccctcacctgatgtcaccaagaaccagaagaccaattagaattttcgtgggcttcctgccccatggttccctctgttcccaaagggtttctgcagtttcacggagcttttcacattccactcggtttttttttttttgagactcgctctgtcgcccaggctggaatgcagtggcgcgatctcggctcactgcaagctccgcctcccgggttcacgccattctgcttcagcctcccaagtagctgggattataggcgcccgccaccacgcccggctaatggctaattttttgtattttttttttttagtagagatgggggggggtttcaccgtgttagcctggatggtctcgacctcctgaccttgtgatccgcccgcctcggcctcccaaagtgctgggattataggcgtgaaccaccgcgcccggcccggtttcgttttgttttttttttttttttttttttccaaaaatgggcggaggagagtagtctgaattgggttatgaggtcccctgcggggtacctcacctcagccattgaactcacttcgctggccgtgagtctgttccaagctccggcaaaggaggcatccgccgggcccctccccgaagggcggggtccacggcatctcctgcccagtctgacctcgcgcggagccccgttctctgggaactcacctccccgaagctcagggagagccctgttagggccgcctctggccctagtctcagaccttcccaagggacatgggagtggagtgacaggacgcactcagctcgtggccccactgatgagcttccctccgccctatgggaaaaagtggtctcatacagaacttataagattcccaaatccaaagacatttcacgtttatggtgatttcccagaacacatagcgacatgcaaatattgcagggcgccactcccctgtccctcacagccatcttcctgccagggcgcacgcgcgctgggtgttcccgcctagtgacactgggcccgcgattccttggagcgggttgatgacgtcagcgttcgaattccatggcggcgcggcggcgacggagcaccggcggcggcagggcgagaggttcggagctcaatatcgcgggacggcatgcggggggcgggcagtcagaaaggaacgatgccacctactgtgacccccttccccttccagctccctataacctgcacttggctaccaaaccagttggggtgctaaattttgtaaatttcggttttcagagctttggggattacataattgtgcataaagccttgcggagctgtaacaactaatgtgccagtactgttgttaatacctaatgtcatccaatttacaaaaagtaattgtaaggcacaccattattttatacacaacaaaggataagcactgaaaatggtgaactgtgattcactgcttatgtcatccattgtaagatgcatcccagttccagagagtaaaatgcgagtcttagacctattgagatacggtattatgtgtataatgttcttaaatgcataggtgcaccctataaattaggttctattgtacttctctagaagtacagtattgtacaatattctaatattggagtaagtgaagtaggaagagatcaaatacttctccaagtttccacagagaaaagcagcagagctaggctctaaattaggcacagacccttgagcacttaactaacctttatcccatacggcctcatgtatgaggtgggtatttgggggacattgggacacaagtaaaacagataagcaggcctcaatctatgagcttacaagactcctgggactcccttttattttgttttatttcatttggctagaatagcaatttaggaagaattacacagactgttacacaaaagtagtgtgggacagttgttattgcctctgtaaacttagaaaattatcttaaaccggcggggtgaggtggctcacgcctgtaatcccttgggaggccgaggagggcagatcacttgaggtcacgagttcgagaccagcctggccaacatggtgaaaccctgtctc

SEQ ID NO: 2785 - DNA, 6000 bp, Homo sapiens
aaccccaacccatgggtgtcagggttatctgtggacattgcaagaatacttttctggtgaggaaggggtattgggaaggggaggggaaaggagactaagagtcatttcgagtatatttcttagagtaatggtaatgacccctgaaaggtctgtcctatgggaacatgttctgcatccccaccccaaggttctcattgagggagaccctgcttgtgctattatttttgttttctttctccatagtggacagagttcacagaccgcactttggcacgttgtcctcactgcaggaaagtgtaagtgattagggattgagctggtaattgatgtatggagtaaaaactacaaggccatagaaagcatccatttctatttgcctccccacaggtcatctattgggcgcagatacccacgtaagagatgtatctgctgcttcttgcttggcttgcttttggcagtcactgccactggccttgccgtgagtacccttgccccaacctctttcattctgcagcctcatctccataggctaagatttgggaaactgctaccctaaaaaaaagtggaagaaacttgggggactagtttgttttgttttaagatatggatgagctaaagtgcaaagtggctgatcaaacagactttattactactacaagagtgaaaaacagccttcctttctctgtaggatgaggataggacagtgaaattcttaatttaagagttgctatttttcaaacctggctcagttgtcagatattaagaaaaactgagatacagtgtgggatgggatgagtatgttacgcctaagggaaggaagctgatcagctctgcctttaagaaggtccctgagggtggctacatgtggataaggaacaaggactgaagcgtgagttattactgttcttagaactaataggaggtagtggagaccaacattaaccccatctttcttttcttctccctccttatcttcatcagtttggcacatggaagcatgcacggcgatatggaggcatctatgcagcctgggcatttgtcatcctgttggctgtgctgtgtttgggccgggctctttattgggcctgtatgaaggtcagccaccctgtccagaacttctcctgagcctgatgacccacagactgtgcctggcccctccctggtggggacagtgacactacgaagggagctggggtagttaaaggctcccggggcttctagaaggaagccaagcagctgccttccttttccctggggagaggtaggaaggaaccaggccctcacttaggtttggaggggcagataagagcactgctgaccatctgctttcctccaagggttgctgtgtctagggtgaagtaggcaaaacgttgcccttaaaactgggccctgaagacggttccagccttgtccttcctgtgtgctccctgagagccattcctgtcccttacacattccagggcagggtgggggtgggtagccctgggggttcccctccctcttgtgcaccattaggactttgctgctgctattgcacttcaccagaggttggctctggcctcagtaccctcagtctcctctccccacattgtgtcctgtgggggtggggtcagccgctgctctgtacagaaccacaggaactgatgtgtatataactatttaatgtgggatatgttcccctattcctgtatttcccttaattcctcctcccgaccttttttacccccccagttgcagtatttaactgggctgggtagggttgctcagtctttgggggaggttagggacttatcctgtgcttgtaaataaataaggtcatgactctacgctttttcagttgttaacttgtgtgcatgaaaatatgaggaagagaatgtgtagccccacgaaggggtaagacacgaagacagcaaggctgaaactatggctctttattttcatgtggataattcaaacaaagtcattagtagtctttgttcaatttttttttaaaaaacaaaaaaccctcaaataaaaaatcttgggcttaaaagaactctatcacaggagcctggttggaggattcctagttttatacatgagaaatagaatgcagatttctctgaagagtgtttaaagaaggaatggtagttgagggggcttatttcccaggctcaaagtgatttaggggtggtgtcacagtgctaggtatagggtgataggacagtgatcactgccgagggccttggaacggatcttgctgtcacacaatgcaggtaacagagagtgggacaacaaaaagtaatcaaggcgccaaccaacattcttggatcgagcattcatcatataagtccaaaaggtgtaggcatagggtgtgttggggtagaggtgcctaaagctgtcagccagtggcacagcctgcagtaattccccgaagccttggcgctcttgtggcgtgaagccagcattctttttgttccccttggggttgcgaaggtcaatttcttcatgtgccacattgaggtctccacacagcacaaggggctttcgggaagccaggcccttcaggaacttgcgaaaggcttcatcccagcgctgccggtactccagtcgtaccagacctcggcctgcattaggtacatatgctgttaccagcacaaacgagtcaaattcagccacaatcacccggccttcctgatcatgctcctcatcgcctatagaaatgaaacagaattagcataaaaaactataagaaaagggaaagcaatcaagaggtggggcagagatagagaattagcaattggttttgaagagttcaggcattaggcatcaatagggtctcacctatgccgtaagaaactttgagtgggcactggcgggaaagcaggcccacgccactgtacccttccttgtccgaaggagctgaccagtattgatgagagagtccaggcagctcctgaagttcagctggtagtttgttctctgaacatttggtctcttgaaggcacagtatatctggggcttcttcctttacccactgtaagtgaaaagaaaggtggaaaacgtattatcaattcagcagaacatttattgaataatctatatgctaagtcatagatacgcacgggttaaacagtctcttggcctaaggagttcgagtcaagcagcacaatattcaaacaattctaagctagataaatgaaaacaaatatagagaggtaagaaagtcttacatgctatgccaaggagatgtgttttttctataggcagtggatagcaagctaagatttttaagctatggttaatggaatggaggacatgcttcatatggaatgcaatgcaggaagataaaatggaggaagtatagtgaagaggtttttgcaacattctgggaagaggagagaacactaaaaaagaaaatggcaatggaagtgaaggaacagacatttaggaaatacaactggcaagactggggaagccccacagaaaactacgggcaggagaaaaataaaacagcctgaaggctaaacggagaaaaggggtgactaaaccctaagaccattcaatactaaaaaatgtctctttccctcaaattccactcacatctaatcctttcttcttaatccaggctcgaagcccatccacattccaagagcagatcttgagtgtggcaggtttgccactgggtgaggttttctgatctggggggtcctcatacagggctgggccctctcctgctgcctctttgtcatttttctttgcggccgtcttactcttcttggcctctggctctataaaatgagtaatatatactgacaaaaagctggtggtttccaactgcgatccggcgttaactatagacccaacgaaagcctacggttcctgcgacttcttcacaaacccctgcaaaaatgagtcggcccgtacttaccgtacatcaagggaatgacaaacacccccgccgcagcttctaggaagaagggctgatttcattcccttacctgtcctgagctcatccccgtcttccgccaccgctccctttttcccacgcttcggcattcccgttacgaacgcccttgggcagctgtaccgcgtcacccaccgaagcaatatttttaccgcgttgcctacagacgcaaagaaatcatgaaaccagctaaggctggggagaagactcctcccaagagcgtccccgcaccaggtcccgcctttcaaaccacgttatctctaaatcctttccccgcctccgtgcatcataggcccttcagcccctcacccacgaaactagatcatttcatagtgccttgtaccctactcgcgagatctgccctccagccaattgaggatcttaattaagggtcctgactcaagcttgccgttcagactgccagcgaagcccctcttatgagcaaaagagcaaccccgtatctgcaccggcccgatggcagcctagctcctcctaacccgagcacaaagaagggtgcacgctgagcccccacgtgggtagcggacctggtcacgtgatcagaggcgcgcttgtcgtggccgaagaatgcgcgtgattggtctgtctgacaccacgtgacggagacgcttagcctcgcctccctcctctaattctctaggacacttaggtccccaaccctccctcgggctgtttatcgttgtgccagatgcacagcacattgtgtgacactgacttaagattctaactatgtgcaagagggaaaaaaacagtggagaaggctgggctggaccacgggaaagagataggaaaacggatacgaatgtaaggcacagagttggctcggcgtccctggcagttaggaagacaggtccctggaggggccttggcgggtctccgctcgcgggagttccgcggtgtctttcccagtgctatctgcaggctggccagcttcctctgcgctccggaaagctgcggcccagcgcggactagtgaggacctccacagctcctgacattgccaggagtcctgtcggcgttttctcccagcctccgccatgccggcggtgctgggttttgaaggcagcgccaataagattggcgtgggcgtggtgcgggatggcaaggtgctggcgaacccgcggcggacttacgtcacgcctcctggcacaggttggtgagtaggggacttaagagttttccgcgcacttccccgcacagaatcagccttccatcttcctaaatactagtgaggtgcagctttcgatccgagtctcattgaaattatgtgacattattaacgtcacaaggctgatgactagaagagttacaggcacttggacgtggatctgatgagttcatttaccttttactgagcgcattttatgtgctaagtattcagaaatagatgttatactgctgtggagtcagacatataaatagatgtttatactacagcatgataaacagtataatagagatggactcgaaatattctgtttaaaaaacgcttagcaggagtatagattccagttgccctgaatatacactccctttttaaaaaaaaattattttttgaaatattctaggatgagtagagagatgagagtggaaagactcccggcttacatgtcagacagaactggctggctttgctatattcatattaaatatttttgttttggacatttggtctttattttttattttattttatttttttgagacagagtcttgctctgtcgcccaggctggaatgcagtggcacgatctcggctcactgcaatctctgccttccaggttcaagcgattcttctaccccagcctcccaagtagctaggactataggtgtgcgccaccacatccagctaaattttgtatttttagtagagtcggggtttccaccaggccaagctggtctcgaactcctgacctcagatgatccgcccaccccagcctcccaaagtgtggaaattacaggcatgagccaccgctcgggcctggtctttgtttttaaaatgggaataatacctgtatcattaggtcttgaagattaga

SEQ ID NO: 2786 - DNA, 6000 bp, Homo sapiens
tccctttctgatacagatcttaatctgctgtcaaaaagacagtaacaaaggcgaaggaaaaatcctgcctttctgcttctgctatccactcctctccacctaatcaccctccctgtttcttacacctaagcaaacattaaaagagaagaggaagacaaaaccgtcactgctcctttcatcaactcttgtagcctccattatactttccacaacccaagtctctgaccttgtatgtcatccttcaggcctcaaccaactacttgccctctacctgctgaagtttctgcatcattttcatgggaaacatgtgcctcatcttctcgacacaaccctttcatgagctggggacaatgctgaactatttctaatgataatcaagtgttctgttggaaaagaatccaatcccaaccttaaaaaggtcatataaggtaacccaaacaactttagcttcacctataaatttaaaataccttctggccgggcatggtggctcacgcctgtaatcccagcacttagggaggccgaggcaggtggatcacctgaggtcaggagttcaagaccagcctgaccaacagggtgaaatcccgtctctactaaaaacacaaaaaattagccaggtatggtggcgggtgcctgtaatcccagctactcgggagtagagaagaatagtttggacccgggaggcagaggttgcaatgagccaaggttgcatcattgcactccaacctggacaataagagcgaaactccatctcaaataaataaataaataaataagataaaataaaataccttctataatttacaaagtattttttaaagttatttatatttctaaactcttagaataacaaagtctacataatcattcccagtaatataaaaacaaaacatgtacttgccccaaaataataaatcaggtagtgtcctttagttgtttttttttgttttttgtttgtttgtttgtttgagacggagttttgctcttgttgcccaggctggaatgcaatggtgcgatctcggttcaccgcaacttccgcctcctgggttcaagtgattctcctgcccagcctccggagttgctaggattacaggcacctgccaccacatcaaattaatttttgttatttttagtacagatggggttttgccacgttggccaggctgggctcaaactcctgacctcagatgatccacccgcctcgacctcccaaagtgctggaattacaggcatgagttgccatacccagcaactgttagtttcaattgctaagatttatagaaaaaataagcttcaaaataatgcaagagctttcagatattcattattttgaagatttcaatccttttcaatcccattcattcctttcctgaagtagaaattcctaatctttataatcagatataaagtctgataatgataagccatctaatgttctgatcatgctgccaaaatttgcaatgttacaaactctgttgggggttttctggtctacagtattttaggttcagataagtccatctttgttcctgacattcccatgactcagatagaacaaagaaaatactggttcagtgcctcagaaattgagatggagtgggtagagccctctaaatacctgcgtatttcctccactcacatacaacacggttgggctggtggctccagtgatgaggcggcccatctcaatgtggcctatacagtggttcacacccaccaatggcttattccacagttgggccacagtacgggccacaacagccacagaaaccagtggggcacccatgccagggcctagggagatagaaatggaagttataatcctagagattggaaaaaaacaatagtgggggacataagggatgtgaggtggggtaggggtagtgatggtggcagaggtaaggtgttggctattttgacctagccaggttgcaggtatattcctccatcgttgaccactctcccagccatacccttggtgtatgcaatgcagtcgatatcctgggaggttaatccagactctgttagtgcctcctgcagcaggtctaggataacagctcggtgatgcctggctgtatcacctggaaggaatcctagaaaatgaacataggtcagagatcacagggattttctgtagcaaaggtaggtaggaagttaaagaaagcaacaggagttttagtgatgtagtaagagtcctttcactttccccaagcatcctatcttccacattttcacatctactctttccggcttctatataggctattcaactttcagaaatgctcttcttcttaccctactcagccttcaggtctcaatgcaagtagtatctacctcataccctttcgtgatcttttttttttttttttcttttgagacagtctcagctctgtcacccaggctggagtgcagtggcacgatctcggctcactgcaacctccacctcctgagttcaagagattcttctgcctcagcctcctgagtagctgggactacaggcgacaccaccacgctcagctaacttttgtatttttagtagagacggggtttcaccatattggccaggctggtctcgaactcctgacctcgtgatccgtctgcctcggcctcccaaagtgctgggattacaggcctgagccaccgtgcctggcctttggtgatcttctttctctgtgaccctacagaactctatgcatgatgatgtcatttatttaacataacaattacagcattataattttctgtggtttgctcagcttaatcatgaatatctcaaagcattgagtattttatttatctttgtattcccagtgcccaagtgcccagaggagtgaatgctaaacatacatatatatttctagtgagtatctgtcacaacatcacctgttcagggaggcttttcagatacatgcaagtcagctgccctctcctatgtatgcaagtgtttgaggggagagtagcaagatataatagcttatttaaaatatcaattaaaagttgtaatgtgttttgtactttttttttttttgagacagagtttcactcttgatgcccaggctggagtgcaatggcaccatctcggctcactgcaacctctgtctcccgggttcacgcaattctcctgcctcagcctcccaagtagctgggtttacaggcatgcgccaccacgcccagttaattttttgtattttttagtggaaacatggtttctccatgttggtcaggctggtctcgaaccccgacctcaggtgatctgcctgccttggcctcccaaagtgctgggattacaggcgtgagccaccacgcccagccgtgtttggtactttcatctaatcttcaagacctaatgatacaggtattattcccattttaaaaacaaagaccaggcccgagcggtggctcatgcctgtaatttccacactttgggaggctggggtgggcggatcatctgaggtcaggagttcgagaccagcttggcctggtggaaaccccgactctactaaaaatacaaaatttagctggatgtggtggcgcacacctatagtcctagctacttgggaggctggggtagaagaatcgcttgaacctggaaggcagagattgcagtgagccgagatcgtgccactgcattccagcctgggcgacagagcaagactctgtctcaaaaaaataaaataaaataaaaaataaagaccaaatgtccaaaacaaaaatatttaatatgaatatagcaaagccagccagttctgtctgacatgtaagccgggagtctttccactctcatctctctactcatcctagaatatttcaaaaaataatttttttttaaaaagggagtgtatattcagggcaactggaatctatactcctgctaagcgttttttaaacagaatatttcgagtccatctctattatactgtttatcatgctgtagtataaacatctatttatatgtctgactccacagcagtataacatctatttctgaatacttagcacataaaatgcgctcagtaaaaggtaaatgaactcatcagatccacgtccaagtgcctgtaactcttctagtcatcagccttgtgacgttaataatgtcacataatttcaatgagactcggatcgaaagctgcacctcactagtatttaggaagatggaaggctgattctgtgcggggaagtgcgcggaaaactcttaagtcccctactcaccaacctgtgccaggaggcgtgacgtaagtccgccgcgggttcgccagcaccttgccatcccgcaccacgcccacgccaatcttattggcgctgccttcaaaacccagcaccgccggcatggcggaggctgggagaaaacgccgacaggactcctggcaatgtcaggagctgtggaggtcctcactagtccgcgctgggccgcagctttccggagcgcagaggaagctggccagcctgcagatagcactgggaaagacaccgcggaactcccgcgagcggagacccgccaaggcccctccagggacctgtcttcctaactgccagggacgccgagccaactctgtgccttacattcgtatccgttttcctatctctttcccgtggtccagcccagccttctccactgtttttttccctcttgcacatagttagaatcttaagtcagtgtcacacaatgtgctgtgcatctggcacaacgataaacagcccgagggagggttggggacctaagtgtcctagagaattagaggagggaggcgaggctaagcgtctccgtcacgtggtgtcagacagaccaatcacgcgcattcttcggccacgacaagcgcgcctctgatcacgtgaccaggtccgctacccacgtgggggctcagcgtgcacccttctttgtgctcgggttaggaggagctaggctgccatcgggccggtgcagatacggggttgctcttttgctcataagaggggcttcgctggcagtctgaacggcaagcttgagtcaggacccttaattaagatcctcaattggctggagggcagatctcgcgagtagggtacaaggcactatgaaatgatctagtttcgtgggtgaggggctgaagggcctatgatgcacggaggcggggaaaggatttagagataacgtggtttgaaaggcgggacctggtgcggggacgctcttgggaggagtcttctccccagccttagctggtttcatgatttctttgcgtctgtaggcaacgcggtaaaaatattgcttcggtgggtgacgcggtacagctgcccaagggcgttcgtaacgggaatgccgaagcgtgggaaaaagggagcggtggcggaagacggggatgagctcaggacaggtaagggaatgaaatcagcccttcttcctagaagctgcggcgggggtgtttgtcattcccttgatgtacggtaagtacgggccgactcatttttgcaggggtttgtgaagaagtcgcaggaaccgtaggctttcgttgggtctatagttaacgccggatcgcagttggaaaccaccagctttttgtcagtatatattactcattttatagagccagaggccaagaagagtaagacggccgcaaagaaaaatgacaaagaggcagcaggagagggcccagccctgtatgaggaccccccagatcagaaaacctcacccagtggcaaacctgccacactcaagatctgctcttggaatgtggatgggcttcgagcctggattaagaagaaaggattagatgtgagtggaatttgagggaaagagacattttttagtattgaatggtcttagggtttagtcaccccttttctccgtttagccttcaggctgttttatttttctcctgcccgtagttttctgtggggcttccccagtcttgccagttgtatttcctaaatgtctgttccttcacttccattgccattttcttttttagtgttctctcctcttcccagaatgttgcaaaaacctcttcactatacttcctccatttt

SEQ ID NO: 2787 - DNA, 6000 bp, Homo sapiens
tagccacttgagcggccaaccatctcagtttgttgggaaaccggcagggctgggacaaggagttttcagtgcttaaactgggaaagttccaggccaactgggatgagctggtcaccttagtgaccacagatgtgtacttgtggatgtcccctgaaaagaatcccattctacatcccccaatcaaaggggtcaggatctagaaccgtttttagacctagataaggattccaaaaggtgggggcagagaagtattggggaacgggctaggaatagctagcagcatcttagaaggagcccagacttggcaaagagaaaaagaatatgtggcacttctctgaaaaattattcctgtcctctaaatattcctgccattcctcataccccaatggccaacctccaaacttccctgactgagtgcttgctcctggctccttttcacgtcaggtggcctttgcagggaggatcagatggtcagggggcaaggtaagtctcagactcccagggcccctacaccactgtccactccttgtgtgcctgtctcatactcactggaccaaatacaagacaggcaggaaaacttccttttcaaaccccacagattcattttccccttcagagccatttcctcctcagaggcttttataagcctcagagaatggatcccattcctacccctcatccaagctcccatacctctccttccattttctcctttatttccagagtggttctatgggttggcctgtggaaccagggcacctgggctgaggagggcaggtcaagatgccactgaaggctggcactgcccagcctggcttgacccagcagggaactaggtggcttcagtacaactcaggcatgaagaaccaccaggggaagcacacttaagtcatcatctaatggcttcccagtgtatttcacaataacagctattggcaacaagtaagcaatgctggcacatgggtacatgccaacttgcaagcacacaatagtccttaacagggaccatcaccaccctcataatccctcagtttggaggagcctgggcctgccccaagtgtatagtaatcctacccagccagatccaaactctagtcaaagaagggtccccaaatgtcccagaacactgacctctggagggtgggtggggggtggaaagggacagggaagggcagcaggttgtagggtctgctgtcaaaggtcccattccggaccgtccttctccatcccaccccccgggtctccattgccgcggccctgccccaccactttcagctgaggggtagttcggagctccatggtcccttccctagagcggccgccccctcgggcctccccagagccttcgaagagccgcgtgaggaaacggggacctgcccggggcagcagatctccagcggtgaagacgtagagcaccgggttgacgctagaactgaagaaggccaaggccgtagttcccgctcgcgccgcctggccggctccgcccagcttcgccaaggccccttccggtggagccagcgctgcgaccgcctgcagaaggttgactgcgtggtagggggcccagagcaagccgaaggcaagcacgatggcgctcaccagccggcccacccgcgccccgtgccgcccggagccccagcgggcgccccgcagccgtgccagcgtcacgctgtagcagccgagcatcagcccgaaaggaagcacgaaagcggtcagagtctccaggctcaggtgggcggcggcgtggaccggcgacgggtggcacagctggcatacgcggtccctccacaggtggcggtagacggcggccgggacggcgagcaacagggcggccagccagaccgccagcagcaggcggcgggccagggccgggctgcgcagccgaggcgccaggaaggggcgggtgactgcgaggcagcgctgcaggctgagcaggccggtgagcagcacgctggcgtacatgctgagcgcgcacacgtagtacaccgccttgcagcccgcctggcccagcggccaggcctgccgggtcaggaaggccacaaagagcggcgtgagcagcagcaccgcgccgtcggccagcgccaggtgcagcacaagcgtggccgccagcggtcgcccccgtgcaggccgccagcccgccaagctccacaccacgaagccgttgccaggcagccccagcagcgccgccagcagcaggaaggctgtgcctgtggcccgcgaagtcttccagctcagcagtgtctcgttccctgggggacggtagcagaccgacatccttctgggcctacaggtgggtggaaggcgccacagagggcgttcaggggtggggcaaaaccccacctgtgatgcccgatgagaaggtgccatgcctcctccttacttccctgcagcctgcctcttttctgcctgggagtcctgacttccacgaggacccagaccccacctcaaacacaactccttcttggaacccagatcccctgctcccagtcagttgacctgccccactcctggcctccttcccagagctcagtggtaaacaggcataaagtcatcaccccaggctgtcactatctctaccaccactcctctagtctggcccctccttctttgtccagccccattctagcacatctgggcaaaactggatggtggggtgtaaagggacgtgcacagatctacttaccaagctgggagcaagcaggattgggggcctggagaagctgaaaggttaagcagcagtaggcgaggtgcctactcctgtcctgtgcctatcacatttgcagagggtaagacaagaatggggagggacaagatgaggctcatcctgggcctctcctggggcccctccctcaccctgctccttcccatcaccaacgcacccaggcgtccaggcatgtgagagcctgccttgccaggaaacagcacaagctgaagtggggcagtaagattccctggtggtggaaggaaataggaggactctgctgaatcctggtcctgcttctgttctcatccctcccccagctctggccccaatcctcccagcccaccttctgcagtgtgtatgttgcctggtctctctggcctgcagaggtgacccaaacaactcagtcccccacctgccttatccttgcctgtttccagtctcctggtccggctgagcccctggcctcctacctcctcccacctcttgcctcaggccctgccccagtcactccaccctcagggctctcaccgggctgtcaatgacagcttttccatgtaaggcatggtgctaggttccaggaggaacaggggatgcatggaggcataatggttagggagtcatgacacacaaccatgaagaggccccattaccaggctgcaccaggatacaagacaagaaaggaaaggatgagtagggacatactaagaagcagccctctcctcttggaaaagtcaagcaaaacttggaaatgaagagatttgaggggggcctggcagatggatagagctgggggaagggaaaagaaaggcctctgctcaagtaacagccagaacttgaggttgcttggggagggcaccaggagcactgtcttagtttgggttcttccaaagcagagcttgagctaagggcttgggtacaggtgatcctgtattcttgagctaagggcttgggtacaggtgatcctgtatttgggaggttaactcaggaagtgagggcataaggtaaaacaagagagaggaaagccattaagagtatgttaagtcccttcagtaggccttgggaacctctgagaaaagtatagattgcccaagacaaaagactggcagggtgatcagtccaaagcatttattaggagaatgtacttaatgagtgggctacagcgtatcctcacaacagacagtgagagagagttgttctacctgggtatatccaaaacaagggggtcagggtatggagtttacgagggttcaaggtatttggttcagggccagggccagtttttttcagtgttttgggcaacaacctgaataccttttcaaggctctggcttgggctcaagcctgcaggggaaatgcaactggccaggtcacagggcaatcaagttactctgtgtttctttgtcaggacacagaaaaaaagtggggaagctgggggaccctacaaggatccttggcaggaaagcagggattgtgttcatttgagggtttcactgtcagtgagagtctcagcttccatgcaactgtccatcacggctgcaactgaaatcagagctgggacacagcgcaccagaagctaaagtcttgatgccatcaaaggacatccctgccccattcacatctctgtcacgtccactaatcggcaaaaggagaaaagtgagagaagatgacctaagtgtgactgcagcaggcagctctggaaaatgaagccagagcagtgagccagcccctcctccgaccaaggaggaaggaaagagcaggtaagcaggaaggccagtgtcccagacaggaccctaatgatcctgaatccatgtatcaggatccatcctctccttacacccttcctggacacagtctcacctctcattttccaaagccctgccatgctgccatcccacttccccacactctgccccgggttcccttttcctaaagctgcagcttatggcttctccagtaggtggcagcacacacagagccactcataaactgcagcttctcagagcctgagagccagaaaccgtccccagaaattccctccatagaaataaaaaaacaccagaagtcacatttcatccttttacatggttcccatctaccctcacaacacatgtcatcaccaaagacacacatacaagctccaatggcttttgccaggcaattcttcctccaggaccccatctggcccctccctcatccctccccttggactttgcccttcttactggccaggcaggggggccagagtccaggcttgactcattcccaccttgtcctgggctgagatcccaggtttgtaacagaaaacaccactaaagccccagcacaggagagaaccacccagcccagaagttccagggaaggaactctccggtccaccatggagtacctctcagctctgaaccccagtgacttactcaggtgactgctaaccctccgctctaccctccacctttaggggatataggcagggcaacaatactccactcagcccctaggagactaaccagtaccccttcctctcctgctccccactccacagtgggcttgtcaagctcctgagccacccgcccccacctgcactccatggtctctccctcatccctaatcgataaacctagatctctccctccctagccctctagccactctaccctcatcatgccctttacactcaccaagcccctcctcgccccttcttgacttttcttctcaactaccaggtcagtatctaatataagctcggagtttggacggagggtctggacctcagctccaccaccccagcgacctttccgtgtctgtgatcacaagcggaccatccggaaaggcctgacagctgccacccgccaggagctgctagccaaagtaagtaggccaagttcctcggttcctatagcaggggtagccaaggggctccacaacagtggcaacttgtgatgatggagcagagggctgaagtcacacagctgcccctccctctgagggctaaaagcagcggagtgggcctaatgagctctggtcaatttgttcattttccaccgagtgagcttttctatgggagcaggggttagcaggagatagggagagttcgagggacagaattcagaagctagtatggaaaggtgatttgtgtgacaaatcaagttcaaattctgattctgccacttcctgcctgtcaaaccttgggaagttgttcaacctaccaaaacctcagtttcttcaactataaaaaggcaataataatacatcacctcctagggttgttgaaaggagtaagaggataatgtaggtaaagtcctc

SEQ ID NO: 2788 - DNA, 6000 bp, Homo sapiens
ggggcgggccaccgccagtgagcggtctagactcatggccgtgataagcaggacgctggcgtacatgctgactccgcagacatagtgacacaggcggcaaccagccagtccaaaactccaggtgccttgggccaggaagtgaaggaaaaagggagcagtgagcaatacggccaggtcggccagggccaggttcagcaccatcagggcagtgacagagcgcttctgcatccttttcaggatactccacaccacaaagctgttgccgggaagccccacagccagcgccactgacagcaggatgatagccagcagagagatgaactctacacctagtgaggggggtgctgcagaagatgtagtgttcatggccgtcgggaggacctggagagtgagggcggacacacgcatgagagtagaggaccaagggtttcctgacgccatggacacacctaggctgagaactctagtctatctccagggtcagcagcatcagaggtccccctgaaatatactgcccccatcgctgcagactgacaacttaaagggatctggttgagtacaaagactagtttcctaactgggtcatgcggccccttcctgtccacagacccaattgcaaaatatacagtgaccacagcagcagcagcatttccagaccttttcagtctcctccccttaggagaccctaaagcccagaaccaaacagagttcctaccaatgctgcaccccttgaaaggccagtctttttgccccctgccaggccctcagcccctcaatcccattaactttcccaatcacctgcctactgtccccagagatgcccagggtcaaccaggaataacagggaggggaggagtttagtggacaagtgacaaggacaaagcctcccaactttttacgctggtcaggctttctttggagattcctttgcaccttctttcatggctgcacactgtcccaccaccaccacaaccacggccgctcccaggaaacttacttacaagctttggcaggaactggttggaagctgatgccaatcccagggtcagggcagggtggtgtagcctatccctggatctgtcccactgccaaaggcctggccccaggtctaggtgctgtttgctaaatcagccagagaggaagtaccacagagcagaggacagggaagacgcatcttcctgagggtggggctgaaacccctacccactcccttcactaggaggggggatagtctgttttccagggcaacccagaaggcaggaggactccttagaggtggggccagatgagaagagaccaggaaggagcagtgagagaggaaagaggggtgtggggagtgagaaggctgggtgtggcctcaagatgcaggtctagactggataattgaacaaagtagtgaatggtatcatataggagaaggaggtatggtagccagagaagggaaatgggctcagattggaggctacaatgctgatatctttttgttttgttttgctttgttttaagattaataggaagtgtaggttggagctgtgactaggtcctgggtctgggtttgggttagataacatcatgatttaaagagggcacatcagtaaatgccgaagggggcagcactctgtccttggcttcagttcaagctatgatctaggtggtgggaagagggccatcttccagcaccccctttcctccccttacttaaagggactggttccatttaggtcaaccaattctccattctctttggtagaagccaaaatccaaatggtctccttggtatcacacagaatgccaattacttcccctttccccaagcacctaccttgtgcttgcccatgtggttaccctgctgagtctggatttatgatctgggcaaggagattggcactacctctttcctatcttctcacagcctactattcagttccactttagacacacaaagttgaggccgagctggcaggctgagcatgaggagcaggagtgagggagcaggaacagtgatgcctcatgcccaccctgccaagaggggaaaccagcaatgcagaaatggtccccttacccgtttcctggacagaggaatgtctcctttccttgaagtctcctgcaaaagctaaaaactaaaaattcctggcaggttgtggtggttcataccggtaatcccagcactttgggaggctgaggggagcagatcacttgatgttagcagtttgagaccagcctggccaacatggtgaaaccccgtctctactaaaaatacaaaagatagctgggtgtagtggcatgtgcctgtagtctcagctacttgggaggctgaggcaggagaatcatgtgaacccaggaagtggaggctgcagtgagctgagatcgcaccactgcactccagcctgaatgacagagcgagactccatctcaaaaaaaaaaaaaaaaaaaaaagaaactaaaaagtccttccttcaatctgaccatgggccttcctgcttccctttcaactctcacttctcaggaaagatgcaaagtataatggtggccactgaggtcccttaacctttccagagcccccacttgttctgcttggagaaaagccagagcagagatgacctcgcagctgtcagaggatatgaaaaaaatgggcagaaaccgcagcaagaactgaagtcagagttcaggaagggcttcctgaccgcacgggatgtgagagaatggcaatgtgcaacaaaggaagttaaggaacctctgcccagtgcatgaggacagaaagaatcccgtgaggcctgtgtttggggacagaaactccagggtcaaccagaggccccttcagacagaaactgggttgtccttgcctcctctctcaagctgttccccacccgcatctaccttgatggcctttcttccccacacccaggaccaggcactctaagcatactccctgctgttctagttcacaggtgctagttcatcccagttttggtagccctagcatgaccctggggactgggtttcttttgctgttttgacttctgtctgggaagcagggaggtgtgagcagtcgctaaagtagagcctggggtgatggtcagggtagccacttgagcggccaaccatctcagtttgttgggaaaccggcagggctgggacaaggagttttcagtgcttaaactgggaaagttccaggccaactgggatgagctggtcaccttagtgaccacagatgtgtacttgtggatgtcccctgaaaagaatcccattctacatcccccaatcaaaggggtcaggatctagaaccgtttttagacctagataaggattccaaaaggtgggggcagagaagtattggggaacgggctaggaatagctagcagcatcttagaaggagcccagacttggcaaagagaaaaagaatatgtggcacttctctgaaaaattattcctgtcctctaaatattcctgccattcctcataccccaatggccaacctccaaacttccctgactgagtgcttgctcctggctccttttcacgtcaggtggcctttgcagggaggatcagatggtcagggggcaaggtaagtctcagactcccagggcccctacaccactgtccactccttgtgtgcctgtctcatactcactggaccaaatacaagacaggcaggaaaacttccttttcaaaccccacagattcattttccccttcagagccatttcctcctcagaggcttttataagcctcagagaatggatcccattcctacccctcatccaagctcccatacctctccttccattttctcctttatttccagagtggttctatgggttggcctgtggaaccagggcacctgggctgaggagggcaggtcaagatgccactgaaggctggcactgcccagcctggcttgacccagcagggaactaggtggcttcagtacaactcaggcatgaagaaccaccaggggaagcacacttaagtcatcatctaatggcttcccagtgtatttcacaataacagctattggcaacaagtaagcaatgctggcacatgggtacatgccaacttgcaagcacacaatagtccttaacagggaccatcaccaccctcataatccctcagtttggaggagcctgggcctgccccaagtgtatagtaatcctacccagccagatccaaactctagtcaaagaagggtccccaaatgtcccagaacactgacctctggagggtgggtggggggtggaaagggacagggaagggcagcaggttgtagggtctgctgtcaaaggtcccattccggaccgtccttctccatcccaccccccgggtctccattgccgcggccctgccccaccactttcagctgaggggtagttcggagctccatggtcccttccctagagcggccgccccctcgggcctccccagagccttcgaagagccgcgtgaggaaacggggacctgcccggggcagcagatctccagcggtgaagacgtagagcaccgggttgacgctagaactgaagaaggccaaggccgtagttcccgctcgcgccgcctggccggctccgcccagcttcgccaaggccccttccggtggagccagcgctgcgaccgcctgcagaaggttgactgcgtggtagggggcccagagcaagccgaaggcaagcacgatggcgctcaccagccggcccacccgcgccccgtgccgcccggagccccagcgggcgccccgcagccgtgccagcgtcacgctgtagcagccgagcatcagcccgaaaggaagcacgaaagcggtcagagtctccaggctcaggtgggcggcggcgtggaccggcgacgggtggcacagctggcatacgcggtccctccacaggtggcggtagacggcggccgggacggcgagcaacagggcggccagccagaccgccagcagcaggcggcgggccagggccgggctgcgcagccgaggcgccaggaaggggcgggtgactgcgaggcagcgctgcaggctgagcaggccggtgagcagcacgctggcgtacatgctgagcgcgcacacgtagtacaccgccttgcagcccgcctggcccagcggccaggcctgccgggtcaggaaggccacaaagagcggcgtgagcagcagcaccgcgccgtcggccagcgccaggtgcagcacaagcgtggccgccagcggtcgcccccgtgcaggccgccagcccgccaagctccacaccacgaagccgttgccaggcagccccagcagcgccgccagcagcaggaaggctgtgcctgtggcccgcgaagtcttccagctcagcagtgtctcgttccctgggggacggtagcagaccgacatccttctgggcctacaggtgggtggaaggcgccacagagggcgttcaggggtggggcaaaaccccacctgtgatgcccgatgagaaggtgccatgcctcctccttacttccctgcagcctgcctcttttctgcctgggagtcctgacttccacgaggacccagaccccacctcaaacacaactccttcttggaacccagatcccctgctcccagtcagttgacctgccccactcctggcctccttcccagagctcagtggtaaacaggcataaagtcatcaccccaggctgtcactatctctaccaccactcctctagtctggcccctccttctttgtccagccccattctagcacatctgggcaaaactggatggtggggtgtaaagggacgtgcacagatctacttaccaagctgggagcaagcaggattgggggcctggagaagctgaaaggttaagcagcagtaggcgaggtgcctactcctgtcctgtgcctatcacatttgcagagggtaagacaagaatggggagggacaagatgaggctcatcctgggcctctcctggggcccctccctcaccctgctccttcccatcaccaacgcacccaggcgtccaggcatgtgagagcctgccttgccaggaaaca

SEQ ID NO: 2789 - DNA, 6000 bp, Homo sapiens
caatgcctgcccaatggcaagaagcaagaagggcaggtcttatcccatgccccttccctctttagctgcccaacatccatcagttggctctagacattggtcgatgtcccactttgactttccggcactttgatacctcctaaaggttgcagctctccgtgttcttcagtttttgggggatcctagctagaggctgacctttttcctctttgctcctaccatgtcattggcatctccccttgctcccctccaagtcacttctggtttggaattggaaagcaagccaggttctcacgaagtccacccttctgtcttatctacaatgctgcacctcacttcccacaccctcaagagttctccagaagtgttttcagtaatagtgtttaacctttttgagtccttactctgtgccaggtatgaggactttacctacattatcctcttactcctttcaacaaccctaggaggtgatgtattattattgcctttttatagttgaagaaactgaggttttggtaggttgaacaacttcccaaggtttgacaggcaggaagtggcagaatcagaatttgaacttgatttgtcacacaaatcacctttccatactagcttctgaattctgtccctcgaactctccctatctcctgctaacccctgctcccatagaaaagctcactcggtggaaaatgaacaaattgaccagagctcattaggcccactccgctgcttttagccctcagagggaggggcagctgtgtgacttcagccctctgctccatcatcacaagttgccactgttgtggagccccttggctacccctgctataggaaccgaggaacttggcctacttactttggctagcagctcctggcgggtggcagctgtcaggcctttccggatggtccgcttgtgatcacagacacggaaaggtcgctggggtggtggagctgaggtccagaccctccgtccaaactccgagcttatattagatactgacctggtagttgagaagaaaagtcaagaaggggcgaggaggggcttggtgagtgtaaagggcatgatgagggtagagtggctagagggctagggagggagagatctaggtttatcgattagggatgagggagagaccatggagtgcaggtgggggcgggtggctcaggagcttgacaagcccactgtggagtggggagcaggagaggaaggggtactggttagtctcctaggggctgagtggagtattgttgccctgcctatatcccctaaaggtggagggtagagcggagggttagcagtcacctgagtaagtcactggggttcagagctgagaggtactccatggtggaccggagagttccttccctggaacttctgggctgggtggttctctcctgtgctggggctttagtggtgttttctgttacaaacctgggatctcagcccaggacaaggtgggaatgagtcaagcctggactctggcccccctgcctggccagtaagaagggcaaagtccaaggggagggatgagggaggggccagatggggtcctggaggaagaattgcctggcaaaagccattggagcttgtatgtgtgtctttggtgatgacatgtgttgtgagggtagatgggaaccatgtaaaaggatgaaatgtgacttctggtgtttttttatttctatggagggaatttctggggacggtttctggctctcaggctctgagaagctgcagtttatgagtggctctgtgtgtgctgccacctactggagaagccataagctgcagctttaggaaaagggaacccggggcagagtgtggggaagtgggatggcagcatggcagggctttggaaaatgagaggtgagactgtgtccaggaagggtgtaaggagaggatggatcctgatacatggattcaggatcattagggtcctgtctgggacactggccttcctgcttacctgctctttccttcctccttggtcggaggaggggctggctcactgctctggcttcattttccagagctgcctgctgcagtcacacttaggtcatcttctctcacttttctccttttgccgattagtggacgtgacagagatgtgaatggggcagggatgtcctttgatggcatcaagactttagcttctggtgcgctgtgtcccagctctgatttcagttgcagccgtgatggacagttgcatggaagctgagactctcactgacagtgaaaccctcaaatgaacacaatccctgctttcctgccaaggatccttgtagggtcccccagcttccccactttttttctgtgtcctgacaaagaaacacagagtaacttgattgccctgtgacctggccagttgcatttcccctgcaggcttgagcccaagccagagccttgaaaaggtattcaggttgttgcccaaaacactgaaaaaaactggccctggccctgaaccaaataccttgaaccctcgtaaactccataccctgacccccttgttttggatatacccaggtagaacaactctctctcactgtctgttgtgaggatacgctgtagcccactcattaagtacattctcctaataaatgctttggactgatcaccctgccagtcttttgtcttgggcaatctatacttttctcagaggttcccaaggcctactgaagggacttaacatactcttaatggctttcctctctcttgttttaccttatgccctcacttcctgagttaacctcccaaatacaggatcacctgtacccaagcccttagctcaagaatacaggatcacctgtacccaagcccttagctcaagctctgctttggaagaacccaaactaagacagtgctcctggtgccctccccaagcaacctcaagttctggctgttacttgagcagaggcctttcttttcccttcccccagctctatccatctgccaggcccccctcaaatctcttcatttccaagttttgcttgacttttccaagaggagagggctgcttcttagtatgtccctactcatcctttcctttcttgtcttgtatcctggtgcagcctggtaatggggcctcttcatggttgtgtgtcatgactccctaaccattatgcctccatgcatcccctgttcctcctggaacctagcaccatgccttacatggaaaagctgtcattgacagcccggtgagagccctgagggtggagtgactggggcagggcctgaggcaagaggtgggaggaggtaggaggccaggggctcagccggaccaggagactggaaacaggcaaggataaggcaggtgggggactgagttgtttgggtcacctctgcaggccagagagaccaggcaacatacacactgcagaaggtgggctgggaggattggggccagagctgggggagggatgagaacagaagcaggaccaggattcagcagagtcctcctatttccttccaccaccagggaatcttactgccccacttcagcttgtgctgtttcctggcaaggcaggctctcacatgcctggacgcctgggtgcgttggtgatgggaaggagcagggtgagggaggggccccaggagaggcccaggatgagcctcatcttgtccctccccattcttgtcttaccctctgcaaatgtgataggcacaggacaggagtaggcacctcgcctactgctgcttaacctttcagcttctccaggcccccaatcctgcttgctcccagcttggtaagtagatctgtgcacgtccctttacaccccaccatccagttttgcccagatgtgctagaatggggctggacaaagaaggaggggccagactagaggagtggtggtagagatagtgacagcctggggtgatgactttatgcctgtttaccactgagctctgggaaggaggccaggagtggggcaggtcaactgactgggagcaggggatctgggttccaagaaggagttgtgtttgaggtggggtctgggtcctcgtggaagtcaggactcccaggcagaaaagaggcaggctgcagggaagtaaggaggaggcatggcaccttctcatcgggcatcacaggtggggttttgccccacccctgaacgccctctgtggcgccttccacccacctgtaggcccagaaggatgtcggtctgctaccgtcccccagggaacgagacactgctgagctggaagacttcgcgggccacaggcacagccttcctgctgctggcggcgctgctggggctgcctggcaacggcttcgtggtgtggagcttggcgggctggcggcctgcacgggggcgaccgctggcggccacgcttgtgctgcacctggcgctggccgacggcgcggtgctgctgctcacgccgctctttgtggccttcctgacccggcaggcctggccgctgggccaggcgggctgcaaggcggtgtactacgtgtgcgcgctcagcatgtacgccagcgtgctgctcaccggcctgctcagcctgcagcgctgcctcgcagtcacccgccccttcctggcgcctcggctgcgcagcccggccctggcccgccgcctgctgctggcggtctggctggccgccctgttgctcgccgtcccggccgccgtctaccgccacctgtggagggaccgcgtatgccagctgtgccacccgtcgccggtccacgccgccgcccacctgagcctggagactctgaccgctttcgtgcttcctttcgggctgatgctcggctgctacagcgtgacgctggcacggctgcggggcgcccgctggggctccgggcggcacggggcgcgggtgggccggctggtgagcgccatcgtgcttgccttcggcttgctctgggccccctaccacgcagtcaaccttctgcaggcggtcgcagcgctggctccaccggaaggggccttggcgaagctgggcggagccggccaggcggcgcgagcgggaactacggccttggccttcttcagttctagcgtcaacccggtgctctacgtcttcaccgctggagatctgctgccccgggcaggtccccgtttcctcacgcggctcttcgaaggctctggggaggcccgagggggcggccgctctagggaagggaccatggagctccgaactacccctcagctgaaagtggtggggcagggccgcggcaatggagacccggggggtgggatggagaaggacggtccggaatgggacctttgacagcagaccctacaacctgctgcccttccctgtccctttccaccccccacccaccctccagaggtcagtgttctgggacatttggggacccttctttgactagagtttggatctggctgggtaggattactatacacttggggcaggcccaggctcctccaaactgagggattatgagggtggtgatggtccctgttaaggactattgtgtgcttgcaagttggcatgtacccatgtgccagcattgcttacttgttgccaatagctgttattgtgaaatacactgggaagccattagatgatgacttaagtgtgcttcccctggtggttcttcatgcctgagttgtactgaagccacctagttccctgctgggtcaagccaggctgggcagtgccagccttcagtggcatcttgacctgccctcctcagcccaggtgccctggttccacaggccaacccatagaaccactctggaaataaaggagaaaatggaaggagaggtatgggagcttggatgaggggtaggaatgggatccattctctgaggcttataaaagcctctgaggaggaaatggctctgaaggggaaaatgaatctgtggggtttgaaaaggaagttttcctgcctgtcttgtatttggtccagtgagtatgagacaggcacacaaggagtggacagtggtgtaggggccctgggagtctgagacttaccttgccccctgaccatctgatcctccctgcaaaggccacctgacgtgaaaaggagccaggagcaa

SEQ ID NO: 2790 - DNA, 6000 bp, Homo sapiens
aggccaaggtgggtggttcactttagctcaagagttcaagaccagcctgggcaacatggtgaaacctggtctctacaaaagaaaaaaaaaaactcaaaaggactgctttaaggtcaaatggaagaggaagaaagttcagtttccattgtctgggccacagttcagccttacggctatacccatatgcacacttgacagattaagagaaatcttaacagataaaactgcacagaattttaaatagcaatacgaaattatatttgaaattttgggaaagatttttttttaagttacattttatgtggaaagctcacaaaaaattttttttttagaaacagggtcttactctgtcacccaggctggagcacagtgatgccatccatcatagctcactgtagcctcaacctctggggctcaagtgatcctcctgccttggcctcccaagcagctggggctacaggtatgcgccagcatacctgtaatgtagtgaaagctaattttttcactttctgtagaggcagagtcaccctgcccaggccagtcttgaactcctggcctcaagtgatccctggcattggccttccaaagtgctggaattacaggttcaagccactgcgcccagctcacaatatataaattaagtgtattcattaaaaaatatagtcatttgaggtaatctttaaaatctaaatttccttttaaatcctaaaacatttcctcggtagcaccaaaccaccatctgcactttctggtttgaactcgacacccattctagtatgattaatactgggataatttgccagattcccatataccacttcatttcccaatacagaggaaaatgcacttccaagtagactgatttgcaggaacagctctcagtataccatagttcccaaattaaacacaggattaaacaataaaaccagattatccaaaaatcactccaatttcaacccaagacaaaaacaaatccaatgagactaacactgaatcttgattaatactgaaaaaatatttatcgagcttttaaaaatatggtacagattgcatatgaagacataacattatacttattattcttcagaaacaagtaaaattataattaaaaactgatgcaagataaaatatccctagtgaccattttcagtttagcttaatgctagaagtgatggtccttacatataatagaaggatttttgaaaagtcatgagtgcagtaaggaagacaaaaagattgcttactggattgatgcttttaaaaatgttttgtatgatagccaaaattcaaagtgttctttcagattgtgaggcagttttgagtgaaatcattttgttgttatatggcacatgtatcaatatgccttccagaactattacatatgaaaagtaagccaaatacattacttcttttcacgaagaattctcaagcatcttgtagaagaggaaatggtggtgtgtgcctcatggagcaggtgtacctattggaatgtatatctggaatattcaatgcggtgtaagctgtcagggctgtctggttattaatgaagtcaatgcatgtttcattatattcataaagccttgctgttaaaaaaaaatctaatgcctagaaatgttttgaaaataaaataattaccagctaaatcttcaaaacgtattccatacagtttgaattttaaaaaatttttaagtgttttattatttcatttcatttttgtagacacagggtctcactatgttgcccaagctgatctcaaactcctggcctcaagctaaaattttttaaatgcccctctcagatggaaatttttaacatgctatgtattaatttaatttggaatgatatcaataagtggaaaaatatattatattcatttcctgaatataattaggaagatcaattattaaaaaagatgacaattatccctaatacagagatataatacaataacgtttacagtccccaaagaaatgactatacaaattcaaaaactggcagagaaattcatgtctttgccctaaatgaaattaactttccctacctttccctcttttattcttgctctataatctcctcctatcatcaccaactactatagttttaactaccatctatatgtttataatttccaaatctgtatctctatctacctcagaactctccagcaagatccatacttctatcaagtatcgcctaatgaatatctacagctgaattcctcatagacacctcaaactcaacacatctaaatcatctttccacgttccccctaaacctgctctccacccagaactcacaatcttcacagttttccaagtcagaaatctggaagtcatcctacatcccttctacccctcattagatactctgtctttagccttcttctctctaatctctttcaaatcttaagtgttatcccagccaaacattttttaatgagtccccaccacctttatcccctatggcctacaaaggctttcaaactattaagcataaaatattaatgacctggaccttgagtagaagaggcaaaatcccccttaggagaagagggaaacagaaagtcaacttcattcagtgcaaagatatgaatgatgtttgcaaccacatcccactacttcatcttattttatattcctggagtactcaactggaaggcactgtgttaggtatgtggcatacattatgtcattattttacctagccgccaagaagagacaccgcatatccactaccaatctttattaatttcaaaactcctttcataccctattttagatcactgtcccaaccatgactaggctctcatgatctacatctgacactaattatctggttagtcttaaaatagaagaaaagaaaaagaaaacaacaataacagcaaaaggcagtgaagacactgatttgaatggatgacagaaagtacagatattctttatcaccatctgttctgagataatagacgtaaaggctttttataataatattgtcaataacttccatcactagtaactattcgccaaaattctctttaacagtacagttacaatacaaaataccgtttaacaaaattattacctggcaataagcatagtttccgagagctttatgagcttcatcaataactaaacactttatttcagcagcgggacaagctcctctagaaaggtcatttaccatgacctgaggtgtaagaaaaagcactctcttactgcaccatatttccttcctggtggaagcttgtgtagaccctgaaaataaaagtgacattctacattctaaacttcagactgttatctataaaatataaatagtctggctttttcagaatgcaaacatgctttggtaacattaagagaaaaacaatttgacaattcatcggaatgctacattttaaagttctggtgtggtccaaatatcaaagctggcacttatctaggactacaaccaaattgtctttagaaaattcctacaaaatggcatatttgaagagaggcaaattcttcaactgagaaatctttttcaggaagaatgccaggaaatatcatgttcagttacccatggggtatacgcacataatagcttcaaaatactatgacaagctgcagatattctctgaagattgaataaagcaaccctattcatcagttttgggcttgctgcaagtagagaatgttttaagagggagggcgtaagatgcacatgttgtagcttgggaactattccacatgggtcaggaattcccagctcttacttcaaaattagtccagtctaagatacctgtcatttcggccatgtgggattgcgggatacccatcacctggtagcaagcctcgatctgctgtgtcaccaagggtttcgttggggccatgaagaccacctttcctgaagggaaccagcggtagaaattgtacatgaccacggcggcaataaaggtctttcccagtccggtaggcagacacaccagcgtattgcaaaacagagcagcccgggaaatgtgcagctggtagtcccgcactgggcaattggtagggtaaatccacagggcgcccgcggaggtgcagaacccgccattctctagacacaactgccgctcagcctcgtacgccgcgacaagcaacacatcatcgtccgactccagctgagcctccgctgctgctggcaaaggcgccttggagctgccagggctctgaggtcgctcagttccggagctgcaacccggagtcccagatgatcgggagatacttgagccccacgtctgaaaaagcgttctttgccgtccgctcattaggccgacaaccaccgaaggcttctgtcagatatccgtagcagcagcagctcaaccgctacggttccgatccccatcggtttccttcgcacaaaactctggaacgagaaggcgggactaaggccagtttatccagttgaaaatgccgctactgagtttccgttgggaatgattggctggcttcccggaaaccttcacagccctgccggagactcatgcgcattattaaggcgttactctaaatatggtccccggtgcggttccggtgttttgttttaacaaactctaaatttaagttccgtttccaatgattagatggctgggcgtcattgctaacgtgataaatcacttaaaatgttataatagagatttattgtaaaatattacatacccggggacaatggaatagccaccagtttgggaacttaatgttattgagcgtctaacgtgcctcattccttgtacttttaaatcagaatataaagtgaaaagcaaaaatgtgtagatggaataatttgtcttatatctctatctgggctgagaaaacaaaatgccaagtctctttttcaccgcgctgggagtggcaacccattattttaatattttcattgtttaaagggaagtgaacgtggtctggtccagctattcgtcagaatttttttttttaatgctccttgcaaagcagagctaactcataggcaacatgcccagagtcagcctacatttttttaagtaaggagtcctgatgttcaactattaaatctttattataggtaagagcattataataaacgtcggtgtgcaattattccactctaacgaagatttctgtctcaaataattcctgacttctctctaaacctgactttgagtaacctctgtaaatttgtttcctcgtgtactgagaaaaaaatatacatcacagagttacgagcattaataatgtcattctcatcagcaagtggcatcctgagtgcggcttctttataaattgttttatttgttaaagtttctgaacttcgttttggacaaactttctcgtatttgtatggggggaaggggatgggcagtttgtatttaagtttcggttgtgtgatctttaaaagggaaatggtgggatatgggttttcggatcgacaaggactgaagcacttcaggtgtgactttttaggctagaactagataaaacgagataaggagcctgaatgctgttttcttttaacaggttatagactggactttaaaggcatagctgccttaaatgtgggtaatggttgataaatgtcgctaccatcagaggtcgcttcacaaggtgtctaattcagaatcgaagatctctagcggtcttctactcagtcgactgcagagacgaccgcggtaggtttttcaacccggactcaacaaagaagccctcatagcacagccttgacgtcactcaaagacaggccccaatcccgactgctagagcagaggcccgcccctcgacctccgtgagtggccccgccccgccctagggggcggggcgatgccgaactgcggcgggctggctcagtaaagcggaggcagcgggggaagatggcggcggccgttccacagcgggcgtggaccgtggagcagctgcgcagtgagcagctgcccaagaaggacattatcaagtttctgcaggaacacggttcagattcggtaccagaggcgtaggggcggccgggctg

SEQ ID NO: 2791 - DNA, 6000 bp, Homo sapiens
ttcggtatttacaagaattagtgacaagactgcaactgtagtgttatgtactgaacacagtgtttcatcctaaactttttcctgtcaacactcacaaaaaataacatttatacagcaagcacactgtggtgacttgagtcagctgctcactgcaggaggatacttgggtgcagcccttgagagcctccagccaggttggacatagctatcctgaggcatttgtaacccattcttagccgactaggaagagtcactgttacacaagcatgtaacatacatatgttgagattgctatgcttaacattatatatataattgctaagtatatgggctgtggagtcatattatctaggttaaaatcctagctgtgtgggccgggcgcggtggctcatgcctgtaatctcagcattttgggaggctgaggcaggcggatcacctgaggtcaggagtttgagaccagcctggccaacgtgacaaaaccccatctctactaaaaatacaaaatttagctggccatggtggcgcatgcctgtagtcccagctcgggaggctgaagcaggagaatggcgtgaacctgggaggtggaggttgcagtgagccgagatcgcaccactgcattccagcctaggtgacagagcaagactctgtctcaaaaaaaaaaaaaaaaaaaaaaaaatcctagctgtctgacactagacaggggactaagcttgtctaaagactcagcctccatatctgtagtggaagattaataacagcgtctacgtcaaagagttgatataaggataaaatgcaaaaatccatttaatgcatttagcatagagcctgtcacacagtaagaacttaataaatattgggattatgattaatactgtatttaataactcaaggtaacagcggaattgcttttctttcaaatataagactgctaagatggcagatggacactaaaatactactgctgaaatagcaagtcgtagtataactttatctgaaaatcacgtaattgtgaggatttccataacttctttgtttccttattttattctgcttctttttctgccttgtggtccttgcttaattcctaattttgttacattctcaaagttgtcctttggcatcttctaagcttttgataaagcagttaacattattagcagttaacagctaacactatcactattgtatttttttcttttgctttttctttcaaagatatgttctaaataacagctgatggggaaaggagacaaagttgactaaacggaagtaatcagttacctttagcatgctggtggtttcttgttaaagattccagaaaatacccaaagcataaaagcataaacatctctttgatatcttatgattaataaaataattattgtcaagtataggtctaagtgttaatgatcaccggagattattattattaatttttgagacagagtctagctctgtcgcccaggctggagtgcagtggcccaatctcggcccactgcaacctccccctcttgggttgaaacgattctcctgcctcagcctcccgaacagctgggattagaggcgcccaccaccaggcccagctaattttttttgtatttttagtagaaatgaggtttcgctacgttggccaggctggtcctcaatgcctggcctcaactgttagtcaggatggtctcgatctcctgacctcgtgatccgcccgctttggcctccgaaagtgctaggattacaggaatgagccaccacgaccgaccgagactatgcatttaaaagattaatgttataaaaacattttgataatccaagtctgttgaaattcttccacgtggcccagttttacatacgattccacatggcatgatttgtttcataagaatatgatggatgaagtacatgactgaggtattattaaatgttaatgatgtctattctattgtttcagatgaaatacgaattggcttaagagaaaatagttccattaaaatggggtaagatccccgacacatgttctttttcacccttgtacctccaaacactgagaatagttcttgttacagatgttgtattaatatctgctaaattaatctaagatgcggatgccaggataataattaaggaagaaggcactggaagttggagagttcttctatctccctgtcatgacgcccgcccaaaatgaaaataaaatataagcttctcaaaataacccagaaatagtggctcacgcctgtaatcccagcactttgggaggccgaggcgggcggatcacgaggtcaggagatcgagaccatcctgactaacacggtgaaatcccgtctctattaaaaatacaaaaaattaacctggcgtggtggcacgcgcctgtagtcctagctactcgagaggcagaggcaggagaatcgtttgaacccgggaggcggaggttgcagtgagccgagatcgcgccactgcactccagcctgggcaacagagagagactccgtctcaaacaaacaaacaaaaaaacccagaaacagtttttctaaatgaaaagtttagaattttaaaaattgtatagaaaacacaagcaggctgccgcttgtaagagaatgctgcgtgcacaactatttcagcaatttaacaggtgcatgaatgaacttattttccaaaggaaaaacaagtgtaacaaaaataacttgactatagacggatggttaagatggagactatgctgacaaatggagagcctacagtataaagcatttcaaataaatttcttagtctgtttataacaatgacagaccactgcacaagagaaatgtgcatgtagctcccttaaagtataaaggtgaaaaggtcatttaaagggtcgatatgttaaatcaaaacttaaaccacaacctacggattttttaaaaatcacacgcattaatgttcagtatttagtaaactgttgagaaaagcaagttggatacaccgttcccacagaaatcttcacatcccttcccatttccctagtagccggcgccccgctcccaggagtctcatccacaccactattcctcggcctctccgccctagcccccaatatcctcgggttcctatttttctggcctccacccccactcaaggatcccaatgaggttctaactctacaattgcagcctgtgtgccccaagaaataaagctgctcccctgccccagtagagaacgcccgagaggcgggagcgaggcaccaaagcacaagctgggcctctccggccttccaggccaccggccgcgggaagacgagggcgggggcacagaggaatacggaatgtatgggcatctccaggggggtgaggcgtccctcagccgcaccagcccggccgcccctacgcctctggtaccgaatctgaaccgtgttcctgcagaaacttgataatgtccttcttgggcagctgctcactgcgcagctgctccacggtccacgcccgctgtggaacggccgccgccatcttcccccgctgcctccgctttactgagccagcccgccgcagttcggcatcgccccgccccctagggcggggcggggccactcacggaggtcgaggggcgggcctctgctctagcagtcgggattggggcctgtctttgagtgacgtcaaggctgtgctatgagggcttctttgttgagtccgggttgaaaaacctaccgcggtcgtctctgcagtcgactgagtagaagaccgctagagatcttcgattctgaattagacaccttgtgaagcgacctctgatggtagcgacatttatcaaccattacccacatttaaggcagctatgcctttaaagtccagtctataacctgttaaaagaaaacagcattcaggctccttatctcgttttatctagttctagcctaaaaagtcacacctgaagtgcttcagtccttgtcgatccgaaaacccatatcccaccatttcccttttaaagatcacacaaccgaaacttaaatacaaactgcccatccccttccccccatacaaatacgagaaagtttgtccaaaacgaagttcagaaactttaacaaataaaacaatttataaagaagccgcactcaggatgccacttgctgatgagaatgacattattaatgctcgtaactctgtgatgtatatttttttctcagtacacgaggaaacaaatttacagaggttactcaaagtcaggtttagagagaagtcaggaattatttgagacagaaatcttcgttagagtggaataattgcacaccgacgtttattataatgctcttacctataataaagatttaatagttgaacatcaggactccttacttaaaaaaatgtaggctgactctgggcatgttgcctatgagttagctctgctttgcaaggagcattaaaaaaaaaaattctgacgaatagctggaccagaccacgttcacttccctttaaacaatgaaaatattaaaataatgggttgccactcccagcgcggtgaaaaagagacttggcattttgttttctcagcccagatagagatataagacaaattattccatctacacatttttgcttttcactttatattctgatttaaaagtacaaggaatgaggcacgttagacgctcaataacattaagttcccaaactggtggctattccattgtccccgggtatgtaatattttacaataaatctctattataacattttaagtgatttatcacgttagcaatgacgcccagccatctaatcattggaaacggaacttaaatttagagtttgttaaaacaaaacaccggaaccgcaccggggaccatatttagagtaacgccttaataatgcgcatgagtctccggcagggctgtgaaggtttccgggaagccagccaatcattcccaacggaaactcagtagcggcattttcaactggataaactggccttagtcccgccttctcgttccagagttttgtgcgaaggaaaccgatggggatcggaaccgtagcggttgagctgctgctgctacggatatctgacagaagccttcggtggttgtcggcctaatgagcggacggcaaagaacgctttttcagacgtggggctcaagtatctcccgatcatctgggactccgggttgcagctccggaactgagcgacctcagagccctggcagctccaaggcgcctttgccagcagcagcggaggctcagctggagtcggacgatgatgtgttgcttgtcgcggcgtacgaggctgagcggcagttgtgtctagagaatggcgggttctgcacctccgcgggcgccctgtggatttaccctaccaattgcccagtgcgggactaccagctgcacatttcccgggctgctctgttttgcaatacgctggtgtgtctgcctaccggactgggaaagacctttattgccgccgtggtcatgtacaatttctaccgctggttcccttcaggaaaggtggtcttcatggccccaacgaaacccttggtgacacagcagatcgaggcttgctaccaggtgatgggtatcccgcaatcccacatggccgaaatgacaggtatcttagactggactaattttgaagtaagagctgggaattcctgacccatgtggaatagttcccaagctacaacatgtgcatcttacgccctccctcttaaaacattctctacttgcagcaagcccaaaactgatgaatagggttgctttattcaatcttcagagaatatctgcagcttgtcatagtattttgaagctattatgtgcgtataccccatgggtaactgaacatgatatttcctggcattcttcctgaaaaagatttctcagttgaagaatttgcctctcttcaaatatgccattttgtaggaattttctaaagacaatttggttgtagtcctagataagtgccagctttgatatttggaccacaccagaactttaaaatgtagcattccgatgaattgtcaaattgtttttctcttaatgttaccaa

SEQ ID NO: 2792 - DNA, 6000 bp, Homo sapiens
gtcgctggcccgccgcttgccgcgccacaacccctgcccgcccggcggcctcgcctccagccccgactgctccacgcacgaacggaacgcggcgagggtcgagattggtgggaaggcggagccagtgcgtctgcaacgtcccgcggctctcgctcgggaagtcgagccaggggcggcgcggctgtggagggacgttctggctcctcgcagtgggcaaggggcctgggctttccacgcgcagattccttctctcttggaattgtgttttggcagtacagcctcatttagtagtcagtctgtagtcagattccttgattatctcaaaatgtcttttctatagttggtttgttcagcaccgtaattcgttgttaacgcctcttaagactttacgtctgttttactctagaatagcttctctcccttctctcttgtgccatttgtttgttatatggattagttttcttattttcctacagccgtaccaccttctgggtttggttcctcagtgtcttttctcattaacttgtgcatcctttccccatacttcttttaggctggaagctgtatctaaaagctttattagattctagttcagatttttttttggaaaatacttcatattgcatcacattagaaggcacttaagtctggtgcactttaatgatactttctattgtttatttttgactatacaaataaacagagtatctgctccttttcttacacaaaaggaagtatatacagtgttccttaactttctcttttcacttgacgatccatatcaggatacagcaagcagtctcctcagtccttttcatagcttcatagcactccaccgattggatgtgtcatagcttattcaaacagattcttattgatggacatatcggttatttccaggtttttttggctatcataaataatgctgcgatgaaacgttatgcatatgttattttgtatttgtacaagcctatctttggagtagagttctagatgtggaattgctgggtcagaggataaatgcatatttaactttacaaatgtaactggattgcagtggctcacgcctctcatctaagcactttgggaggatgaggtaggcggatcacttgagctcaggagtttgagaccagcctggccaacctgggcaatcccgtctctactaaaaatacaaaaattagccgggcgtggtggcgcatgcctgtaatcccagctacaaaggcaagagaatcgctttaacccgggaggtggaggttgcagtgaaccgagatcgcgccactgcactccggtctgggcgacagagcaaggttccttagaaagaaagagagaaagagagagagagggaaagggagagagaaagaaagaaaaaggaggaagggagggaaggaagaagggagggagggaggaagggaggaaggaaggaagaaattcaagatagacaaaagtgatctatgataatagaaagcagaaaagtggtcatttgggagtagggagggggaggggactgatggaaaggagtacaggaagtgttctggagtgattaaaatgttctgtatcttgattgaggtggtggttacatgggtgtatacatttatcaaaatgcattgaactgcatacagatatgtgcattttacttagtgtaaactatatgtcaatcataattctcactccatcactttattgttactagtaatattggtattgtatttttgaaatggagcatttgtcctcctggactgtagagtctggtggagtctatagaccagcaaacagacaattaccataccgtgcagtaagtgtgaaaatagcaaaagtccagggcaccttgggtgtacagaggccctttaactcagattgagggaagacagggaaggttcctgagagaaagtaaagtctaagttaagaactgaatgatgaacggaagttgttcaaggaactttcattcgtgagagggaagagtcaaggatatgcctagtttaccagcttggtcactgggtgggaggtgggtggagcccttcgctaggttattgaacatgggaggaggaacaggtttgggggagggcagggctaatggtgagttcatttggaggcatattgagttggatttgaagtctaagagagctaagggctagagatagggattttggagtcatcagcatataattgttcatttaagtattgggactttatgagctggccaggtgaaggagccatagaagaagttgaaaatttattagagaaagagaattatgattgggaacatttatgggaaaaggggaattgtgaggtcagattgtgagagaaagctgggcaactggaattgattattttctctccaatttcttaatataaaaagtagcaaaccaaaaaaagttgaaaaaatagttcaaagagtacctgtgtatcttccactccaggttaataattattaatactaccatactagctttatgtttgttggtatgtgtgtgtctgtctttttcattttgttgaattatttgagagtgggagtgccttatggagaaaatacatgtgataaataagcttccttcagctatgagttatagggctcttggccctgagttcagtgttaacgaatcacaatgtaaagatgtctttacataaaaacacacataaaacaaggttataggccgggcgcggtggctcacgcctgtaatcccagcactttgggaggccgagacggggggatcacgaggtcaggagatcgagaccatcctggctaacacggtgaaaccccgtctctactaaaaatacaaaaattagccgggcatggtggcgcgcgcctgtagtcccagctacacgggaggctgaggcaggagaatggcgtgaacccgggaggcggagcttgcagtgagtcgagatcgcgccactgcactccagcctgggcgacagagcgaaactccgtctcaaaaaaaaaaaaaaaaaaaaaacaaaacaaggttatatgttgatcagttgatgaaaacattgtcaccagaggctcacaggaacctaattctgtacttcccctagtaggaatggtttagtattcaataattatttgttggtggctacttataaaatctaactatcacaggtacagtaatgagaattaactatatgtctttctattcgtatttcctatcctttcttacataaaaattaaaaatttctttgtactttttgtctttgaaaaatatttcactaaataaagagaactgtgttcaaaaatcacttgtgatgttatgttaccaatttaatatacaattaggtgtattagttttagtatgcattcaattttaagctcacctttttattttctattttttgaatatgtaaaacatgcacatggattaaaagtctcactgtaaagaaagttttcactttcatccctatcccctcacccctttgtagttaaccatttttgtggtctctgatttaaccttccagagttgttttgttgttgttgttgctgttgttttgagacagagtctcactcttgttgcctaggctggagtgtaatggccccatctcggctcaccgcaacctctgtctcccgggttcagacaattctcctgcctcagcctcccgagtagctgggattacaggcatgcgccaccatgcctggctaatttttttgtatttttgtagagacggggtttctccatgttggtcaggctggtctcgaactcctgacctcagatgatccgcccacctcggcctcccaaagtgctgggattacaggcgtgaaccactgcgcccggctttttttgtttttgagacagagccttgctttgttgcccaggctggagtggtggcacgatctcggctcactgcaccctccgcctccgaggctcaagagattctcctgcctcaacctccccaggagctgggattacaggcgcgcgccaccacgcctggctaattttttttttttttttttttttttggtagagacggggtttcaccatgttggcccggctgttctcgaactcttggcctcaagtgatctgccagcatcggcctcccaaagttctgggattacagatgtgagccaccgcgcccgggcccagaggtttttaaaatgcaaaaacaaatacatatacttttgtttcccttccttcattaaacttcgcttttttttaaaaaagaaaaaaacccgtatacgttggaggtcactttatattggtactgtgaaatcatcctcctgttttataagccgcgtgtttacttataagcactccacgggttagtcaactcattggagcaagcgttttgaagtgtggcagattgacagtccacctgaaatcagaataactgagttcaaatcctgactacaccatttaactcgtcgtttcatcttgagcaagtcctttaccatttttgtgtctcagttttctcatctgtaaaatgaggctgttgtggaaaagacagtagacagctcactgggctgtcatgagcaacacatgaattcacacatttaaagtgcttatgacagtgcatggcgcatacgaagccctcaagttaaataaaaatcggggtaggtgggagcgatggagatttataacagcttccggtaaatgtcgaggcacagtatttccagagcttgtgcgaagtagggaacccaacagctctcatggcctcgaaagaagggggatcctgtgtccgggaagctcggccgcagtcctgcaatgtctagggcagcggtgagagcgctgtggctggctcaacgcagcccgacaccagggaagacgctctggccctcagtttcccggcagcaaaggagcgcgaggtggtctccactttcagcctactcggtccggggttgcgaactgtaaggtctgagttgctgcggcgcaggcagcggagaccaagcagggatcttaacagggtttagcgccacgcgggccagggccgaggccggagctgggaggggcgcgcccgggaaggggcggagctgcggcggtggcgccaaatcgcaaatatggcgccggagcggctgcggagccgggcgctctccgccttcaagttgcggggcttgctgctccgtgggtgagtgggctcgggcagcttgaagggcgagagggaagagctggggcccgtctgcctggtgcggcagcgggacgcaccgcggcggctccccgcgcgccgagagggggcttgaccttaaatttcagagttctaagaagcggtcgggcgcggtggctcacgcttgtaatcccagcactttgggaggtcgaggcgggcggatcacgaggtcaggagatcgagaccatcctggccaacatggtgaagccccgtctctactaaaaatacaaaaattagctgggcgtggtggcgcgcgcttgtagtcccagttagttgggaggctgaggcaggagaatcgcttgaacccgggaggaggaggttgcggtgagccgatatcgtgccactctactccatcctggcgacagagagagactccattaaaaaaaagttctaagaagcgaggtggatcttgaggctgccgtgccttctttggtttccccgacccatgcgaggagtttaatgtttcttctaggcgggccgaggctcttctgcacatgtcaaactgagcccgagaagctgcaacctatctatggcagccggttatcaacattgtgacctggacagctctcaggctcccgggaaggttgctgagacataagatgagagacccgagaaagcccacttgcacgtctgcagttgccaatttatgtgaaagtcaggtttcctgggcatatccgtgtttttgaggacctatagaacatatgaaccttcccaagatttctctcattaaatctgctccgtgttttagagttctatatgtacgtgtgtgtgtgtgtgtgtgtgtgtgtgtgtgtgtgtggtgtgtgtgtatatatatatatgtatttttttttttttgagtcatggtctcactctcgcccaagctggagggcagtgatgcgaacttgacttactgcagcctcaacctcctgg

SEQ ID NO: 2793 - DNA, 6000 bp, Homo sapiens
taatcttagttgctcagactgtaaagtgagtaaaagatgtagatattctacttttccacataaatcccaactatagaaagataagtctatcttgtcaagacattttaaagaatggctcagtatctgtttgtgagaaaaaactgaatccccaaaatgttttattgagaactgcaatacctaactaccatagaaatgttgcttactggattaaacttaactatctggttaaacttagactgtctgttcaactcacccagacagtctaagatttgatcttacttattttaactgaaaatgctattcttattcctattaaatgtcccatttaaaaactcagctattagttcataataattttctatggcagtgctcctctagattacacaattaaaagtatttctacttttctcctcccccaacatacataactcattctttctgctcaaatttgttgcctttaaaatgtgacctgtttggaaattttccaaatgagagaaaaggggttagatccacattaaattattatcaaactaagcactttggctttccctgtggttttcatatttttgccctatgttagatagtaacttaactctttccataacttggaacaatgatgaactgaatagtatgctgcaggaatgtcttgttttagtaccattttgcctaaagaaatgcaaatgtacagaatgaaatttagaacaatttttccattaattccttcaataagctgacatagaccatagttgtggtaacaagagagttgtgcataaattgatttttttgggggggtggtaaaaccatcttataggaagcagacctttaaagccaacaattactactttggttttgtaaaaatctggattttcagatttgtctacaagaaggcaaacgtgcattaagatctacccttcctgaattcaagggattatgcaaactccactgccaaattctaaccatttctatttctttaaagagaaaatgacatagaggatccaggcttgcttaaagtcagtgaagaactaatatatcagcctcagttttcctgaatttcatttaagtgctttctctggaagattgctgttagtaaagccacaaacatataaaataaggcttactattatcttcacaaataaacccacacatttagggggttagtatatatgctgagcgatagaaatccaatggcatattcctctgattttcttttaggtctgttagtcttcattataggaggaaacaggattcaaacataattgatccggtctttttagcttgttcttctaaaacattttttggtcaaataaataatgcttaggtaaagtgtatgcattcttaccaactgctagactaattttgtgttcttagcaattttattaatttttaatattaaaatgccaagcagtgagttattttgtaagcactgattgacttatcatatttctgtaattgtagaactggcaggacttgctatgaactgtatttttccattcagttgttagtaaaataaaagcccatcctcatgatgcaagggaataaagcaacctggatatgacatgggtattgtgaaagaggagaatcacatcaaggctactctacagcttcggcagctaataaggtacctgaacagaaacatcaatctatagctatcaccaaatgcgtcacttacagcagctgatgaacacatttgctggtgcattaaggtaccaaatgagattgttaccttgtgaagctgccactgacacagggggcagctgcagtggagagaatccaatgctcccattaaggaactggctgtttgctccggaattggggatctggacaatgccatactggttaatttgcactggtgtagtaaaagtcactacagaccctccatcttgggaagccactgtttgaatgccttctcttttcacctcagtgctgggtatcaggcctgggaatgagacagggacactggggctgtaggacgtggtggttgctgagttagcagaactctggaggactttgaattccttcacgtcctgggaagtagaccccagtatgtcagtcatggatataccattgctcacaatgtttgatgacatttttggtgggttcaatgccactgcctgtgtatttcccacatttaatccattaaggataactccactgggtccctgaataaaagaatttccattaaggaagacaggtgaagtacttgcaggtaccaagcttccattcaacagaactccagaagagcttaatgatatcttagcatttccaatttgttgcatatatactggctccatatgactggaaaggctgaggttggtgatgccatcagatgaactggagagtgggtgaggagataaatcctcatgtcccttgctggattcatcttcagtgctggggttgccatctgactcactgtatggagggggaaatcaaaatgttcagaaggtcagggggatgacattctacacagtgccacttgtttggaaaaccagcttctaaatccattaaaggcagtatttaaggaaagcacagcaggatatctgctagtcctatttaaactaagaggcctttcagcagattccgaccagccagagaatctgggaagataaactctcagatcccaatcatttaaaataacaataaattcagggaaagtccagacatctgcaagatgtaaattcagcattacaggagaagaacatatttgattttacagtgtagaagtgctattccttactgttacatatgctgctactgacaccatagaaaaaaacaccttaaatgaggtggtcggtctttcctgtttaggaactccttcccctcccctcaaaccaattcagattagtgttatcttggaggtaaatgaagctgccaaaggagcaggaggtaggaagtgctcagcttttcttttttggtcagttagttaacaagagatcgttttctcacctgctcccaaacttctactccaccagactgacaactctctcattcaacaaagtggctgtccttgttgtaggaaaaggcactttcaacccaagaacagttatgtgcagtcgcctttgaatccaaaggaagccaaaggggcctatttaacaaacaccatccagtgccctggtgaggtgggagggaaagggtgtcactcagaggccttctaactattagacctcttccccaacgtccttggtccctctgttccaggcaggaccctgttcctcagctctctgacttgggagaaataccaaatcggggttggggggtgggtagtgatggggtttcccatttggtctgaggctgggagggagagcaaacgagagcagaacagaggcgttttggaagcgcagcaggacttggcccagcagaggatccgacatccccgcagtgccccgcggtcggttcgctttcatgccgaggggaggggattacccgggctttgggctgcggggccaggagcgcagaaagcgctttgatttacaagctgaggctgagccgccgtcgccgtctgcgagggtgactcaccgggggtgcgggtgggaggtagatccggagaggggcctaaaccaggcaactgggccggcggcggggtgggtgtggagtttatggggtggggcgggggggacgaagaagccagcagtggagcgtgggggagtcccagggagcgtgcccggctcgcgagcggaggcggcggagcagctggcctgctcgcggtgcccccttgccaccctctgccccggccctgcggattccgttggtttccgagcgcgggatccgcggcctctagtgggcgcagggcaggtggctcggcgtaaccaaagcgccttctctggacctctccgcatatctgcggaaggcgcacgcacatcccggtgcaccttttgttttggttaccgcgagggccggatagggcaccaagcctccctcccagccttgggcgaggaacgccggagcccgagccgtcggacccccacaggggcccagaagcggcaagggcgggctgagaccggctctggaatgcgctggtgatcaccttcacctggcgcaggcgggctggatccccggctcccagtttgcttccccgagaagaaccttcgagctgcttttggattctttctctcctatccccgcggggctggagacaccaggtctttaggcgaccttctccttactttgtttcgtccaacaaaacacacagacgcacacaccaagtgtctgactcgggaggacgcacaaaagaggtggaaaatccggtattttttttaccagagggggaaagcagtctgccaggcaaaaagctcaaacccagtggggtgggagcgcccccactcctttgctgccgcccgccgtaagccggcctgccccccacccataactaccgtaccaggagggagccaagcagcgttcgggggccgagggaggaagcagcccttcagccctgctaccccggctgcgctgaaacccgatcctaaggagttcagaatcaggtttcaaaacatgacagagccgagctgcaccagcaccccacgttgccgcggccgctaagggaaccataggggcagggtgaatgattaactctgtcatatgaaacctcgacgttccgagaccccttctgcgccgccagtcccacaacactctcttcccttcaccagagcagccaccgcgacctccagcgcaggcccggggggcggctgaaccctggggatccgggagcgtgcgcgcgcgccaggcccggtgtgacctcgcggaggtgcagaccccggccggcgccggcagtctctgcgggcctcgggcggcagggagagctacggtgccggtgtccacatttgcttcgttagcccctccagaaacggggagagggtggcaacttcaaagccagcgggatgggggtgggaagctgggcagcagtgaccagccgaggtgggggcggggactgagacctaggcgggcgaccagaaacttctggggggagagggggagggtaaggagggaggttcccccgccccccgcctccgccgccccctacctctgccggccggggagcgaggtagggggcggggagaggtgggcagccggaccaggctggtggggaaggtaagcgccatgtttgcgagcacttggaggaaaagaaagccgggaagggggtgggggagaggaagggggaggaggaggaaagttggcgctcaccttttggactgggtctcggaggggttcctgtcgcgctgccggcggttcttgaaccagttgctgacctgggtgagggagaggccggtgatcttggccaggtgccgcttctcggcgggcgaagggtagcgattctgcttgtagagctccttgagcgcgttgcgcgacttctccttgaaacaatacaccgtctcctcgccgtcccagatggtgcggggcagggggaatttcctgcgcagccggtacttgtctacggctcccagcggccggccgcgggctcgctcggcctcggtgtagcgcgccttgtaccagagctgctgcagcagcgggtggttggccgactcgaagctgtggctctcgaggatgctgtagagctcggggtagatgccctggtggaaggccacgagcgcccgcgccttcagcaggctctcgttgccacgtagcaggtcgctctggggcagggaccacaggaaccgggccaggcggtccaggttgcccccctgctgcagtgcctcgcacacgcaggcgacgtggtcgggcgagaaggccagcggggtctgcgcggcggcggcggcggcgtggtggtgcctgcccagaagttccgagtggagttgtacctgatccgccgccgctccggccgccgccgccgccactgccccttcctctccgctcaccctggcggcagcggtcgcggcgtcccccggctccaggggaaaaggggctggagccggggggctcagccctaccgccgcgccccccgccacttctcggtgcgcctcctgcccttccgaggcgctttccatcccattctcttgcttgatgtccgcc

SEQ ID NO: 2794 - DNA, 6000 bp, Homo sapiens
tgaactggcctagggaagaattgttcaaattggcagtaagggaaaagcagcagagcctctttgatgaaaatgtaaaatgtgagcttggagctactgggagccatgtttctaaggttttggagaaagctcctttgaaaactaacctgatgagaaagacagaggcaagtgaaatgggatagcaggtcttcaagtccagccagctgcactcctgctcttcacattgtttgatattgtgatccaataaattcaactttttgcctaggccagttcaatcggagtttctggttcctgaggaagttcacagccaataaaggtgtcatgccaacccctgtgccagggggcaggcattgtgattaacagacctagtagaaccacatacatgtggggtgagggactaaggactatttcccaaaagaagtggagtagagatgctgtccttagtaaagggagaaaacagtaagtatcctcttccgatgaggaaagcccaacctgggtccatagccttggggctggaaaagaaggtctgcatttgagaaacactgtcccattcccatagaatctactgttaactgaggtaggaatgctagaggatgagcagacttgggaagagaaataagggcctcaatttttccacttttgggattcagctgtcttcagaaatgtatagaccaatggaacagaacagaggcctcagaaataacaccacacatctacaaccatctgatctttgacaaacctgacaaaaacaagaaatcgggaaaggattccctatttaataaatgctactgggaaaactggctagccatatgtagaaagctgaaacttgatcccttccttacaccttatacaaaaattaattcaagatggattaaagacttaaatgttagacctaaaattataaaaatcctagaagaaaacctaggcaatatcattcaggacataggcatgggcaaggacttcatgactaaaacaccaaaagcaatggcaacaaaagctaaaatagacaaatgggatctaatgaaactaaagagcttctgcacagcaaaagaaactaccatcagaatgaacaggcaacctacagactgggagaaaatttttggaatctactcatctgacaaagggctaatatccagaatctacaaagaacttaaacaaatttacaagaaaaaagtcaaacaaccccatcaaaaagtggacaaaggatatgaacagacacttttccaaagaagagatttatgcagccaacagacacatgaaacaatgctcatcatcactggtcatcagagaaatgcaaatcaaaaccacaatgagataccacctcacaccagttagaatggtgatcattaaaaagtcaggaaacaacaggtgctggagaggatatggagaaataggaatgcttttacactgttcgtgggagtgtaaatagttcagccattgtggaagacagtggggcgattcctcaaagatctagaactagaaataccatttgacccagccatcccattactgggcatatacccaaaggattataaatcatgctactataaagacacatgcacatgtatgtttattgcagcactattcacaatagcaaagacttggaaccaacccaaatgtccatcagtgatagactggattaagaaaatgtggcacatatacaccatggaatactacgcagccatgaaaaaggatgagttcatgttctttgtagcgacatggatgaaactggaaaccatcattctgagcaaactatcacaaggacagaaaaccaaacaccgcatgttctcactcataggtaggagttgaacactgagaacacttggacatagggcagggaacattacacaccggggcctgacgtggggtggggagatgggggagggatagcattaggagaaatacctaatgtaaatgacgagttaatgggtgcagcaaaccaacacaacacatgtatacatatgtaacaaacctgcatgttgtgcacatgtaccctataacttaaagtataataataaaaaacctaaaaaaaataaagtagtaaaacaaaaacaatacataggaagcgtaagtttcatatgtatagcatatagaaaaatgcataattttgaagttcagaaaatgaaaaaaatttgttcttagtcaacaaaaattcataaagaaaaagaatttgtaaacatatgaaggttcaccttggatgaacacgttggaaggaacttaagcatgattgaatttttgtgttgagacgaatgtgtttttaacctttcaaaattatatgttatggttgataaattattttctcctaaaaaaaaaaagaaatgtaggaaacttgagtttggtggttttctacataggctgaggttccatttgaattaggaacctggtgccgtcagtgctttcctcctcaaagctctctgaccattccatgttattcatccccaccagtgataatgatgtacatttcagagcttctgtaatgtatgaggcattgtattagggcctttatgtatgtctatgtcatgtaatttaatcattacagcaattttatgaagtgtattatatgcaagaaggaaacaggaacgggaggattggaaatttgcttcaaacacaggtctgactgatgtaaaagaaggttgggctcttattattatattgtcccgcctcttttagataatactactgccagtatcctaatgctaccattaataatggccagcagttactaagctcttactctatgctaggtgttttaaatgaagtatcttttattctttacaagtactatcctgaacttagaattgggaaaactgaggctcaaggtcatataaatcatgtgatgaagccagcacttgaattcagctctcttggtactagagaccaaatctataagtgctattttctactgtctttaggtccataagtaaagcttatctgacagatttccaagtcagctgttgctaccatgcttccaagttagtagtttcccacctaggaaaaggataaagcttgtagcattgctgcttctcacaatctttagtgctttctttgccttaatcttaagttttgggagaaaggaaaagcaattcacttcgcaacgtggttggggtctcatcttcaaagacgtaattaaaactgtcctggatagctgggcatcattacaggctcatgcctgtaatcccagcactttgggagcctgaggtaggaggactgcttgagcccaggaattcaagaccagcctgggcaacatagtgagatcccatttcttaaaaaaataaaataaaaaattagctgggactggtggctagtgcctgaggtcccagctacttagaaggctgaggtgggaggatgacttgagcccaggagttcaaggctgcaatgaattgtgatcgggccactgcactctagcctgggcaacagaaggagatcctgtttcaaaacaaacaaacaaacacacaaaaattgtcctagtggcaataaactataatgccatctgagtggatgacctcaatgtagtattggctaaaaattttatttgcacatatgacatattcattctttcaccagaagtttcttgtatgttatcagctgagcttacatgactatgcagttataaagaagtataaagcacaggctattaaatggtccaaaatataaagtactagagttgcctttgttcttgaagagcttcactctgaatcatgtaactggtctggatgtggtctttcaataagacaatagcagcagcataataagcctccgggtcagcatagtagcatagtatttggtgttacctattttagtaagtttatgtttggttaactcctgttgaggaacaatattatgatcaaagagatgatatggtttatttattagatgaatccttgatgtcttcatactaatgtaaagctctgtcacagcctgctttgatctgctggttcctgggtgtggtatccagctgtttgtcagcatccctctctatacccatggaaatcccaactgtatttttgggttttgggttccctaccaggttcactgtttaaaaatgtgaattgaatattactttttattgaaaagaacacaagttctatgatgagttaaaattactataaatgtttatagcttatactcattgtatcagattatttgaaaaatctagtttgcatgttcccttctgatggagtttgggtcagatgaaggtggttacaaaaaatgtttgacactaaaaattttcacattacactattgtttgatagtcattcattaattcttcacttagtctacttactcattaagaatcaacaaatctttattttggagatgaataagatgtgtcctttacagtgggaaagcttattatttaatagagctgtttacagacttcaatttgccttcttgataaatgtgatgaacatggtttacaatttacaaagatattcaggctatcagatcttggaattgcagaactaaatttttctgtatgtattcttatatgattttttcctaggtatttggggaaataaatactgtctgatggagtagatagctttttcatattttgtatctgcgaatgcatattatcagctgagctgacatgactatgcaattataaagaagtataaagcacaggctattaaatggtccaaaagaaagtaagtacaccgctcataaatctttgaaatcatgggaatgtttccagacagaacaagatggaatttatcttcctaattgtgacacagtaccttgaaaaatgcaactgggtgcgtggagataaggctttgtataatttgccattttaaaagttcccctgtcaaattcaaggtattaagttgctttatggaaggctaagaccaagccctagatgcaagaccgggggaactgactgccggaacgtttgtgttgcagcgcctcgccccttgccggtgctctttcgcgaagggaccgtctctgccaagcgcctgttggtaggaacctgcttggtcgcgtctgagggggcttgtaggtggctctggctgaaacaggcgcctgcgagagtctgtaggagggaaaccgccatggacgatcagggttgccctcggtgtaagaccaccaaatatcggaacccctccttgaagctgatggtgaatgtgtgcggacacactctgtgagttgggcggcagtggattccctgggggagagacgcgctgggtgggaggagaggaccgggagatgctaggcctcgtcttgggagcaaagggcgttgttagtttcaacactggggaggaaaatgggaaaagaaggcgttgtgactttaaatagactgtagccgctagccccgagcggctctggcctgctttgaactgcgggttctcagtgtggcatccagcagtttgtcaggttcccccttccatagccaatgagtatcccgactgtatttccaggctttgtgttgtttactgggctctggacatcgctgattaaaagcgtgggggattggagtgtttatttcatatgaaatgtttttattgaaaaagtgcgaaagtgctatgaaaacttaaaatttgcttgagtatatactgctgctatttattgtatgagttaattaaaaaaccctgtgtgtatgcccacttgtcctgatggagttcggttagactcccatcactaaaatgaagaaaacccggactgtaggtagttaattttgaagatataataatggctggcatttgagtgcacattttgtgccagacagtgttctaagcgccttaccatgaattatctcagttcattcctacaacagtcccatgaagtagatactggtatttccatttcacagggaaggaaatcgagactgctcaaggtcccttattaagtgggccttgagagaattggaacccaggaagtctgactttagaacgcccattttcaggggaagggggcagaaggagggaggttgagtttgtgtattttgaaacagggattggtcaaagtgtttcttgccagatttcttgtcagatgtggtttagtgaa

SEQ ID NO: 2795 - DNA, 6000 bp, Homo sapiens
taaaggagaaaaagaaaaggaagggatcacttaagtttctccatcgtatatgtgctaatacaatatgtaaacagtatagcataacagtcaaaggaaggaaaacccaaggaaagacttaaaacggtacatttgactcctacatcaccagtggttactagcatcaccaggaggaacttcattgaaaatcaaggatggagaactgtggttgccagggaacaaggaggggttgttgtataaatacaaagaggtagcaccaaggagtgagggaattcttttgtggtaatggaacagttctgatccttattacagtgggattacatgaatctatatatggataaaactgcataaaactacaaatgaaaaaatgaaggcagattaagaaaatgctgaaaaccaaataaactctgtagtgtcatttaaagtaatgtgccaatgtcaatttcatggttttgatattgtactacagctgtatgagacgtcgcaattggggcagactgggaaaaggatacgctggactccattatttttgcagcttcttgtgagactgcaattatttcgaaataaaaagttttaagtaaagcgacaacaatattttcaatctcataagcaagaagagagcagggtttgcttttttggaggcaaagaaaatagttttcaatgcagttccaccatctatattaacgaggataaacaagaaatggcagtttcaggcacactttggcagccaggcttacattcagttgcagatgataatcaaaagccaatattgactaagtaatggatgtatactatagaggtaaaatttcagagcacgtgaaatacactgtgcctctgcttattcttcagagggtagttgagtgggggcacattgaccaatgcccaaatattgaaccacatgtctctcaccctgggaccgtctggtaggaaaagagatcccttacctcagcagatttggacacaccaccaatgcctgaagtatgtcttctaccctctttgggatatccccttgtccctcctgtagctgaggtacacatgcctgtgccagctcccattctcccctccgcaggcattcgcagaaaaatccaaaaagctgcttctgcgaagcagcttcctcttttccaaatggatgattcattttcccagcacagagtgcagggagatacaaagaaatgagttatgccgaacacattctcaatgttctcattcgcggagtacctcctagaaacaacacaacgccagtgagaagaaacagaaggcactgtattaagacaaagcagcaactactggtccgcctgggaaaggcgggacttgcttgcctaagtatcgttttcagtttaatttcccacgttactttttgaaaacactttcttcaaggggtggatcccatctcttcacgcggattcctatatttaataatattaatagtcatatttgctccgggcgcagacccataactctacgtccgtattccctactgaacgttatgcccagtcttgactccaaatccccaggtggtcgcctcctcaagaatgagaaattcagcaggaacctccctagtttgagccctctgttaaggcagaggattgacgaccaggagacgaatctgtgtcataagtggaaagcagtgtgggggtgggccgcagggacgctctctgcgggggtcgtggagaggggcccctccctctcaggggtgtcttacactcacctgctcccggcgcccaaagcaatagagctctcagcgcagccatgtttgagccgagtcaggtgacagaacccactccgaacagcggtggtgggggtggtgacaaagactgaaagccccactcctattggctcaaggcagggaagatgaaaattaagtgccatatttgtttgagtcacgtgacgccacctctccgggagtagggaaagctagaaagctcggaaagaggaaatcagctacctggctgcggaccatctccctcaattgtgacagctccggcgctcaatactttcagttctgcattcggccgagcaggtggcaggaagaactgtgaccctggatttttttttttcttccactctcttatctccttaacatgtgaagtcaacatttattgaacgccaaccagtgatggtgttttgccaggcgcgggggatacccggagctaggagaactgggttctcctccattattattctatctactgggctcttttgttccggaactctgcggtctgaatttccatattcttctgcttcactccattcatttatttgcacatttaccctacaactgttaattgaacggtgtgctaggctttattttatttttttagagacagagtctctctgtcgctggagtgcggtggtgtgatctcggctcatggcagcctcgaacttcctggatcaagtaatccttaagcctcagccttcctgtagtagctgggactagaggcgcgcgccactacaccgggcttaggccctattctctaagttgagtaaatggaggtccttcttctcaagggagatgcaggccaaaaattaggagacggtgggctaaattataagacagaagtatgcataagagatcagagagcaaagaatgagcaaaggctttttcgcaaacacaataatctgaaaccaagtcttttgttttgagacagagtctcgctctgtctcccaggctggagtgcaatggcgcgatctcggctcgctgcaacctccgtctcccgggtttaagcgattctcctgcctcagcctcactgtgtagctgggataagcgattcttctgcctcagcctcactgagtagctgggatttacaggcgcgcgccaccacacccggctaatttttgtatttttaatagagacaggggttcaccatgttggccaggctggtctcgaactcctgacctcaggcaatccgcccacctcggcctcccaaagttctgggattacgggcgtgagccaccgttcccagcctgaaaccaactcttgaagtaacggcttactaggtttgctcaccacagctgccttacaccaagccttttgtttggtttccctggtgtgctttaatcacagactctcagctttcctcactatgtgtgtttcaggtttagtaatttcattcagcatttcccaaactatttaatcaccaaagggtggtgaaaagagcaagttaaaacaaacaaaacgttttcttccaaaaactcttctgtgattggtggattgtcctcgattcctgagaaaagtaacatggctttctggcccattaaggttttttttttttttgaggcaatgtctggctcctctcacctcagcctcccaagtagctgggatcacaggtgcctgccaccatgtctggctaatttttgtatgtttagtagaggcggggtttcgccatgttggccaggctggtttcgaaatcctgagctcaagtgatctgcctgcctcagcattccgaagtgaaaccgcctttgcaaaattataactgaggaaattatgacagtgaaagaaatcagacctaaccgactctatcttgcttctaaccgttaagctgtccttgttcattcctgggcgtaggctgaactaactttggggaggaattcagttcatggtttgactctgaaacaaaattgataacagccctttccgaaaagacccacttcttgcctggggaccagtctgcctttgcaggactaacaaattagctacaagtttagaaattacagtttagaggtcatgcagcctctggctccaagagtctgaacctccccaaattgctcccgggggtgacatcactattgcaagccctaagatcagtgcttgagatattttgtagaccctgcactccatggatcagctgacaccactcagaccagtaatttggcgcaaccagttttgccatcacacccaggaacagaagacattaagaaaacctcacttcgaccccttatgattccatctccaacctgaccaatcagcactccccacttcctaagcccctaccagccaaattattggtaaaaactccgatccgcaaatgctcgggacaactgatttaagtaacaataaaacttcagtcttccgcacagctggctctgcgtgaattactctttctgcattgcaattcccctgtcctgataaatcggttctgtctaggcagctggtaaggtgaacccatcgggcagtttcaaaagtgctgggattacaggcatgagccaccgcgcccagcctattttttgtatttttttgtagaggcggaggggtgggggagggtgtctcactatgttgccaaggctagtctcgaactcccaggctcaagtgatcctcccgcctcggtctcccaaagtgctgaaattacgggcgtgagccactgcgtctggcccctttaagccattgtgaaaagtgatgatacacgaaaaaaaagatttccagggccgagagcggtggatcacgcctgtaatcccagcgctttgggaggccgaagcgggcggatcacgaggtcaggaaatcgagaccatcctggctaacacggtgaaaccccgtctctactaaaaatacaaaaaaattagccgggcgtggtggtgggagcctgtagtcccagctactagggaggttgaggcaggagaatggcgtgaacccaggaggcggagcttgcagtgagccgagatcgcgccactgcactccagcctgggcgacagagcgagaccccgtctcaaaaaaaaaaaaaaagaaagaaaaaagaaaaatttccaaacagggtgttcccttgtttcacattctctttggtgatggtcctgcaacagattttgataatcactatattgagaaactgcttcagattcgatctgttaggctgatcatagtattaactacaattcccagcaagccgcggagccaacctgggcctctgccggcctctgattggatacagtagccagaatgacgactcaatcagtgcttcggttgttgctttgcggcgttttccgcggggaaactgtgtaaagggtggggaaacttgaaagttggatgctgcagacccggtactggaaagtttcatgtggggtgccgttgtggggaagtggggttcgctcattatttcctgctccttccctaggctcgtgggtttcgatattgggggagcggagattttctcttgggtgctggtcacgcccccttaagactcgggatcgtcactaagaaccccgctgtgaattgggggagcttcgggccttcttttggtggggaatgcttggaagctgctcattgttggaaaaagctctttttaggggattctgggtgatgtttccgcctgttgctgcccatcttcctccccagccccttcccgcttcgggcagcctgtcattaggggaagttgagggactctcccacttcaggtggtgttggagagcgtggaatctggagtccggtccctggattcgaatgcgagcttcacaccaattgtcagctgtttaactttgcccaagtttctcaactagttacctcagtatccttatctgtaaagtgaggtaaaatatccgaagcctttggaacagtgtggcacgtaataagggctcaataaatattagctaatattgttcctaaacagttgttgaacatctaacatgaagaattttcttttcttggtggtaaggaggacagggttcattctccagggttgaccgtctcccctcatgtgcaatacacatacgtgctttcgcgcacacatacaccgcaggaatttacgtgctccggtgggggcaaacaaacttgcaagccataatagtattttgataagattatcgaatagatatgtgcgaagttgatgagaacattggagaggaaaagacttgactctggggaaggttttgtggagggaagtcagggagacaggatgcgtgacctaccaatacacataccatgtggctggagggcagatcatgtgagagtcattaaatgatgattgctgaccttaagtactatgtgccacgcactccccgagtcctttaacctccact

SEQ ID NO: 2796 - DNA, 6000 bp, Homo sapiens
caaaagaatacagcgaaagtaatgggatgtcactcctgtgattatgttctgtataagatgccatcttaagcagactggagaagcccttgctggctttaaagaagcaagctgccatattgtaagacagcctacagataaactaggtaacaaggaactgcagggagttcctaggtgagagcagctcccaactcagagccaaaggtcaacaagaaaacagacctcagtcctacagttaaagatgaattatggccgggcatgaaggctcacacctgtaatcccagcattttgggaagcccaggcgggcgggtcacttgaggtcaggagttcgagaccagcctggccaacatagcgaaactccatctctactaaaaatacaaaaaattagccgggcgtagtggcgggcgcctgtagtcccagctactcaggaggctgaggcaggagaatggcgtgaacccaggaggcagagcttgtggtgagccgagatcgcgccactgcactccagcctaggccacagagtgagactccgtctcaaaaaaaaaaaaaaaaaaaaaattagccggtcgtggtggcgcatgcctgtagtcccagctactcaggaggctgaggcaggagaatggcttgaacccaggaggcagaggttgcagtaagctgagactgcaccactgcaactccagcttaggcaagggagaaagactccatctcaaaaaaaaaaaaaaaggaattttgccaaccacatgagggagcttgcaagtcagtctttttccccagttgaccctttgatgagacacaccacagccccagctgacacctggaatatatagctatgtgagatcctaaggagaggacccagctaaactgtgctcagctgtgagagatgtgttgtttttgagccattacgcttgtggtattttgttatacaacaataaaaaaactaacacaaatacctatgataaagctttttcactttttaatcaagtatcactcaaaatgtaatcaataaagactgtaggccgggcacagtggctcacgcctgtaatcccagcactttgggaggccaatgcaggaggattgcttgaagccaggagttcaagatcagcctgggcaacatggcaagacccccatctccacaaaaataagccagcacagtggctcacacctgtaatctcaacattttgggaggccgaggtgtgcggatagcttgagcccaggagttcgacgagaccagcataagcaacatggcgaaaccccatctctacaaaaaatacaaaaattacccaggtgtggtggtgcatgcctgtagtcccagctactcaggaggctgaggtgggaggatcacctaagcctgggaggcagaggttgcagtgagccatgactgcatcactgcactccacctggggtgacagaacaagaccctgtctcttaaagaaaatgaaaattaaaaaaattttccagtctggacagtatggcgaaaccctgtctccactaaaaaataccaaaaaagttagctgggcatggtggcacatgtctatagtcccagctactcaggaggccaaggcaggaagatcacttaagcctgggaggcagaggctgcagtgagatcaggccactgcacccctgcagggggacagagcgagaccctgttgcaagataagaattttttaaaacactttaagcttttttttcaacaatttttgtgagtgtatagtaggtgtatatatttatttgggtatatatttatatatatttatatattattaggtgtatatatttatatatttatatatataaatatgtatatttattatggagtacatgagatgttttgatataggcatgcaatgtaaattaagcacatcatggagcatggggtatctatcccctcaagcatttatcctttgacttatggggtatccatcccctcaggcatttatcctttgagttacaaataatccaattacactctgagttattttaaaatgtacaattattattgaccatagtcaccctgttgtactatcaaataggtcttattcattctattttttttgtacccattagccatccccacctcccacctacttttccttaatacttacaaaaggtaaaatgcaccttctgacatggccgaactgtgcaaagtgttctttcagctgacctgtgtggcagaagaaaacattaaaagtagttactatattttggattctctatcttagactgtagaaagacagggtcaccagatttcttgtggacaggaactactttgcatttccttaaaggcttaagatttaggaagcagctatggtactgactataaagccataatgtaccagacttggtggtgagatggacagagaagttgttgagttggctgcagtctccatcctcagcaaatatcgagtgttttcataccagttactgtgctatgtggactatgatccctgtgagcagatcacaatgaagaaaaagacaaattacaatccagtgtgtttcccggtatactgaagatttccaaataaaatcccaacttactggtctttcacaatttagtaaaatgtgttgagttgccctcacctacccttcctgccttatttcccactgctagcccctagttactctctagtacaactaattgaattatctttatctgtcctgcgggttaccctctttgcatatgttgttctctcccctccatatgttggtaatcctatctccccctggctaacttgtaacactataactatccttcaagacccaaaccaagtacatccactgagtattactttattgggctcctatcacagtacaagacaatgtaccagccctgtgagacttcaaagatttagagtatataatcttaaagactaaaaactacacgatctgtttctcttctgaactacagtgcttgtacttcactgatttactttttataatatctatttagttctcctagttcaccaaaacctcactggttcaacaattgcctatatttgttctaagtctcttcatccccaccactaattgtaagctccctcagcatataaaccactatgtttacagtgaccaataaacagcagggcctcaatattggctaaatgaataagtaaaagtccactaatccttccaacaatccacagagactaaattttgaagggctctaatggttaagtcaaaccaactggcaagatcaaggtctcacagaatatgatactggagaacaaaataatgttaaacatatgttttataccagataattaaagtcctagaagacactgatttcaaaacaaaccagctctggaaggtaaccctcttcctaaattgcctaaaatggtgaaggaaaaacagctgcaagcaccaagaacaatgcctaccacagaatagatactcaaataaatatttgctgaatcaatggaacaacaaagagaaactgtttcgaagctgtacataatgctgactctttttaagggttttaaactagccctttattgtctggaaacttgcatccgcaagatgctaatgaaactcctcagcctttccataaagtttcacagggactacgggagactttactgggcttggtcttcaccaaccacatgtttaaaacacggggcacaaaccaacctatttcccattctactactcacatctgagccactaaaaacttagaagaaactaaatcttgctccattttgtttccaggggttgacctgaaacatgaatatctacaaaaagagtgaccacgaatgtttacatgttggtaagcaaatataaaaacctcatctcaaaactgcagctgacaaaaattgaaggtggtgaaagatttcagaactaattattccaacctttatctgtagactaggcctctcccgtaagtttcaattttagttaccgtgaaaataactatcatttgctgagtacttacactgtatctaacacaagtctaagaagtttgcatataaactcaatcctctcaacaatcctatgagttgggtattattgactccattttatcgatgagtaaactgaggcccagttgtgagcccttttcccatactaacttcagttattcaagtgataacaacgattaaatggccaagttggaattctaaccccaacggtctagcttcggagtccacttctcagccacaatgatatacaacctttgtccaattgcctgacggaaacctcacaagtttctcaaagtcaacacattcaaactttactcatcttctcttggcctgctcctaacttctaaacaaacaattcaccaatgctaaaaacccagaaatcatttctccctttcctttattccgtacacttctcccacttaagccatcacgaaacggcatctaatttgcttttaaaacattaatgcatctgaccaccatccttctaccatcgccctaattcaggtcctcacgttttaagtaaattaatgaaattgccttttagctcctctgcacgcctacaatcttgccaccttgaatccatcctccacactacagtcaaaattatcccttctaaattgtaaatcttggttaccaagtaataaatctttacaccaaatcactcctaaaggcaagagccggtgcattcgtgaccccaaaagctcaagggacatccctaaacggttaactgcaaacaaaatttctttctgctcacttgcatgctcaggagcagtctcctaattcagccaccacgctgacttaagtaccctgcaaaaagcagaagctttgaggatcacttggacctaaaaattccactactcccacatctccatcactcactcgacgccgcagtccaaggaattcttctcacaaaagcaaccggctgattgatacttctacgcagcgccgcagcacctctcgctgctgaggccgccatcttcagactaaagcaccttctcgagccgaggtcgcggccccggaaaaaatttccggatccggaacacgagagaatctgcttccggatcagagggtataggccgcgagatggggaagatggcagcggccgtgggctctgtggcgactctggcgactgagcccggggaggacgcctttcggaaacttttccgcttctaccgtcagagccggcccgggaccgcagacctggaaggggtcatcgacttctcggcggcccacgcagcccgtggcaagggtcctggtgcccaaaaggtacagagagaggagtggcgcgcgtctctccatcgctttgccccgcgtcttggagggacttacgtgtcttcttcgcctcttttcacctccagaccgattgttattgaacgattcctgacctcctttggctgcagagtcgaactccccactaaccgtcacacttagcaataaagcgttgagatgcctgtttctttaggcggccattcctggcgggggcgctcagtcaaaagagcctgggaatccgtgtttatttcttactgtaactgtctcctcacatttctgtttgggtttttgtaaaaccccatagaacgtctttgtagacggtagggtagacttctgcagcttaaaaaaaaccactcccgaggaatcccagaactgacagggatgcggcgctgtttgttaagccactgtgcgtaaaactagtccctgtcttctcctctggctcttttagaaggaggtcattgaaggattctgagaatccctccgtgttgaaaataaatggcaaacaagtatatatggaatacaggcaccgttctctctctcagcttttccccatggagattaagaaggggaacacagtccgggagcggtggctcaagcctgtaatcccgcacttcggaggccgaggcgggtggatcgcttgaacccaggggttcgagaccagcctggggcatggcaagacccccgtttccgccaaaaatacaaaaaattagccagtctcataacctgttctcaagtaaatagattttttaaaaattatttttttaagggaacataacaggcaagagggaaaacggggaaccaaaactgtagtccaatttatattttc

SEQ ID NO: 2797 - DNA, 6000 bp, Homo sapiens
ctccagcctgggcgacagagtgagactgtctgggaaaaaaaaattttgttttgtagagacagggtcttactatgttacccgggctggtcgcaaattcctgggctcaaatgatcctcccaccttggccttctaaagtgttgggattataggtgtgagacacctcgcctggtccctattaggactttcttttttttttttttgagatggagtcttgctctattgcccaggctggagtgcagtggcacaatctcggctcaacaagctctgcctcccgggatcatgccattctcccacctcagcctgccgagtagctgggactacaggggcccgccaccatgcccggctaattttgtttttgtattttcagtagagatggggtttcaccttgttagccaggatggtctcaatctcctgacctcgtgatccgcccgcctcggcctcccaaagtgttgggattacaggcgtgagctactgcgtccagctttttttttttttttttttttgagacagagtttcccccttattgcctaggctggagtgcaatggcgcgatcttggctcactgaaacctccacctcctgggttcaagcgattctcctgtctcagcctcccaagtagctgggattacaggcacgcaccaccatgcccagctaatttttgtatttttagtagagacgggatttcaccatgttggccaggctcgtcttgacctcctgacctcaggtgatccacccaccttggcatctcaaagttctgggattacaggcatgagccaccacgcctggcgaggacttttgatgtcattaattgtaattctttattaaatatgttcagccttgatagcaacaagttttaagttgttatgccatttgagaatgtgactagagggacaattatgaattattcataactattatgacatttattacaatgataatgataaattattcttcacagcacttctgccaaatcagatgttcagagttgtggcagggagcccagaggcaatgtccttattttttcaatggtcatgccactttcagccacatttgcaggcactgctgactcctgttctatcctttcaaaacggacgtcttagacaaggtacagtctagaatgggtttggaaatgaaacatttatctgtttattatgtgtatcctttgtctatttacttgctcacacacagtaccttctttgaagacatgaagacataaatgattgagtgatattgccttctctgaggtcagttacactcaccaggatagcctttgagtccataggcttgccacttgctgacgggctgaagacctgctctatatgcattctgctcactgacagaagacacatttagctgagatttgatcacctggcaggaaggaaacagaagttaaaggactaaatctattttgcaggtcaaccccgggaacctcaaacctccaaacacatttcttgtatgaggcaaagctaggattcttgtttaagatacagaaccttgctctattgctcaggcgagtgcagaggcatgatcatagttcactgcagcctcaagctcctgaactcaagtgatcctcctgtgttggcctcccaaagcaatgggattagaggtatatgccactgtgcctggccaaagcaaggagtattaactctggggttaatcttagctgtactgcttacttgatctgggcattttagatgagtcatttaatgtcttagagcctcagtttctcatctatatagtaacagtagagtcacccaaaattaaggcaaaatggtaataagaaaacttaagcaggctaattttggctttcaaaactactttttcctatgacatcatacctttccaacttcttatggggctgaatcatgaaaggtgcttggtgtactgaaatatcttgagtcacaaagctatttacttcagttagggctaacagtaatgcttttgagacacttgtatagagttggtatttaaacagagctataaggaacaccaagctggacagggtgagaaaatgaaaagagaaggccggtcgcagtggctcacgcctgtaatcccagcactttgggaggctgaggcaggcggatcacgaggtcaggagtccgagaccaacctggccaacatggtgaaaccccgtctctactaaaaatacaaaaattagttgggtgtagtggcgggcgcctgaaatcccagctacgagaggctggggcaccagaattgcttcaacctgggaggtgaaagttgcagtgagctgagattgtgccactgtactccagcctaggaacagagcaagactccgtctaagaaaaaaaaaaaaaaaaaaaaagagaatgaaaagagagtgctgtaaacagacagaaaaaatgttgcagtgagacactgggaatcctgtctgctaaaagtaaaagctaaaaaatcctgtttgccctcttctagatgaaatgtccaactgacgctacaacttctgcttctgttaattacttagaaatgaatttagtatttcaggggctgaagttttctttgtatgtgagtatctaatggatggctcattacattggttaagagacccactatgcagtcattgaagtcaaaacattaaaggaaaaaacctttattcttccctgaatagtaaacctagggtctgccttgccttaaaatatatgaaacaggccgagcggtggctcacacctgtaattccaacactttgggaagccaaggcaggtagatcacctgaggtcaggagtttgggtccagactggccaacatggcgaaaccccgtctctactaaaaatacaaaaattagccaggcatggtggcgcgtgcctgtagtcccagctacttgggaggctgaagcagaagaatcatttgaacctaggagatggaggttgcagtgagccaagatcacgccactgcacttcagcctgggtgacacagtgagacgctgtctcagtaaaaaaaagtatatatattatatatacacacacatatatacacacacacatatatatatatatgaaacattctctttgaaagagaatgatcttttatcttatcaacttctccaagtgtggagattcctggacaaaataccaaaagtttgctgatgtataaccagtctctataataaaagggctatatgaaaccctctgacagtactatcagctgagttttccaggtacctaggcactggtaaaacacttttaagcattttgtcatgatttctttaataggccatacttaatactgcactataattcaacacactctcagaggtgatgttagtggacctattctatcatatgctaaactgaacgacaccactgagcttttataaaaggttttctctttcctcccttgccagactgttaaccaccactttccccaccagtctcatcagctggcttgtaatagtaacttctcttaattactactttaatctgctttgagctgaggaactaaacacccaagctttcatgtactcaacacatactgtacttagtactgttttaggtcctgtactagacacataatggctcattccctgatggctgacattctaaaaagcatgtacatattatggtaaaatgtaggtaaaaggagctgaatgagagtctgaagcgctctggagagaaaaagtatattattattggggtgtggactttctgtattttgacaactctaagaccactttttttccctaacaaatgaaggtgctgaaaagctgagctcaagtatgcaatcattaacacttaatactgtagcatcccaattttatcagagctgttaggaagcttggaaagaatgcctcatctagacatctgtggacaacaccaagagcaaattaagggactgcatatcctcaacgttaaagtggattgtaaagaaagaaaatataaattggactacagttttggttccccgttttccctcttgcctgttatgttcccttaaaaaaataatttttaaaaaatctatttacttgagaacaggttatgagactggctaattttttgtatttttggcggaaacgggggtcttgccatgccccaggctggtctcgaacccctgggttcaagcgatccacccgcctcggcctccgaagtgcgggattacaggcttgagccaccgctcccggactgtgttccccttcttaatctccatggggaaaagctgagagagagaacggtgcctgtattccatatatacttgtttgccatttattttcaacacggagggattctcagaatccttcaatgacctccttctaaaagagccagaggagaagacagggactagttttacgcacagtggcttaacaaacagcgccgcatccctgtcagttctgggattcctcgggagtggttttttttaagctgcagaagtctaccctaccgtctacaaagacgttctatggggttttacaaaaacccaaacagaaatgtgaggagacagttacagtaagaaataaacacggattcccaggctcttttgactgagcgcccccgccaggaatggccgcctaaagaaacaggcatctcaacgctttattgctaagtgtgacggttagtggggagttcgactctgcagccaaaggaggtcaggaatcgttcaataacaatcggtctggaggtgaaaagaggcgaagaagacacgtaagtccctccaagacgcggggcaaagcgatggagagacgcgcgccactcctctctctgtaccttttgggcaccaggacccttgccacgggctgcgtgggccgccgagaagtcgatgaccccttccaggtctgcggtcccgggccggctctgacggtagaagcggaaaagtttccgaaaggcgtcctccccgggctcagtcgccagagtcgccacagagcccacggccgctgccatcttccccatctcgcggcctataccctctgatccggaagcagattctctcgtgttccggatccggaaattttttccggggccgcgacctcggctcgagaaggtgctttagtctgaagatggcggcctcagcagcgagaggtgctgcggcgctgcgtagaagtatcaatcagccggttgcttttgtgagaagaattccttggactgcggcgtcgagtgagtgatggagatgtgggagtagtggaatttttaggtccaagtgatcctcaaagcttctgctttttgcagggtacttaagtcagcgtggtggctgaattaggagactgctcctgagcatgcaagtgagcagaaagaaattttgtttgcagttaaccgtttagggatgtcccttgagcttttggggtcacgaatgcaccggctcttgcctttaggagtgatttggtgtaaagatttattacttggtaaccaagatttacaatttagaagggataattttgactgtagtgtggaggatggattcaaggtggcaagattgtaggcgtgcagaggagctaaaaggcaatttcattaatttacttaaaacgtgaggacctgaattagggcgatggtagaaggatggtggtcagatgcattaatgttttaaaagcaaattagatgccgtttcgtgatggcttaagtgggagaagtgtacggaataaaggaaagggagaaatgatttctgggtttttagcattggtgaattgtttgtttagaagttaggagcaggccaagagaagatgagtaaagtttgaatgtgttgactttgagaaacttgtgaggtttccgtcaggcaattggacaaaggttgtatatcattgtggctgagaagtggactccgaagctagaccgttggggttagaattccaacttggccatttaatcgttgttatcacttgaataactgaagttagtatgggaaaagggctcacaactgggcctcagtttactcatcgataaaatggagtcaataatacccaactcataggattgttgagaggattgagtttatatgcaaacttcttagacttgtgttagatacagtgtaagtactcagcaaatgatagttattttcacggtaac

SEQ ID NO: 2798 - DNA, 6000 bp, Homo sapiens
tgtattggttttctgtcttcatcacagtaaacttccttcttcaggagtgacagggagatattttgaattcctgcttgaaccatctttgagactgtccgggccaccccactcaacaaccatggggctctctgagcttctgtttttctgtgaaatgggttaagtaggccagtgttccaatagggacttgggtcatggactctgttggcatgcagtctgattctaggtggtaccggaaactctgccccacacagcatcaaatcaggggctgtggaatcattctcttttctattctccctttaatccatgggatctctttaagaagaaagtttccatttggatccccctctttaatgctgctaatctccctgtttaagaaagaaagagacattctcaggctcgaaaccattcctcttatgatagtgtggagctcacgtttaacatcattgctttggttctagagtatttctccccctccctaaaactttgatttaaaaaatgttcaaacttaggaaaaaagggaaagaaaagcacaatgaatagcacagacccttcacctagattcaccaggaatcagcactgtggagcacttgctttatttctcactctcccactcgtgattctccccatctgtgttcagagagggatcatgttctgcttaactgtggtagtgacgtgagttgtaagccccaagttattttttaaaagaaacattcagaactgaatccatttattaaaagctaaatatagcccactttactctttcaagtatacttagatttactatgaaactgtttgatgttagttcagtgggtgaattatttttgtattttacagtagttccctcaaatggcaaaaattaaaaggaccatacaacgagactttcattttcgtttgctctaataactattaatagctagctgtatgattaattacatttaccaagtttcacatttggtgacacctcaaagtaatcttatcccagccatctttatgcacccaagacacagccaagaaataggaagtctgcagaaaacagatacggaggaggccaaaccccaaagctcaggggctgtgttcacaggcaagccctggaggaactcctcttgaagggcctgtttcctctgacttggtgctgggttcccatacgcctcccgatccagaatagaaagagaaaacaagactgctcagagtgaacaagtcacagcagcaggaagtcgcaggaatcggaccacaagtaaaaaacatgatcaggcaccacaaacagccttgctctgtgctcaggacagttcatttaatcctcacgcagccccacaaggtagatgaggaagctgagtcttcaagaagtaaaacagcctgctcaaagtcaccagtaagcaacactgggatatgagcacaggcgtgtgtggcttgcaagccaggctctgtctgtaaggatttaggggaggtggtgtgtatctgggatcacggagcacaggacacaagctgggacccttctgggtctcactgggacttccgtgtacaaatgcacacattgtaagtgttggggttcatcaggaggctctcggacatctagcaaaggctgagttttgataatgaccctcatacattttgctggtggacacgacagtacggagtctctcccccagcctaaatttagcaaaataccaccggccctggggccccaggagagcagctccttcgcctcactccctactgcacccttttcattagggactctttcccttcccctttcactttctatgtgggatgcagctgaagtctccctgagcctcaaggcccatgagggtgacaggagaaaagccagggtagagattgtcactactgttatctcactggtggtcctgaccccacagcccttctaccagtgccgtatcctcagcgtgtgcccggtgagtcatggtggtggagacccacagtcatttcccaagcttcatgctctcagccacgtgattccacctgtgccgcacttcctcagtttatctgctgtgtccaccgtgctgacacggcgatagccactgggggcctagcagtaaccacaccctgtctcatggagctagctctctaatgggacacatgaccacacagttcataatgatggtggggagtgccctctatggaggggatgtaagagtacttacagttggggtcatctaggcaggaaaagtatggtcatgttccccagaactcttagaaatggatcacgaggtagatgagcttacaggaaaccgggccagcatggtgccatagaacagttcccatccctgccaaattcttcagcccttgtgtccaaggtcagatgccttgtcttccacaaaacattccctggcgtccacccttcgtccccttcagctacaagtgaccctcctctcctgcaagtattcatccttctgaaggctgggcgccaggcactaacagacaggcagctgcctcccagacataaggagcatgggtcctaaccaggaataagcttcacagccattgctgtcaggccaagccgtggtccaggcacctgcaggcattaattcgtgtcctcagccccacacccacggggagcaggtgtagttactattcccactttcgcgataaggaagcacaaggaaagtacatcgctcagatgtaaagacacaaagaaataatcagaggtgtgatgagtgctacagacgccttataggcatgggtagcagggaccttgttatagggaaatcacaaaggagggtcggtctggtgatgtagctaagacctcaagtctgagagtcagactttgattccagtccctgctccgcaagtgatcagttgtgtgactttaagtacatcactgaacttctccaggcttcacttcgagccactgtaaaataaggatgctaatatccaccttacggagttaaacatggtcctctgcacagacttagcagagcgcctggcaggtgttgagttcgggaagtcgtagtttattgccctctggtctgtgatgcgaccctggcttgcctctctgttaggctgcaacatcgctgtggcagtgtctatatccgatccaaccccgtgtccctcccccagaaccctccctaaggtcatgcatttctgttaggcgctcagtgagtatttgtagattgcatgaacgagggagggaatgcatgagtgagtagctgtcaccacatggcaggtatctttgctgaacactggtttagtcttctgacaaaagcctcctaatgtagccgcttcagacgagagcaggcttttttctctgaagtacccagccaacatcgtctggcggtgtctgactctgtggtgttggcggggacacgaaccaagcacagcttgatttttatggtttaatgtaagagatggagcctccaccactgtcgcttcagaagattgttgttttgacgtctcagccacacaaatggagtgaaactgccattataggagataagcaggggagactgaggtgtcaggatttaggaccctgccttcaaagcagatccacctgttgcccccacagtttgcgagtggctccattgaacacaaagggactgatggttgaatgcaggcgggctgccgggtgcccccatctgaggacgtctaactgtgtcccttctttgtctcccgtccctccccactgtcctcgctctgcaggaatggcatcaccagctgccggatgcggactgagagtgagccatcttgtggctccccagtggtcagcggagaccccaaggaggatcacaactacagcagtgccaagtcctccaacgcccggagcacctcgcccaccagcgactccatctcctcctcctcctcctcagccgacgaccactatgagtttgccaccaaggggagccaggagggcagcgagggcagcgaggggagcttccggagccacgagagccccagcgacacggaagaggacgacaggaagcacagccagaaggagcccaaggattctctgggggacagcgggtacgcatcccagcacaagaagcgccagcacttcgccaaggccaggaaggtccccagcgacacactgcccctcaaaaagagacgcaccgaaaagccccccgagagcgatgatgaggagatgaaagaagcggcagggtccctcctgcacttagcagggatccggtcctgtttgaataacatcaccaatcggacggcaaaggggcagaaagagcaaaaggaaaccacaaaaaattaaaaacaagtcactgatttgttttgaacttacgaccatttggtttcagcatgtcaggagatttctaatgatttgtggcaatatcagcaattttttttcttttttcttgtttttggtttggttttctttcttttcttttccttttattttgttttaatttgccccctcttctttgttttggacccttaagaattttatttttaaaggagattgaagccatagaactcatattgacactcagctgttttacaaaagcttttcattatctgaagacaaaaccgaaaaagccaaaattaccattgcttcctccagcttgtcagaaacctgtggctgaatccgcagggatgtcaacgtcaatatcacaggaacacacattcggcacctagaaggcacgtgggcaaagtaatcatcgttcaggcccaacccttaggtttaaaaagtcaggttgtccatcccattgggttcactgagtgaaggcacataaagcaattgaggaggaggaggaacccctcgtccccctaggagcagacccaagcttgtggcaccaggcatctgatggtgccaggaaagccactggaattgtcacacggcgagcacagagggccggccaccagtcctcgatgcttctgaaccctgaagcccgatgacatcttacgaggtggacgttggactgttcatgcgcatcgggtgtcagtgactcatggagaagaaatggggtaaatttttagtgatgttgctaatcattgaattctgttctctattaaattaagaaaatgttccaaaagccataagcctgaagattggccctgtgcacgcacgcacacacacacacacacacacacacacacacacacacacacgaaggagagagagagaaaactgatggggaaaacaagctgtgtcttcttaactgcccaagtgaaaagcaaccaagtccaggaaattacaatagctgttaaggaaaggaaataatggtacagatctttttctgtctatcaaaactatttgatccaagtgaaaaaaaaaaaaaaactagaaagctacggaacctgccattagtattgtggtgtatttttaagattaaaggtacactgatggacaaaaaaaaaaagtaaaacatggcaaaaaataaaataactcctatactgccctcaaaatggagtttgcaattaatatcaggatttatctttgcaaaaatcagtgatttccacattcagccagtatagccagcagaaatttctgatccacaatgcatggattcctttgaagaaaaaaaagaaaaagagaaaaaaatcacaaaaacaaactttttttattcaaaagtaacaaagttcttgtaaggtaaataatgtatttagcatgaagcatgaattattttcatataaatatagaaaatagagaaaaggctatgcctgtaatttttaagcccttaggcttagagtttcttttggttttcttcttttttctttccttttctttgctttctttttttcctttttgtttttgtttttgttttttgtttttgtttttttttcgggttattttgttttggttttttgaagcaggtgtttaaggtttaaccttcttcagggacaaattctgactgttggggaacttactctgcaatataaaaatatcttcatgctctggtagggcttggatggttgaactctgtactgccttgtgtgcacttcagccccgaccccctctgattctctgttgaaaagtgtgtcctttctctctgtctgtacatgtttaacatgacgcaataatttgagggcaaacttagtagt

SEQ ID NO: 2799 - DNA, 6000 bp, Homo sapiens
ccggcggacgccgcaggtcccatgccgcgccgcgacccccgcgcccctgccgcccgcgcccgcggccgccccccgccgcccgccgccccgggctcgccgcgccgcgcccgcgcgtccttagcggggccaccgagcgatgcccgccgggcgcccgcgaaagtttgtcggctcctgctgaagggcagcggcgcccccgcacccccgtgccccgctccggccaggtgagtttgcaccccgctcctgccggctcccgcgtgggctcggggggcacccggggcgggaggcgcgtccgagacggtcctggagactacctcgccgctctgggaagacgagggaccccgcaggtcctggggggagggtcgggtgtggaccccgggagcccccgagccgggaagttgccgggtccgaagagtttcctgccccgacgtgcgtgctgcttcccggtgcctcggtttccgaaaagacgcccgcaaggaacagagttggtattgtctgcggaggacggggtccccgccgttccgggccggggagggggttccgatcaagtggagaccccaagatgagaaacaggctcctaacaaagatcaccccccggccaaactgtgcagacttggcacaggcaacgaacgtctccggagacccccgaggcccgacccccctcatcccggccctgtttgaaaccctccttgggccctggataagttgggggacggcgggcttttattgatttgttttcgaggctcgccgcggtgcggccaataaaaggtttatgacatctgaccggcagtgaaggtatgcgagctcccaattgccctgtatatggggataagagcagtttcccccgttgcccggcaacgccgctgattgacgcggggtgcagccaatcgccactcccgcaggtccccttgaaatgtttttgacaagtacagtagacgagagtgaagcgcgtgcgtgcgcgcgcgcgcgtgctgggtgggcgggggtgacccggccccccaaactcgctactgctcggctctgggaagatttcttaactttttaaagttcgcatcgaacatctgttcagagctgggccagtaatgtctttgtcagttatttggagaccttctgtttactaggcgagaaactaagctttcttgccgcattttctccgttaaaaaataaagagggtaacaaaacacagcaagtcataaaaaaaacaaaagagggtgtgtgtgtgtgtgtgtgtgtgtgtgtgtgtgtgtagagaaaagttgtaaggaggtcaccagtgaataactatttgcgtatctggtggagcagccttgttggcagcagattaaaaatgtttgcttaactgcaactcacatgatccagattctttttttttccctctgaaacaggaggaaaaaaagatttggcgaaatctgtagttagagtataataatggaaaactcctcagctgtggtttctgggaactgtttttttttttttttttttttttttttggttattgttgttttgttttgtttttacatggaactgtagtgatcagcagctcttcaccctgttggtataaaatgcgggatttatagggatgcagtgagtggttggagagtacggggtcccagcacaaaacgcacacatgatccaagggtactgaactcccataaccctctcttcgtgacaatgccactttttctcctaaaaccatattgctggcagtgtttgtttaaaacaaaaggaaacatggagaatagcgtgttagttcctctgggaagctactgacaaataagcaaattaaaaagaaagagagcagcatgttgtcatagcaacagtgcaattaaattactttactgtcagccatgatataattttcctgtttggaagctcaggagacataaaactttcatttagagctaaagttgacttcagtggctgggtagttctgttttatactctactgtgggcatatgctggtcatcagaaaattttctgatgggatctgaggaaactttaagaaagacaagtggtgctataattcgttcataaagaagttaaaagcaggatcagaccagactctgttgtatccccaagccaaaagatgctagcttgttttttgtctgaaatgtgtcagggtaacctccttatttgacagaaagaaatattccctgtgagtgaacccaagacgtctggagcatcctgcctggtctgtactgcaatgcctcatgaagttttctctccttaagagttgggcatcttggccaggcgcggtggctcacgcctgtaatcccagcactttgggaggccgaggcgggtggatcacgagatcaagagattgagaccatcctggccaacatggtgaaaccccgtcttactaaaaatacaaaaattaaccagtcatggtggcacacgcctgtagtcccagctacttgggaggctgaggcaggagaatctcttgaacctgggaggcaggggttgcagtgagcggattttgcaccactgcactccagcctgggcaacagagtgagactctgtctcaaaaaaaaaaaaaaaaaaaaccggttgggcctctcaccacagctcccccttaggccttgcgtctagcaggttctaccttttggaagagggaaggtactataattcacaggcacccttggctggtaggttagtgcccaggattatgccttctagaattccctaatagagcttccacagctgaagtggcagttgttttagatgtggtgttaatgaacatttaagagacatagaagggtcatgtctttgcctttttaattttatttatttatttttttgagacagggtctccctctgttgcccaggctggagtgcagtgagcctcaacctcctgggctcaagtgatcctcccacctcagcctcccaagtagctgggactacaggcacacaccaccacacctagcgaatttttgtatttttttggtggagatggcgttttaccatgttggccaggctggtcttgaacttctgagctcaagggatcctcctgcctcagactcccaaagtgatgggattataagcatgagctaccatgcctggcctatgtctttgcttttaaatatgttcattcatccctcctccttcttctcctcctcctcctcctcctccatccctcctcctcctcccccttctcctccccctcccgcttcttcctccttcctccccttgccctgccctgccctgcccttccctgcccttcccttctcttgccctcccttcccctcctctcctctcccctcccttcccttccttttcccttctctttcccttcctttcttctttcccttcccttctttttttccttcttctttcccttcttccttcccttcccttctcccttcccttcccccttctcttccgttcccttcccccttctcttccgttcccttcccccttctcttccattcccttcccttcttccttaccttcttcaaaacttttgagacagcatctcactctgttgctcaggctggagtgcagtggtacagtcatggctcactgcagcctcagcttcttgggttcaagcagtcctcccactcagcctcccaagtagctgggactacaggcacatgccaccatgcccggctaatttttgtatttttcatagagatggggtttcgccatgttgcccaggctggtctcaaacccctgggctcaagtgatcctcctgcctcagcctcccaaagtggtgagattataggcgtgagccaccatgcccagcctgttcatttgttttctaggtagatgcttgattttcttactgttcgtttgtggggggaattaaaacctaacagttttaaaccaagcatattgttttagcgctacggagagtgggagacctttttggttatctttactgttctttctgtgttacgttgggtgctggagggttgaacatgctttgtgtctgtaggggtcattctgtttgtaaacgtaccacctcctcgttttcttttctcatcagatgttattttactccgtgttctaggtcattgataaaaatggggatggtggtgggtcggggtggagggatagaattctatggcatgttttgttgaattgaattgaatttgctgtcttgaaactggcagttgctctcctgacttttttcaccagctctaatttcagttaatggcttatcttacattcccatgtattctgtgtggtacctgaagttacttgcttttcttctgttctggaagaaaaaataattcacagtaaaatttaacgtactttaaaactggtctcctggtctcaagcaatcgtcccgcctcagcctcccaaagtgctgggattacaggcgtgagccaccgtgcctggccggtgttactggtcttattttatttaaggggcatcaggtcaccttgctatatgaatggcgggctgatttttctcatcagcctatctctctgtggtggaattgtgggattgtgttgcttagtgtgggagtcacaaggtggtgttcctgtgtagcaggggttccatagaggcggcagagggaggcaacaggatcagaggggtacagtctgcctttctgttttgggcctcgccagctcatcatttctttgtgatgtctttactaggagccttcacgtaaatgggtccagtcatgcctcccagtaagaagccagaaagctcaggaattagtgtctccagtggactgagtcagtgttacgggggcagcggtttctccaaggcccttcaggaagacgatgacctcgacttttctctgcctgacatccgattagaagagggggccatggaagatgaagagctgaccaacctgaactggctgcacgagagcaagaacttgctgaagagctttggggagtcggtcctcaggagtgtcagccccgtccaggacctggacgatgacacccccccatcccctgcccactctgacatgccctacgatgccaggcagaaccccaactgcaaacccccctactccttcagctgcctcatatttatggccatcgaggactctccaaccaagcgcctgccagtgaaggatatctacaactggatcttggaacattttccgtattttgcaaatgcacctactgggtggaaaaactcagtgagacacaatttatcattgaataagtgttttaagaaagtggacaaagagaggagtcaggtaagcctctgtgtctggaacccaaggttttctttttttttttttaatttaaaatttttctctattaaaaatgaatttctattcaccacattgaagtagcagttgtaagtgggttttagtctatttaattcatttagataattttaaagaatttcctttccctaagcctattagttatgtactgtttattagcatttgtactatttgagagtttcccactgatagggtttccataaagataaaacagtggtttacagaattgattagttctcagttaacatccctcagtgtggatgggtcactttggttttagggtcttaacaaaggtcagtattccaaggacagccattaaccgtgaagtatgtgtgtgtatatacactgccaccatgggctagagaaaaatggtgtttctttttttccctgaatatgaactaggagaagggaaatttctccagtgttctggcataagtggacagtgatgaacattgagaagagacttgagtatacttacgctcgcagactaaacagacatgagttgcccaggtgactgtcatgaaatctggtgtctgtataagtgacaactttgaaattcccggctcagagtgagggtcccattagagactgacttttaaaaagtttaatattgactttaaagcagaggtccccaatgtttttggcactagggacccattttgtggagagccaagggggatggttttggtatgaaactgttctacttcagatcatcagtcattagattctcataagaagcacgcaacctagatccgttgcatacacagttcacagtagggtttgtgctcctatgagaatctaatgccacc

SEQ ID NO: 2800 - DNA, 6000 bp, Homo sapiens
gagaccccatctctacagaaaaattagcctggcatggtggcatgcgcctgtagtcctggctacttggaggctgaggaaggaggattgtttgagtctaggagttcgaggctgcagtgagttacgattgcaccactgtgctccagcctggatgacagagccagactctgtcaaataaattaatgtatatatgtatgtatatatgtaatgggtgtttattgtagaccatttgaaaaatagcggggcccagcacggtggctcgcgcctgtaatcccagcactttgggaggctgaggcgggcagatcacctgaggttggcagctcgagaccagcctgaccaacgtggagaaaccccgtctctactaaaaaaatacaaaaattagccgtgcgtggtggtgcatgcctgtaatcccacctactcgggaggctgaggcaggagaattgcttgaaccccagaggcagaggctgcagtgagccaagatggcgccactgcactccagcctggccaacaagagcaaaactccatctcaaaaaaaaaaaaaaatttccctgggtggaaacaccataaaccaattgcccacacggacaattgcacgatttcacatgaattctcagcaatatgtttggcctggtgcagtggctcatgcctgtagtcccagcactttgggaggctgaggcaggcggatcacctgaggtcaggagttcaagaccagcctgaccaacatggagaaaccccgtctctataaaaatacaaaattagccaggtgtggtggtgcatgcctataatcccagctactcgggaggctggggcaggagaatcacttgaacctgggaggtggaggttgcagtgagccgagattgtgccattgcactccagcctgggcaacaagagcaaaactcttgtctcaaaaaaaaaaaaaaaaaaaagaaagaaagaaaatatggacaagtatgaaagaagcacacaaaaaagaagtatcccataactctaacattcagaaggaaccactattttagccttttttccccaatttttttttttcttaaacagtcttcattctgttttgtatgaattactgcaatgatttctgagttgttctgctggtttttgatcttccagtttctctcttcctctcccgaaattcatcttggatccaccatccccatttatctttttttttttttttaattcgtatctctgataatacaacttctgggctcaaaaatattcagtgagccacctttgccctctgaccttaacacatataaattgctcaccctgctattcaaggagtttggtgatatgatgcttgcactcttacccactaatctgtgtgctctttagggacaaagaccgtctatctctggcagctaacacaatgccatgcacttggtaggcactcagcaaatatttgttcagtgaatgagttcctcttctactacaatcaagtcagatttggtaattctgtgccatcgatttctcttggaacagcagtttgtaagcaaaatcatccccttgtgctttctcaaaatacacatatccaggcaccatcctagaagactctagttggttaggtgtggcttctggatggttctgatgggcatccccaggtgagaagctcaggtcaagaacaccccttccccatttccacaggttaaacagcaacccacccttattagatatcccacttccaaagtcatctcccctcccttccccagatgtttcaccatgtcccttgtctcagctgttagcagtagggagtggtggggggccatgcgcgtaggggagtcatgtgactcaggctaggccaatcgcactatttccctgagaagttaaactatgtcatggaaggcttgaggcagttcaaaggtggtgggtgctaaaagtcagaaggcctcagggcttgctgctggcagccctgtgtggttatcattgagcagaggaagccaacctgcagggtagagagtggagtcacctatagagggaagcacgaaaggaatatggttctgtgcaggccagcggtgtgtgcctgcccagcctccccgtatttcctctcatatatcctttgtactggagtctctttgcaggatccctccccagaagactgtctttccaggcctgcctcggactcttcctattttgggcagtctctcaggtcttcccgactgcacctgctcacctactcagttgtactgcctcaaggggggcaaggtatatcgggttttatacttaactattccataaatagccatgctgctctaataaccaatacagtgtgtgtgtagggggattaaagttcttgaccagagaaacatttagcaaaagaatgcacaaaacatcaagggaggggcgctcttctccttggaggaggaactgaggtcccacgctgatgggggcagataagcctggaattgaggacttccagctcccagatacttatgtactctccagcccatgctcagatggggctgcagaatggtcccatcaagtcctctatcaggaaataagtgtttctcaaagtgatttctagggcacatatacaattcggctgttaaatgtgtttgtaaaacagtgtagacaagacattagacaatgcagcttgcttatttgtgacttctcaggacctaagacgcaagggtcctttctgaaagttcatggggaattgtgaatggggttgttcccaaacaaatttggcccctgcaccctaggtcaggaagcaagtcccagagctgaggttctatggaattagaaggtggaaaaggccacattaagccctcctttggctttcagcattttttcccccatttcagatagaccgacaggcagacatgtgtcccctgctgtccacatcaggcagggctggtccaccacttcctcttcagggtgacaccttctcacatctcttgctgcaactgtaatgggagagagaaattaagaaatatgtttgagaatgcaagaagcaaaaacacacatggaatgacatattccatgtacaatcacctttggctcacatcccctctttttgaactctgagaaagcaggaggggactggggccggtgaaaataaggtgccacctctacttaatataaagagatttctggctattgtgtgagtgtagctgggggacttgggggtggggttgggggctggggatggaagaggaagatgtaagggggcgacttcgtcctctctaggccagcaagggcttggacaaaggtctctggccttggttcctctggcggagaataagcaccctcaactgacgcgctgatggaggggcaggacctgcattagccggagctacaggaaagcagggtacacattgtctcatcctggctttgttaccacttctaaccctgagaatctctggcgtgagacttcaaagatcatctgacttgtctctgccaccttgtgccttttgcttagtgactttgggtaggtcgcatcaagtgctcagtaatcaaaggggtggggctggatgacctcaggctacccctgggcttccacctcctaattgtctccagatggggagatgccacacaacttggaagtagtaaggtctccggtgagtctgaaaggcacatctttgctgaagacttgtcacctgccctcttgaacctttgttagggggaatgactctcagattggggggggggggtctattttttgagacagaaaaaattttcagaagcctaactggtgtttcccttagtccctccttttggctaggtttaaaagtactgcatgctagaaagctttctccaggtctactcgctgtttttttctgtagttttcagaccgctcacgatgtcctgtccactggctcaggagggggtggcaggaagggtgccctgggcttctcctctgtagaggaaccaaccaatttggctacctgggagtaatgtgcaatcacatttttatttttgtcaccaccagggtgtcctgttggactctctcctctcatcctctcccaaggcggctggttggtgtggctttagcagtgggtgctattatttggaggtgcctagagacttagagtggtggctgcaccatttcgctgggtggcttgcgaattgtcagtctggttcctgagagctcaaactgagatggaaatgagacctgttttctctctaggccggccggggcgttccgcacaacccacttgagaggccccaccggcgtggcctttaggacggtgcctcttgtcttgtaatggccaccggccctccctcgggagacacgcggccacctgggtgggacgctgcggtgcttacctccgggacacgaggtggtcgctgggagagggctcggaaggccctgggggtcctatcaggacgcagcactggggagacgtggaatctcctcttctcacccccacaagcctcgcccgcatcgtaattctttttatttttactttcgagccatgtaaggcatgcagatggggtaggagcgttcccgcgacacgttgccagcagcgcagcgccggcccgctcgtgtggccggagcccggggaggggacagggcacgcgccgcctgacccacctgccccaccgcccacggtcgcggccgccctgggtcgcgggacccgcgccggtcacccccgccccgcggggcccaagaggcgaggccgcgcggcccagccccggcctccgccctggctgagtgctggggcgcgcgaggggcgcgggcagggtccgccccggcgggtcagtgccccgcgccccaggccgctggcggccaggcccacgttttccctttctccggctccctccgccctccgctctgtccctccctccgccctcctccctccccgcgcttcccctcctcctgcctggtcatgtgtcgcctttttttgtttgcagtggaaacaatttctcgccgctcggcgcgccccggcccgacgcgccgcggcggaggcgagcgggaggcgggacggggcggggagagcggcggggccggcgggaggacgcgcggcgcgcccggcggacgccgcaggtcccatgccgcgccgcgacccccgcgcccctgccgcccgcgcccgcggccgccccccgccgcccgccgccccgggctcgccgcgccgcgcccgcgcgtccttagcggggccaccgagcgatgcccgccgggcgcccgcgaaagtttgtcggctcctgctgaagggcagcggcgcccccgcacccccgtgccccgctccggccaggtgagtttgcaccccgctcctgccggctcccgcgtgggctcggggggcacccggggcgggaggcgcgtccgagacggtcctggagactacctcgccgctctgggaagacgagggaccccgcaggtcctggggggagggtcgggtgtggaccccgggagcccccgagccgggaagttgccgggtccgaagagtttcctgccccgacgtgcgtgctgcttcccggtgcctcggtttccgaaaagacgcccgcaaggaacagagttggtattgtctgcggaggacggggtccccgccgttccgggccggggagggggttccgatcaagtggagaccccaagatgagaaacaggctcctaacaaagatcaccccccggccaaactgtgcagacttggcacaggcaacgaacgtctccggagacccccgaggcccgacccccctcatcccggccctgtttgaaaccctccttgggccctggataagttgggggacggcgggcttttattgatttgttttcgaggctcgccgcggtgcggccaataaaaggtttatgacatctgaccggcagtgaaggtatgcgagctcccaattgccctgtatatggggataagagcagtttcccccgttgcccggcaacgccgctgattgacgcggggtgcagccaatcgccactcccgcaggtccccttgaaatgtttttgacaagtacagtagacgagagtgaagcgcgtgcgtgcgcgcgcgcgcgtgctgggtgggcgggggtgacccggccccccaaactcgctactgctcggctctggga

SEQ ID NO: 2801 - DNA, 6000 bp, Homo sapiens
gaggtcatcgtcttcctgaagggccttggagaaaccgctgcccccgtaacactgactcagtccactggagacactaattcctgagctttctggcttcttactgggaggcatgactggacccatttacgtgaaggctcctagtaaagacatcacaaagaaatgatgagctggcgaggcccaaaacagaaaggcagactgtacccctctgatcctgttgcctccctctgccgcctctatggaacccctgctacacaggaacaccaccttgtgactcccacactaagcaacacaatcccacaattccaccacagagagataggctgatgagaaaaatcagcccgccattcatatagcaaggtgacctgatgccccttaaataaaataagaccagtaacaccggccaggcacggtggctcacgcctgtaatcccagcactttgggaggctgaggcgggacgattgcttgagaccaggagaccagttttaaagtacgttaaattttactgtgaattattttttcttccagaacagaagaaaagcaagtaacttcaggtaccacacagaatacatgggaatgtaagataagccattaactgaaattagagctggtgaaaaaagtcaggagagcaactgccagtttcaagacagcaaattcaattcaattcaacaaaacatgccatagaattctatccctccaccccgacccaccaccatccccatttttatcaatgacctagaacacggagtaaaataacatctgatgagaaaagaaaacgaggaggtggtacgtttacaaacagaatgacccctacagacacaaagcatgttcaaccctccagcacccaacgtaacacagaaagaacagtaaagataaccaaaaaggtctcccactctccgtagcgctaaaacaatatgcttggtttaaaactgttaggttttaattccccccacaaacgaacagtaagaaaatcaagcatctacctagaaaacaaatgaacaggctgggcatggtggctcacgcctataatctcaccactttgggaggctgaggcaggaggatcacttgagcccaggggtttgagaccagcctgggcaacatggcgaaaccccatctctatgaaaaatacaaaaattagccgggcatggtggcatgtgcctgtagtcccagctacttgggaggctgagtgggaggactgcttgaacccaagaagctgaggctgcagtgagccatgactgtaccactgcactccagcctgagcaacagagtgagatgctgtctcaaaagttttgaagaaggtaaggaagaagggaagggaatggaagagaagggggaagggaacggaagagaagggggaagggaacggaagagaagggggaagggaagggagaagggaagggaaggaagaagggaaagaagaaggaaaaaaagaagggaagggaaagaagaaaggaagggaaagagaagggaaaaggaagggaagggaggggagaggagaggaggggaagggagggcaagagaagggaagggcagggaagggcagggcagggcagggcaaggggaggaaggaggaagaagcgggagggggaggagaagggggaggaggaggagggatggaggaggaggaggaggaggagaagaaggaggagggatgaatgaacatatttaaaagcaaagacataggccaggcatggtagctcatgcttataatcccatcactttgggagtctgaggcaggaggatcccttgagctcagaagttcaagaccagcctggccaacatggtaaaacgccatctccaccaaaaaaatacaaaaattcgctaggtgtggtggtgtgtgcctgtagtcccagctacttgggaggctgaggtgggaggatcacttgagcccaggaggttgaggctcactgcactccagcctgggcaacagagggagaccctgtctcaaaaaaataaataaataaaattaaaaaggcaaagacatgacccttctatgtctcttaaatgttcattaacaccacatctaaaacaactgccacttcagctgtggaagctctattagggaattctagaaggcataatcctgggcactaacctaccagccaagggtgcctgtgaattatagtaccttccctcttccaaaaggtagaacctgctagacgcaaggcctaagggggagctgtggtgagaggcccaaccggttttttttttttttttttttgagacagagtctcactctgttgcccaggctggagtgcagtggtgcaaaatccgctcactgcaacccctgcctcccaggttcaagagattctcctgcctcagcctcccaagtagctgggactacaggcgtgtgccaccatgactggttaatttttgtatttttagtaagacggggtttcaccatgttggccaggatggtctcaatctcttgatctcgtgatccacccgcctcggcctcccaaagtgctgggattacaggcgtgagccaccgcgcctggccaagatgcccaactcttaaggagagaaaacttcatgaggcattgcagtacagaccaggcaggatgctccagacgtcttgggttcactcacagggaatatttctttctgtcaaataaggaggttaccctgacacatttcagacaaaaaacaagctagcatcttttggcttggggatacaacagagtctggtctgatcctgcttttaacttctttatgaacgaattatagcaccacttgtctttcttaaagtttcctcagatcccatcagaaaattttctgatgaccagcatatgcccacagtagagtataaaacagaactacccagccactgaagtcaactttagctctaaatgaaagttttatgtctcctgagcttccaaacaggaaaattatatcatggctgacagtaaagtaatttaattgcactgttgctatgacaacatgctgctctctttctttttaatttgcttatttgtcagtagcttcccagaggaactaacacgctattctccatgtttccttttgttttaaacaaacactgccagcaatatggttttaggagaaaaagtggcattgtcacgaagagagggttatgggagttcagtacccttggatcatgtgtgcgttttgtgctgggaccccgtactctccaaccactcactgcatccctataaatcccgcattttataccaacagggtgaagagctgctgatcactacagttccatgtaaaaacaaaacaaaacaacaataaccaaaaaaaaaaaaaaaaaaaaaaaaaaacagttcccagaaaccacagctgaggagttttccattattatactctaactacagatttcgccaaatctttttttcctcctgtttcagagggaaaaaaaaagaatctggatcatgtgagttgcagttaagcaaacatttttaatctgctgccaacaaggctgctccaccagatacgcaaatagttattcactggtgacctccttacaacttttctctacacacacacacacacacacacacacacacacacaccctcttttgttttttttatgacttgctgtgttttgttaccctctttattttttaacggagaaaatgcggcaagaaagcttagtttctcgcctagtaaacagaaggtctccaaataactgacaaagacattactggcccagctctgaacagatgttcgatgcgaactttaaaaagttaagaaatcttcccagagccgagcagtagcgagtttggggggccgggtcacccccgcccacccagcacgcgcgcgcgcgcacgcacgcgcttcactctcgtctactgtacttgtcaaaaacatttcaaggggacctgcgggagtggcgattggctgcaccccgcgtcaatcagcggcgttgccgggcaacgggggaaactgctcttatccccatatacagggcaattgggagctcgcataccttcactgccggtcagatgtcataaaccttttattggccgcaccgcggcgagcctcgaaaacaaatcaataaaagcccgccgtcccccaacttatccagggcccaaggagggtttcaaacagggccgggatgaggggggtcgggcctcgggggtctccggagacgttcgttgcctgtgccaagtctgcacagtttggccggggggtgatctttgttaggagcctgtttctcatcttggggtctccacttgatcggaaccccctccccggcccggaacggcggggaccccgtcctccgcagacaataccaactctgttccttgcgggcgtcttttcggaaaccgaggcaccgggaagcagcacgcacgtcggggcaggaaactcttcggacccggcaacttcccggctcgggggctcccggggtccacacccgaccctccccccaggacctgcggggtccctcgtcttcccagagcggcgaggtagtctccaggaccgtctcggacgcgcctcccgccccgggtgccccccgagcccacgcgggagccggcaggagcggggtgcaaactcacctggccggagcggggcacgggggtgcgggggcgccgctgcccttcagcaggagccgacaaactttcgcgggcgcccggcgggcatcgctcggtggccccgctaaggacgcgcgggcgcggcgcggcgagcccggggcggcgggcggcggggggcggccgcgggcgcgggcggcaggggcgcgggggtcgcggcgcggcatgggacctgcggcgtccgccgggcgcgccgcgcgtcctcccgccggccccgccgctctccccgccccgtcccgcctcccgctcgcctccgccgcggcgcgtcgggccggggcgcgccgagcggcgagaaattgtttccactgcaaacaaaaaaaggcgacacatgaccaggcaggaggaggggaagcgcggggagggaggagggcggagggagggacagagcggagggcggagggagccggagaaagggaaaacgtgggcctggccgccagcggcctggggcgcggggcactgacccgccggggcggaccctgcccgcgcccctcgcgcgccccagcactcagccagggcggaggccggggctgggccgcgcggcctcgcctcttgggccccgcggggcgggggtgaccggcgcgggtcccgcgacccagggcggccgcgaccgtgggcggtggggcaggtgggtcaggcggcgcgtgccctgtcccctccccgggctccggccacacgagcgggccggcgctgcgctgctggcaacgtgtcgcgggaacgctcctaccccatctgcatgccttacatggctcgaaagtaaaaataaaaagaattacgatgcgggcgaggcttgtgggggtgagaagaggagattccacgtctccccagtgctgcgtcctgataggacccccagggccttccgagccctctcccagcgaccacctcgtgtcccggaggtaagcaccgcagcgtcccacccaggtggccgcgtgtctcccgagggagggccggtggccattacaagacaagaggcaccgtcctaaaggccacgccggtggggcctctcaagtgggttgtgcggaacgccccggccggcctagagagaaaacaggtctcatttccatctcagtttgagctctcaggaaccagactgacaattcgcaagccacccagcgaaatggtgcagccaccactctaagtctctaggcacctccaaataatagcacccactgctaaagccacaccaaccagccgccttgggagaggatgagaggagagagtccaacaggacaccctggtggtgacaaaaataaaaatgtgattgcacattactcccaggtagccaaattggttggttcctctacagaggagaagcccagggcacccttcctgccaccccctcctgagccagtggacaggacatcgtgagcggtctgaaaactacagaaaaaaacagcgagtagacctggagaaagctttctagcatgcagtacttttaaacctagccaaaagg

SEQ ID NO: 2802 - DNA, 6000 bp, Homo sapiens
gcatctgaactaggataataattacctcctaataagtcaccctgccttctgatatctacaacattttggatcgaaatcatcctccatacactttctagaattatcctggtaaaacacagtcttttacaatgtgatggttaattttatgtgtcagcttgactgggccatggggtgtccacatatttgggtaaccattattctgggtgtgtctgtgagggtgtttttcagataagagtaacatttgaggccaggtgcagtggctcaggtctataatcccagcacttcaggaggccgaagtggccaggagtttgagaccagcctagccaacatggcgtaaccccatctccactaaaaatacaaaaataagccgggcatgagggcacacatctgtaatcccagctacttgggaggctgaggcaagagaatcgcttaaacctgggaggcagaggttgcagtgagccaagatcacgccactgcactccagcctgggtgacagagcaaggctgtctcaaaaaaaaaaaaataataataaattaacatttgaataggtagacgaagaaagcagacacccaccctaatgtgggtgggcctcattcaatcagctgaaggcccaactagaacaaaaggctggccctccctctagtaagagggaccacctcctcctgcctgactgcctcgagctgggacattgctttttttcctgccttcaaactcaactgaaatatcagctcttcctgggtttggagcttgctggccttcagactggaactacaccattggttctccttggcctacagcttgctgggtgcaaatctggggacttgtcagcctccttaatcacatgacccaaatccttataatcaatcccctttttttttctctctctctataataaatacagcctactggttctgtttttctggagaactctgactactacaaataactttttatttattaactttattcattcattaaaaaaatttattgagcacctactatgtaccagtcactgttttatgttcttgtaaattatcattgaatagagcaaagattcctggccctgtagaactttattcagtgtgtgtgtatgtgtgtgtgtgtgtgtgtgtgtgtgtgtgtgtgtgtgtgtggtggaacagataatgaataacaaaaatgataagtaaatagtaatgtattagaaaggggaaagggaagaagggaaaaagcaggatgaggaggagtaagagacattgggaagggaacatttaagcaaaggctaatgggagataaaggggtttcccaagtagaaatcacaatcaagttcaaaccccagtggactctggatcctgctggcatctccagcaggatctgcagacgccccctcaaccgaagccttcactttagcctcgttgctccccaggcagtgcactggcccgcctcgcattttcatcccccgacacctttgcccagtgcctaggatgtcctctccagtggggactttcttctccccactctcatgtgcatctcagtgaagtcacccagaaactaaccccagcagagagccaagaacgtcctcacgctggacagttaacaggaagtggcagtgttacctgagcccagggcctacagtcacctgagagaagcctcagccagatgcagccactgctagagatgccatcagaggcaggagagacatgatgacgttctctggcttctatcttcttttcatcctccactcctccagtgaccctcattggccacatctagccaccaactaactgacccaagcgtctgtgaaactcagcctgccagagacagctcctagcaatacagagcaaagggcaggcctggaatggcttagaagacaactggcccattatcagggcagttggtgtttgaatatagagcaccagtgatctgagcacttgtttggaggttctagcaggggagcgcagctattcatacacccttgaccaaagaccagtcctcctctatcagggacagtcgtcctcttcgatggagtgcgcagcttcaggagggacgcagatggagcggtgaaggagaaaggggacacctgcctagccagccagatcagctgaatcaaccctggagatcaatgggatgacagatgtcgcagccagattgccctcatatccccagtgtcatgattttactgctccactgataccactgcactgcaattgtttgcctgtctgtgggctccatacgataggagtgcttgaaaactttattttttctacccagagcctagaacagtaccttgctcgacatttgctacatacacaattggacgaatggatgaatgaatgaatgaacgacagtttctcctgaccagtacctttctggtgtgctctaactttgagctagaggtgaactgagctcaccaccagcatttcttcccagcttctcatcatttgctactggggctaagattgttttgagcctagcatttgcaacatttgccaggcacatggatggtgtgactatgaagtaattagaccagttttcaacaaagggatcaaatgaatttatcaagtaagttttgcattaatccttccaggaaggtcatacgcattttccaatgatacgaccgtgcctagccccgtccttgtgaacagcacaagaaaaggaatgaatcacttttcagaatgaaatgtttctgttttttttttttttttcagttaaatgtcacccagcccgtcacctggctgatatttaaggacacgtcatcagagaagttacatttccttttggcagagaggaggaggaaggggaccgccacacacagaactgggtggtgactttaccataggtgcaggagggctgagaagggacctatcaaagttccaggggtcaccaggtctggacagagacaccctggatgccactaataggccaccttgtatatgaatttacagagtttttgaggcctttcggtgccgggactgctcatagaaacccaggttcaatttgacaaaacactactcctccatgtgtcaagtggagtcagttcttaatttctgataaagagcaaaaagacatatgggggatgaggcattgctcagcctcagagtttgaagtcttctgccggccaggttgccctgggcagctccaggacagaaatctgaccagtgtgggtgggtcttcctagccatgtttctcattttagcagagactaacatatttccaacaagcctcatatttgcttgctggtaaattgctgctctgagacaggtaagaaatgatgactaaaaaaacctacctgcgtttttgtttcggatgcttcattttccgcagtacttacagagagatagttgggaggccaggtgatgtactcaaaaaacagggcttgttgaaagcggagacaggatgggattccagctgctctgctcaccagccatgtgatttttgaacaagtcactttaccttttgggacctccaatttctcatctgaaaattgcagattattgtatctgctttctcacagaggtgtggtaaagatcgcatgagatgtatgtgcaagtaatttaagattgacaagtgtaacatatgacaactagttcttggcgtggatataaggcatcagagaaggtgcctttgatgtttaattaatactaaaaatcttccattacacttgtttagctaaaattggaaagggggagggcaagaatacttttcaaagggacttttttctgcttcaaaaatagaaatcagaaagcacatatttgattttccttatggtgtaaaccacagtgccattgttattagcagttttacagaattgcgaccttcaaacttggtgatatcaaagactgaaaaaaagctcccagtcttgaagcctttcaaacaggcttttctaactaaagcacttttattttgaattaagggctaatagaattgtcctcttaaatgagcacttgcaagattaaaagttgctttccaggtgggctgcagtaaatgaatgtgccaagaggttgctgaaagcccttttgggggcaaacgaggggaatctgatatgagttcatgtaacaaacacccttttccctttgtgaaagagaaacctggaatttacagtctttctaattgtacatgagctgatttgtgtatacatctaggatcataatttactttcagtttactgaatttgtgaattttcgcatttgttttaatttgtaattaagttctctctatgaggcacgccatatgcctccattaattctttctcgttgatttcttaggagatacatgagtgcatattttcatgcaatttttgaggtcttttgaaaatcaaatgactacatgtttagccatatggggctttgttatttaaaagagcatattataaagtaaaagaaggcgaaatgcaaaagggcctgttgtcaacagggggaaaatattgggaaaaacagtttaaaacattgttttaaacacacacattttcaaccttttttctttttagcgttatatttttgaaatctatctttatcgatcccgtaccgcgtctcaccgtctgtgaacggccaatgtcaccagtgcacccggcaaacctctgtctgccaggtactgcccctacgcttaccctcgggctgcagatcctagcatctgccttctaagagttcagttggagccaatgtctttcttttgaacatcttgtgccaggatttgacattaagctccagttcatccgcacaccccgcggccgctttcgcaagggaccgagagggtggcggcctcgcccggagactcgcggcgctgggagctgcctgccctcggtgcgggctgcagaccgggccgcgaggcgggcgcgcggcgcgcactaggacccagcagggctccaggccggggtgggagccgcgccgccgaccccgggcgggcgccgggcgcaggagccggggttccggccgcgatctgctgcagctcggccgggagacggcgcgacccggcggcggggccacccgcgagtccagcgtcgccgcagccccccaatgcggccgcgagaagcagcgggggggcaggcgatcgaaggtaacgaaaatggggctcatttcctgcctcctaatctgctcgggtttagcattgtcacgagaagccctccgtgttcaggctgctgcattttggggcactctttgattttttttaaaggtgtccgcccccctatttccacctggtttcagattgatttatagcttgcagcccaaatgggaaagatccagccatggcaagttgcttattttcattagttttgtctcaaaagtaagttcattaaaaaaaaaaaaagtttcttaggaatgtgtggatagtcgctttttaaaattttttttaaaaaattgcagacaaatggatatttataaaaataatcaaataattgatgcaattctgttaattacttttagggaagcacacttctgtgggctccccgggcgttacttttattttcaaggaaggaacgtgttaaatgtggagtttgtttggctgggcagagtttacagcattgctgtcgcaactgtttggctatcaattataaacagtgtcaaatctatgggcagtttcagcctcttttcaaatactgtaacgggttatcctgatatgacatctacagatgagtttccactgagggtaataagaagatttctctttttggagaaacattgttttgaggggaaaaccatgattgccggctgggaaggctgaagagactatttttcatgctttgtttatactcccgggatgacatttggggaagggaaatgcaatctttctccggaggttttaattgtgggattattaatttatttaatttattagtttcaattggttgggctcggggagccctccgtcacaggctgtgcttaaggtgacacatttgctagcagttgggacacatgattgcaaatgtaaaatgtgcctcacccgaaaggactggtctgctggaagctcccgtgtggagctgtcgtaggcagggtgcgactggctcattgaggaaaaagggaatcg

SEQ ID NO: 2803 - DNA, 6000 bp, Homo sapiens
tcaaaaatatgcctgagttgcttattacaacctaatacaatttattgggttacaatttagtgcaacagactaataaaattgtgtcttgttgttaaatgtagcagcttaccaacctctttatgacatcaaggctcccgcccagttggaaaagaactgctagtaaacaccaatatcaaacttttactttggataactggtcaccagtaacagaatttacttccctcatagaggctctggtgcccagcatttcagagtgctttgtaatcaagtcatacagttttaagaaatgtagaacctgagagctttccttcaattgtttatcatctgtcttccctgcctgggcagtgcttggtacagcataaatctgaagtcacactttttgtaagtggtactgaaagaatcagaatacaatatagctgtgttgattctgaatcctggcactcaatcagaacggcacagtgtttcctgaagtggaagtgattgggacctgacattatgaaagtacttccctttccattccaatccaaactccctgtttaaatcaagaagaaagttgtagtgttgtagaaatgcttttaatcttgattttgaacaaatagcagggtttgggctcttctgcaggcaccaacaattttgtttaccatcaacagaaggtatcttatggctacgttatatttgaaatagcaaaataaagtttattttatgtaaaagaatgattggattcaaacaaaaatattaagtatatgatagtctatgtgatagcggcaggaggcagacaaatccctaggcagataggggcagggccccagtgaaaccccacctgcaaaccaaagacagtttaaagcctgaaagccaagctacaagtgttgggtaaatccacggaccggattgataacccctcttcccacttggcacactttcctctgatcaatccccacccttcacctactttacatatatctacccttccctaattggttttttacattgtcatgcccacctttgagtggtgcctttgttttagccttttttgcatactcacaaaccatggagcacacactccctcattctgagcccataaaagccccagactcagtcacaccagcgaactgcccaccttggggtcagggcaggggccatccacttggggtcccgtctctgctgagaactgtctcatcactgagtaaaactcacctccgcccttttccccttcggttgtcagcctaacctcattattcttggacgcaggacaagaaattcggaccagctaaacagcgagtgcaaatagagctataaccctgtagcactccgttccgctagtgaagcaatgggagagggagctgctggctgccacacacccccattcattgggctgcagatggtgggactaaaagagctgttaatacatctctatttgcctggtgtctccaagtgtttgggcactactgcatccccctcgtctggacaccagaatctgctaccagagtcacttgccatacacccaggccatccacaagccctacatggagcctgtgactgggccagcacttggaacagccagccgggcctccaggcttgctcactcactcacaaaccgactcctcgcgggctgagcatgcagtcatagtggccacgggatctgggcggggatgaaagacaaatgcattctgccaggctgagtgggcagggcacctcctgcagccagcccagggctggaggtctccagctggcaaagcggccctgaaataaatcctgtgtcatgtgttaagagaataaagcaaactggggagaaggcaggtgagtgtgagtgaaatttggcaaacactgcactaacatgaaaaatctaagaaatcttcccaccaaatgctagctcaggacactgttagcacttttattaaggactttaaaacatgttgtggatataaaagggtactccatttagagctactagtgtttcctcactccccactatatgagacccagctggggcatttctctttcacctccagctgctccttctcattgagcttaaagaccatcagctgggcctggaggccatgctcctcaattgagttcctgtgtggccagtaataggcaaacatggtcccttgtctcaaacccggccatgactagggagtaaatgtgcacttgggcaggttagttaactgctgagcctcagttttttagtctgtgaaatggatatcatgcttaccccctggagttcattcattcaataacttactgggcagctattatgtaccaaaaactgggaatgaggcgttaacaatatagtttctaccctagcagagctaatttcagggcagaagagacagacccacacataaaaattttaatagccaagatgagttagacattcattacattttataagtatgagacagaaaaataggggtgacctttggaatatacttaaaaagtaacatataaatgagacccagagggccaaaaggaacctgctgtctaaatgatggggtgaagagcattcccaagtagagggaacccagccggcagaggtgggaaagaggtcataagaaaggacttaggcaaggcaggcagtggtccgaagcgggtgaggggagaagacttgttaaagaaattggattttatgcaatgatcaatgggaccccactgagggctttaagaaggggagtccgatttacatttatttttttgagacagagtctcgctctgccgctcaggctggagcgcaatggcgcaatctcggctcactccaacctctctgcctcccaggttcaagcaattctcctaccttagcctcccgaggagctaggattacaggcatccaccatcacgctcggctaatttttctatttttgtagagacggggtttcaccatgttgcccgggctgatctcaaactcctaacctcaagtgattcagccgcctcggcctcccaaagtgctaggatgacaggcgtgagtcaccgcgcccggccttcgatttgcctttttaatacagctgtgtgctccaactctgcggagaatgggttgaagacaaaggaagtgagagggctcttgctgaaggcgttggggacggagcagattcagaacgtgaggaagtgacggcagcagctgctaaccttactgcgtgctcatttggggccggccaggcacgattcgaagcgcctcaccaagtgtaaactcgcttcaccctcaggacaactctatactacgtaccgtgaccgtcctcctatactgggaaaccgagcacagaaagcttaagcgcctggcacgtggtgggcgctttcctactcactttctgggaccacgcacctgtaagcttaggtctgggaataaaaacccgagcaggggcccctagcgccgcgccccggcaggacacaggtctccgcagcgcccgtgcgcgccccctgaggcgctgtgatcggaggaaaccgaggccccggggccgaggcgaccctgccccatcttcccggccgcgccgcttcctcgcggtccgcctccagccctgccggaccccagcagcccgcgcaccgcgactcggccaggagcaggatcccgggcccgaccgcagcccgcgagagaccgcaccgagtccgcgcccactgccgcccaacacgtacctgaggcgcacagaaccaacgcttgcctcggatcccgccccttcggcggccgccgcgcatgcgcgcagttcaaaccctggcggcagcggcttgtgcctcgaggcccggccccttccccttccggagagcccaccgctgggtcctaaagcccgccgggtgtttacccaggacggggctggggaaacctggtctctcctagctcttggcttacttcctggagacttcttaaaacgagaggagaaccagaaaggcgtcccctaacttcgctctagttaactaatagcaagactcaccctctttacaggattctcatggctcaggctcccagggctccatgcagcggcgtttggtttaaagtggagagaggatacgcttaggttaaaggcagctgcaaggagacctgtgtcctgggaggggctgggtgcagactttgaaatctgctgcaaaataaaaagttaaatgagttcccattggactcagaacctcgaatgtctgttccttcttcgcaacagttgcgttctcgtaaaatcttctgagaaaaggaactcgccccacgttccttgcctttaataaggatgtttgctgtgggatttgggctcggtgctgtttatggtatttattcttggaatctctttcacactaggcatctcttccagaggactgagtgaaatacatctgtgtaaatataacggctcgtttcgttctttcattgaagatctactttgtgccaggcacagtgctaggtgctgggattatcttgaggacataacagatgtagtagctgccctaggagctcgatcccaatgacttgctgatctgaacgagaatcctggacttggctcttttcgtttggttcttcttgtttgttcacagtctttttgtctcctataacgtttagcatagtgtcatagatctaaatgattaaaagtaacctattgcaagatggagggagagaatgaaataaatcatgaaccaggcattgaaccagcacctagaagcgcttggatttccagccgcgctcaacgagttaagggacagtcagggggtggagccaagtgctgggggcaggcctgggcgcctcactgccagggcggctccaaggaaacgtaattaaacaaagactctggccaatagccctgcgggattaacgcgagtggctggcaggttgtccaatgggaggagacgtcggagttgcgcggtgaagttcggcttcctgagccgcggtgggcgtggccgcggtaggctgccagccaggctgggaaagcggtggtagctggttgggttgctggggctcggttgttgtagtcgcgatgttcttctccgaggccagagccaggtcgcggacgtgggaagccagtccctcggaacacaggaagtgggtggaagtaggtttccggagggcgactgagcctcggacttcagcttggcctgggcctctcgcttcctctcccgtgtctgggtctcactctgccgggtgtgcagataagacctgggctgcctgtccaaagggtcgtggttaatgactgatcctggagctgcagggctcctggctccccgtccaggactacggctacctccaagttccatctcctttctctctatatagtctattaatggtaaccttgagtctgcatctctcccgcctttcaaagccagcccctttgcctcaccttcctaactccaggactgaattttgggtagaatttatctcagtggcctaaatgaattaatttgcgtcacctagcggttaactcgtttgcactttgagggaaatttcagcccatgtttaagaaaatttcagtccatctttaagatttcttgagaattaatattgggataatgaaattctattttcatactctaccgctgggccaagttttagattttcgaggtccaaactgtataataaactagtaataaaaataaaccatttctgtctcattaactaaagctatttaatgttcttcaggtatttaaagcatgtgatgaagatcacaaaggatatctcagcagagaggactttaaaactgctgttgtaatgctgtttgggtacaagccctccaaggtagagctttcttatatatttggggatggggtagacgatcaaaggtgaatggatcctaagaaaagttcacagggctagcttaggatgtttataaattgctttataagcaatttcagagatgtgtccagtgctgaattttagcttcctcttaacacctcagcccagagatgaagtagaaatcttttccactggagtctacacaagcctatctcaccaccaggctgctaataactactataaatacaagatgctagagaggtgccaagagggaagactgagaggggagtgttggtaacaggagaaatttacatagg

SEQ ID NO: 2804 - DNA, 6000 bp, Homo sapiens
acaacatgcgaaaaacccgcccccatgattcagttaccttccaccaggtcccttccacaacacataggaatttgagatgagactgatgtagggacacagccaagccatctcagtgtctaaataaggtactaaaaattaatattaactttcatattaccagaagtatttggatttattgaagacatcacagaatccacttctatctagaaaagaggaaaaaataatagaacatgtaattttatcacgttttcacagtgcaagttcttaattcttcaggtgggaataaggatctattttatgagaaaccaagtctgttgaaccaagcagacaagtaatgatacacaatagctataatagtcattttatttttccatcaacatctataaaatagcagacactaatctgctagtccctaatagcccccaaaactttattccattgaccaaaacagtttaagaacagaaaatcaatttggctgtcccatatataatataatctaacaggcaggcagcctttctactttagacaaatacaactgttataatgggctctatggctctatttttaagatttttttcctaattataaaagtatcacatgattgatgtagaaagcatgaaaaatacaaaaaattatgaagaaaattaaaaaatcagccatccaatgaaaatcattgttatcattttagactaatcagcttttttcccctatgcatctttaaacatttgagactttactgtatagaaaatatgaggacctgctttcactaaatgttaaaatataagccctttaccacactgttacaagggctttataaacgttatagtattagagccttcgcagcatctgacataatttctccacttctggtctcgaacccttcccagtatttcctgcattttcctggttcctcttgttcctgccaaatggttcccactcccacttcttcaagtcccctcctacccttaaatgcttgtattccctaacgttctatcctcagaccatggctcttcctattctgcatactcttcctgggcaatgccatccagcctcgtgttttgagcaaccacatggaaaccaaggagccccaagtctatctccagccctatcccctccacccaatttcagattgctacatctcagggaagcagtaaaatctaacggtggattttcaccaccataacctcaatagccagcatattatttaacgagtgaatgcacctggaatgctcatagctgcctcaaactcaatgtgttccaatcgaaactcactgacttcctctgaacctactcttaaattttctcttaattggtggcattgctatcccttcagtcccagtggtcatgtcactcttaccaccaccacatccaatcagtcatcagggcctaacttgtcccaccacccacaaagtgttcctagatacttatcagagtagtctatcttctctagtctaaatgaccacccagactgttatagttaccactagaattaggccttccttctttgctcccttcactttgtttttcaatctcttctctttcttggtatctatcacagttttatgtctttctatattaaactctgaactgcttcgaagtagagactgtgtttcattcatctttatatcactagcaactagcaagtactccttttattaaatagaaacaataaatttcattgtgtatgggtgggcacagtagcttatgcctgtaatcccagcactttgggaggctgaggtgggcggatcacttgaggtcaggagttggagaccagactggccaacattggtgaaaccccatctctactaaaaacacaaaaaaaaaaaaagaaaaaaaagaaccgggtatggtcgtgtgcacctgtagtcccagctactcaagaggatgaggcaggagaattgcttgaacctggaaagtggaggttgcagtgagcctagatcacgccactacactctagcctgggtgacagagcaagactgcatctcaacaaataaataaacttaattatgtaaaaaactgcatgaatgtataagtgatttattatataagtattttattgcttcatgacctgcagtcagtgaatatttcatttgctcaaaagcaatattaaaaaattaaaccccaaacctcaacctagtctaaaaaaatctgttgaatttcacagaaattaagtgtcacctgcataataaaagttcattgtacaaatgactaagtttataggtgacatgctattagtaaataccgtttagtgacctgcggttactaaatagttcatttgcttaaaaaataaaatagaaaacctcacctcaatatgaaaagtaaaatctgttaaatttcatggagtgtatgtacagtatgttacatcactgtatctgtcattaaattcctcattctaaaattgaaaccaaatagactcaagggtgataaaggcaaaaatgagacaagatacctttccaggtgaatccaagttaaatacaatgcttcacaggctgactcttttcagctgacctgctttgtaattccaactgaaatgattacaggtaaacaggagagctgccatttctaagagtcagccctgactacttctctgagctccataataagcttctcagtaactaggcagcccctcatagctgagccactctgaacccacctgagctgttcatgcaacctacttgggtcaagagaatatattaatacttattgtgcatcacaacttcacagtaagtatgttctgttgacacaaatagggcggagaggcatgacatcacagggtccctggctttgctgggctttcaatctgacagaaaggcacagtccactcatgaggagaacagctgggccctaattaactgccaagctgtctggtctaatgagagtgagggatggcattccaggctgagctctgagtgcttcctttgcttgatggtggcagctcaatttcttgaatctggacaatatcttgactctgactaattccagcttaacaagaagggtgttgtctctcgaatgaatgtaacaggaaagcagaaaagcataaagacaggggtgagcaggaaacttgccctactcaagcaggaggttcatggaggctcagctcaactctcattattggtgaattggtgcaatcttttctggagagcaaatatctaacaaaattttaaacgtacatattccatgacctagcagttatacttctaggaacttattccacagatatacagccacaaggacataaatgtgtgtatcattgcagcaatgttggcagaaaaaaaaaaaaaaccccacctatataaccccagacaggaacctggctaaaaagaatatgcaaccatattttaaaatgcagtagtggtgtgtgcttttaggttgatatattgttaaatgagaaaagcaagttaaagtaggcacaatatttacccatttatgttttcaataaaagactatgcatatgtatgtcatggatagaaaatttcagaattacacaaaaaaactgttaatggtaatcccctaggagtgggaccctctggtaggcggcgagcggattttatgctcaactttatacctttctgcactgttttaattttttgaccgtggatgtattttataaacaaagcaacaaaagtaaaacgagaaagagactatgtcatgtcctatgtaaatttctcctgttaccaacactcccctctcagtcttccctcttggcacctctctagcatcttgtatttatagtagttattagcagcctggtggtgagataggcttgtgtagactccagtggaaaagatttctacttcatctctgggctgaggtgttaagaggaagctaaaattcagcactggacacatctctgaaattgcttataaagcaatttataaacatcctaagctagccctgtgaacttttcttaggatccattcacctttgatcgtctaccccatccccaaatatataagaaagctctaccttggagggcttgtacccaaacagcattacaacagcagttttaaagtcctctctgctgagatatcctttgtgatcttcatcacatgctttaaatacctgaagaacattaaatagctttagttaatgagacagaaatggtttatttttattactagtttattatacagtttggacctcgaaaatctaaaacttggcccagcggtagagtatgaaaatagaatttcattatcccaatattaattctcaagaaatcttaaagatggactgaaattttcttaaacatgggctgaaatttccctcaaagtgcaaacgagttaaccgctaggtgacgcaaattaattcatttaggccactgagataaattctacccaaaattcagtcctggagttaggaaggtgaggcaaaggggctggctttgaaaggcgggagagatgcagactcaaggttaccattaatagactatatagagagaaaggagatggaacttggaggtagccgtagtcctggacggggagccaggagccctgcagctccaggatcagtcattaaccacgaccctttggacaggcagcccaggtcttatctgcacacccggcagagtgagacccagacacgggagaggaagcgagaggcccaggccaagctgaagtccgaggctcagtcgccctccggaaacctacttccacccacttcctgtgttccgagggactggcttcccacgtccgcgacctggctctggcctcggagaagaacatcgcgactacaacaaccgagccccagcaacccaaccagctaccaccgctttcccagcctggctggcagcctaccgcggccacgcccaccgcggctcaggaagccgaacttcaccgcgcaactccgacgtctcctcccattggacaacctgccagccactcgcgttaatcccgcagggctattggccagagtctttgtttaattacgtttccttggagccgccctggcagtgaggcgcccaggcctgcccccagcacttggctccaccccctgactgtcccttaactcgttgagcgcggctggaaatccaagcgcttctaggtgctggttcaatgcctggttcatgatttatttcattctctccctccatcttgcaataggttacttttaatcatttagatctatgacactatgctaaacgttataggagacaaaaagactgtgaacaaacaagaagaaccaaacgaaaagagccaagtccaggattctcgttcagatcagcaagtcattgggatcgagctcctagggcagctactacatctgttatgtcctcaagataatcccagcacctagcactgtgcctggcacaaagtagatcttcaatgaaagaacgaaacgagccgttatatttacacagatgtatttcactcagtcctctggaagagatgcctagtgtgaaagagattccaagaataaataccataaacagcaccgagcccaaatcccacagcaaacatccttattaaaggcaaggaacgtggggcgagttccttttctcagaagattttacgagaacgcaactgttgcgaagaaggaacagacattcgaggttctgagtccaatgggaactcatttaactttttattttgcagcagatttcaaagtctgcacccagcccctcccaggacacaggtctccttgcagctgcctttaacctaagcgtatcctctctccactttaaaccaaacgccgctgcatggagccctgggagcctgagccatgagaatcctgtaaagagggtgagtcttgctattagttaactagagcgaagttaggggacgcctttctggttctcctctcgttttaagaagtctccaggaagtaagccaagagctaggagagaccaggtttccccagccccgtcctgggtaaacacccggcgggctttaggacccagcggtgggctctccggaaggggaaggggccgggcctcgaggcacaagccgctgccgccagggtttgaactgcgcgcatgcgcggcggccgccgaaggggcgggat

SEQ ID NO: 2805 - DNA, 6000 bp, Homo sapiens
cgtgttttgagcaaccacatggaaaccaaggagccccaagtctatctccagccctatcccctccacccaatttcagattgctacatctcagggaagcagtaaaatctaacggtggattttcaccaccataacctcaatagccagcatattatttaacgagtgaatgcacctggaatgctcatagctgcctcaaactcaatgtgttccaatcgaaactcactgacttcctctgaacctactcttaaattttctcttaattggtggcattgctatcccttcagtcccagtggtcatgtcactcttaccaccaccacatccaatcagtcatcagggcctaacttgtcccaccacccacaaagtgttcctagatacttatcagagtagtctatcttctctagtctaaatgaccacccagactgttatagttaccactagaattaggccttccttctttgctcccttcactttgtttttcaatctcttctctttcttggtatctatcacagttttatgtctttctatattaaactctgaactgcttcgaagtagagactgtgtttcattcatctttatatcactagcaactagcaagtactccttttattaaatagaaacaataaatttcattgtgtatgggtgggcacagtagcttatgcctgtaatcccagcactttgggaggctgaggtgggcggatcacttgaggtcaggagttggagaccagactggccaacattggtgaaaccccatctctactaaaaacacaaaaaaaaaaaaagaaaaaaaagaaccgggtatggtcgtgtgcacctgtagtcccagctactcaagaggatgaggcaggagaattgcttgaacctggaaagtggaggttgcagtgagcctagatcacgccactacactctagcctgggtgacagagcaagactgcatctcaacaaataaataaacttaattatgtaaaaaactgcatgaatgtataagtgatttattatataagtattttattgcttcatgacctgcagtcagtgaatatttcatttgctcaaaagcaatattaaaaaattaaaccccaaacctcaacctagtctaaaaaaatctgttgaatttcacagaaattaagtgtcacctgcataataaaagttcattgtacaaatgactaagtttataggtgacatgctattagtaaataccgtttagtgacctgcggttactaaatagttcatttgcttaaaaaataaaatagaaaacctcacctcaatatgaaaagtaaaatctgttaaatttcatggagtgtatgtacagtatgttacatcactgtatctgtcattaaattcctcattctaaaattgaaaccaaatagactcaagggtgataaaggcaaaaatgagacaagatacctttccaggtgaatccaagttaaatacaatgcttcacaggctgactcttttcagctgacctgctttgtaattccaactgaaatgattacaggtaaacaggagagctgccatttctaagagtcagccctgactacttctctgagctccataataagcttctcagtaactaggcagcccctcatagctgagccactctgaacccacctgagctgttcatgcaacctacttgggtcaagagaatatattaatacttattgtgcatcacaacttcacagtaagtatgttctgttgacacaaatagggcggagaggcatgacatcacagggtccctggctttgctgggctttcaatctgacagaaaggcacagtccactcatgaggagaacagctgggccctaattaactgccaagctgtctggtctaatgagagtgagggatggcattccaggctgagctctgagtgcttcctttgcttgatggtggcagctcaatttcttgaatctggacaatatcttgactctgactaattccagcttaacaagaagggtgttgtctctcgaatgaatgtaacaggaaagcagaaaagcataaagacaggggtgagcaggaaacttgccctactcaagcaggaggttcatggaggctcagctcaactctcattattggtgaattggtgcaatcttttctggagagcaaatatctaacaaaattttaaacgtacatattccatgacctagcagttatacttctaggaacttattccacagatatacagccacaaggacataaatgtgtgtatcattgcagcaatgttggcagaaaaaaaaaaaaaaccccacctatataaccccagacaggaacctggctaaaaagaatatgcaaccatattttaaaatgcagtagtggtgtgtgcttttaggttgatatattgttaaatgagaaaagcaagttaaagtaggcacaatatttacccatttatgttttcaataaaagactatgcatatgtatgtcatggatagaaaatttcagaattacacaaaaaaactgttaatggtaatcccctaggagtgggaccctctggtaggcggcgagcggattttatgctcaactttatacctttctgcactgttttaattttttgaccgtggatgtattttataaacaaagcaacaaaagtaaaacgagaaagagactatgtcatgtcctatgtaaatttctcctgttaccaacactcccctctcagtcttccctcttggcacctctctagcatcttgtatttatagtagttattagcagcctggtggtgagataggcttgtgtagactccagtggaaaagatttctacttcatctctgggctgaggtgttaagaggaagctaaaattcagcactggacacatctctgaaattgcttataaagcaatttataaacatcctaagctagccctgtgaacttttcttaggatccattcacctttgatcgtctaccccatccccaaatatataagaaagctctaccttggagggcttgtacccaaacagcattacaacagcagttttaaagtcctctctgctgagatatcctttgtgatcttcatcacatgctttaaatacctgaagaacattaaatagctttagttaatgagacagaaatggtttatttttattactagtttattatacagtttggacctcgaaaatctaaaacttggcccagcggtagagtatgaaaatagaatttcattatcccaatattaattctcaagaaatcttaaagatggactgaaattttcttaaacatgggctgaaatttccctcaaagtgcaaacgagttaaccgctaggtgacgcaaattaattcatttaggccactgagataaattctacccaaaattcagtcctggagttaggaaggtgaggcaaaggggctggctttgaaaggcgggagagatgcagactcaaggttaccattaatagactatatagagagaaaggagatggaacttggaggtagccgtagtcctggacggggagccaggagccctgcagctccaggatcagtcattaaccacgaccctttggacaggcagcccaggtcttatctgcacacccggcagagtgagacccagacacgggagaggaagcgagaggcccaggccaagctgaagtccgaggctcagtcgccctccggaaacctacttccacccacttcctgtgttccgagggactggcttcccacgtccgcgacctggctctggcctcggagaagaacatcgcgactacaacaaccgagccccagcaacccaaccagctaccaccgctttcccagcctggctggcagcctaccgcggccacgcccaccgcggctcaggaagccgaacttcaccgcgcaactccgacgtctcctcccattggacaacctgccagccactcgcgttaatcccgcagggctattggccagagtctttgtttaattacgtttccttggagccgccctggcagtgaggcgcccaggcctgcccccagcacttggctccaccccctgactgtcccttaactcgttgagcgcggctggaaatccaagcgcttctaggtgctggttcaatgcctggttcatgatttatttcattctctccctccatcttgcaataggttacttttaatcatttagatctatgacactatgctaaacgttataggagacaaaaagactgtgaacaaacaagaagaaccaaacgaaaagagccaagtccaggattctcgttcagatcagcaagtcattgggatcgagctcctagggcagctactacatctgttatgtcctcaagataatcccagcacctagcactgtgcctggcacaaagtagatcttcaatgaaagaacgaaacgagccgttatatttacacagatgtatttcactcagtcctctggaagagatgcctagtgtgaaagagattccaagaataaataccataaacagcaccgagcccaaatcccacagcaaacatccttattaaaggcaaggaacgtggggcgagttccttttctcagaagattttacgagaacgcaactgttgcgaagaaggaacagacattcgaggttctgagtccaatgggaactcatttaactttttattttgcagcagatttcaaagtctgcacccagcccctcccaggacacaggtctccttgcagctgcctttaacctaagcgtatcctctctccactttaaaccaaacgccgctgcatggagccctgggagcctgagccatgagaatcctgtaaagagggtgagtcttgctattagttaactagagcgaagttaggggacgcctttctggttctcctctcgttttaagaagtctccaggaagtaagccaagagctaggagagaccaggtttccccagccccgtcctgggtaaacacccggcgggctttaggacccagcggtgggctctccggaaggggaaggggccgggcctcgaggcacaagccgctgccgccagggtttgaactgcgcgcatgcgcggcggccgccgaaggggcgggatccgaggcaagcgttggttctgtgcgcctcaggtacgtgttgggcggcagtgggcgcggactcggtgcggtctctcgcgggctgcggtcgggcccgggatcctgctcctggccgagtcgcggtgcgcgggctgctggggtccggcagggctggaggcggaccgcgaggaagcggcgcggccgggaagatggggcagggtcgcctcggccccggggcctcggtttcctccgatcacagcgcctcagggggcgcgcacgggcgctgcggagacctgtgtcctgccggggcgcggcgctaggggcccctgctcgggtttttattcccagacctaagcttacaggtgcgtggtcccagaaagtgagtaggaaagcgcccaccacgtgccaggcgcttaagctttctgtgctcggtttcccagtataggaggacggtcacggtacgtagtatagagttgtcctgagggtgaagcgagtttacacttggtgaggcgcttcgaatcgtgcctggccggccccaaatgagcacgcagtaaggttagcagctgctgccgtcacttcctcacgttctgaatctgctccgtccccaacgccttcagcaagagccctctcacttcctttgtcttcaacccattctccgcagagttggagcacacagctgtattaaaaaggcaaatcgaaggccgggcgcggtgactcacgcctgtcatcctagcactttgggaggccgaggcggctgaatcacttgaggttaggagtttgagatcagcccgggcaacatggtgaaaccccgtctctacaaaaatagaaaaattagccgagcgtgatggtggatgcctgtaatcctagctcctcgggaggctaaggtaggagaattgcttgaacctgggaggcagagaggttggagtgagccgagattgcgccattgcgctccagcctgagcggcagagcgagactctgtctcaaaaaaataaatgtaaatcggactccccttcttaaagccctcagtggggtcccattgatcattgcataaaatccaatttctttaacaagtctt

SEQ ID NO: 2806 - DNA, 6000 bp, Homo sapiens
catggtgaaaccctgtctctactaaaaatacaaaaaaattagccgggcatggtggagggcgcctgtagtcccagctacttgggaggctgaggcaggagaatggcgtgaaccctggatgcggaggttgcagtgagctgagatcacgccactgcactccagcctgggcgagagagtgagactctgtctcaaaaaaaaaaaaaaaagaagagtaagattcctctgcccctcaaaagctgatagttcagtagtatataaagtaatacttccagtatgatgtaatggtgctgtaatgtaggcatgctcaaggtgtagcggtggcacaaaatacttttccttagtgaactttccagaagtaaaaggaagaagctagtatgactagagtctggagtgactggggcagagagaatttggggagaacagaacaggacaggtggttggtccagatcacagagcttttcaggccagcaataggatggcaataggaagtcactgaaggattttttttttttttttttttttttgaggcagagtctcactctgttgcccaggctggagtgcactgttgcgatctcatctcactgcaacctctgccgcccaggttcaagcaattctgcctcagcttcccaagtagctgggattacaggtgcccaccacaacacccggctaatttttgtatttttagtagagatggggtttcaccatgttggataggctggtcttgaactcctgacctcaggtgatccacccgcctcggcctcccaaagtactgggattacaggcatgagccattgcacccggccatcactgaaggattttgaagtcagagttgtgtaatcatttaagaatccctgccaatgtaagtcccctgaaggtgggactgtttgtgtttttcatggttatagtcccagggcctgatatgcagttattcttgttaaacaaaagaaaatcttgtgagatttgcatttttggaagatcactgacagcaccatgaattagacatattgagactggaatcagaagaccaattcaaagatccttggactagagtacacaagataccaagagggcttgaactaagtagtagcaatgaagacaagggcaagagagagttaggagtggatttatagcatttgaggactgattggaataaggggtgacgtggagaagttgtgggaagagaataaaaaatgattcccagatacttggtgctatgatctgaatgtttgtatctttccaaaattcatttgttgaaatgtagtctccagtgtgttggtttaacagatggggcctttgggagatgattagatcataaggccaagccttgtgactgagattagtgcccttatgcagagaggaagcttgtttgccccttttccccttccaccatgtgaggacaaaaaaatgcaccatctatgaggaatgggccctcaccagacactaaatccgttagagccttgatcttggacttcctagcctgtaaatttattacagatctgtaataaacttctgtttataaattactctaagatatcttgttaaagcgccccaaaaagactaagaccttcgacttcattaattcatttgaaagacatcaactacaatttaaaaaaacaaaacaaaaacagaaaaggtggtttgcaatttttttcacttcatgagactataatttatttccctgggtaggccacacaaatccttaagaacatggactttcccccatacaaggctgtgaaccgtgcacacagagatgctcgataaatggtaccgaatcctctccttcagcacctggtcctctctggcagtctccattctcttacctctcactgccccctctacttctctgaacctgcagtccccaaagtcaccaatggtctccatagcaacaaaatttagtgggctcttatacgaccttatattgcttgacttcttggcagcaactgacactgactaccccttgaagcatcccctgcccaggccttccacaatgtcacactctcttgcttctcctccctcctccttggttattgcttctcctatcctcacggctcagctctagccctcttctcaatcacttccttttccctaaaatgattttattcactcctatggtttcagttacttttttttttttttttttttgagacacagtttcactctgttgtccaggctggagtgcaatagcacgatcttggctcactgcaacctctacctcccggttcaagtgattctcctgcctcagcctcctgagtagctgggattataggcatgagccaccacgcccggctaatttttgtatttttgtagagatgaggtttcaccatgttggccagcctggtcttgaactcctggcctcaagagatctgcctgcctcagcctcccaaagtgctgggattacaggcatgcaccaccacaatggccttagctatctgttttttaatgacaattcctcattgagttcaaagcagcctcctgaacttcagactcggtatccaaccattactcaacataattactcaaatgtccatagatatttcaaattcagtatctccaaaatgtaaactctatcttattctcttcccaaaaccttgctgctcctcccatgtttctgctctcaataccactcctgccacagtggctgcccaggtcacaaacccagaagtcaccttcacatttctgtctcctaccttccccaatccctcattgtggtaggagttattaagaaattattttaggcagatagagaggaaaaggggtccttgaaaagtttttgtctcttttgaagcagctcctgagacgtttcctgtctagcataaaagccctgacttttagacccgagctggcaacgtttgatatgcaaatgccggcagttagaaactgggtccaccaacacggtgattcccaccatcgtcctcttgcccttgttctcacaagtgcctggcaacatggccacccccacatatccccacatgagtagaacatcatagcgccctgcatttgcatattaaaaggctagggtggaatggccagttttattagggggctacatgaatgacatgcgtggtcaaaccagtcccctgagccctatgcaaatcagacaccgcctcctgcatcctcctcctataactggctggtatctcccacgcactctgggtctcctctctcagctttggagcacccatccctctgtctctgtacaggggagctgcttctttctttcttctcccttccttcttgcttattaaactctccgctccttaaaaccactccacgtttgtccatgtcgttttatgtaattcgactcaagacgaaaaaggctagtattcctccactcggtatcatcaccacattctgttgagtctctttacgtccaaagaatctctcaaaatgggctatttccatctttaagacactctcttaaaccaccatcgtctctcccaagattccttcaacagcaactgcttttttctgcagccagtgatctttctaaaaggcaaacatgaccacatgtcttcttttaaaatatttatatagctccccacatcctttaaaaggtacactttggccaggtgcggtggctcacgcctgtaattccaggactttgggaggccaaggcaggtggatcacctgaggctgggggttcgagaccagcctggccaacatggtacaacctcttctctactaagaatacaaaaatagttggacttcgtggtgcacgcctgtaatcccagctgtttgggaggctgaggcaagagaatcacttgaacccaggaagcagaagttgcagtgagcggggagattgtgccactgcactccagcctgggggacagagagagggccgtctcaaaaaaaaaaaaaaaaaaagtacaccttaatctggtttcaaggtgcaagatctgcacctatccttccatttaagtttcatcaaaccgctgctacctccccgtctcccacacaatttatgggacttctaagttccctctaaagggtccgaacacctacactggtaacaagccacctggatttgaatcctggcaagacaacttactatctgaccttggacattgtgctgttcttaacctctccgtgcctcggtttcctcatgtgtatgaataacatcaacacctacatcaaagtttgctgtattaaatttgataatatatgcaaagcatttagaaaagtgcctagctcatagaaagccttatgtaaatattaactatcattttttttcttttttggggtggtgggggaggggtttcgcttttgttgcccaggctggcgtgcaatggcacgatctcggctcaccacaacctcggcctcccgggttcaagcgattctcctgcctcagcctcccgagtacctgggattacaggcatgcaccaccacgcccgggtaattttgtatttttagtggagacggggtttctccatgttggtcaggctgatctcaaactcccgacctcaggtgatccgcccgcctcggcctcccaaagtgctgggattacaagcgtgaagcacctcgcccggcctagctatcatttttatacaagtgctgggttttgggagaatgtaatgatggcttttttcttactaaactttcagtgcaggaggaggagaaagaaagtaaatagttatatgaacacagtagaaagtcaaagtggaaaacaaaaagaacatagaacccaggtgagcggtccagacctccccccagaaacctaagaatccatagaaatgggtgggaagcggagaagatcctccagacagcaggtggcgatgtagcatcccccagaaggcccgctaacagaagctaggaggacgcgctaccaaggtcacgtgtccccggcgttcactcgctcttcgcttcacgacactcgcatcctcacgggtgattggtctgcgtgcggcacgtgggcggggtaccggggcgggccggggaggggcggggtgggcggaggagaggggcagggggcggagctggagggggtggttcggcgtgggggccgttggctccagacaaataaacatggagtccatcttccacgagaaagtgagtgtccgcgttcggtggggagctgtctgccgcgcggtggcgggcgtggagcgcggcatcaccgcctctcggagggctgggtggggcccgagtcgcccccatgccgatctcgcccggcgaggggcgacgccgcagcctcccgcctcctcggctcgaggaggggagcatcacctacgcccctacttcccccgcggcccccgccctgggagccgggagggagtatgggcggggccgggggcgtctcgggacacgggagtggggtggcgcccagtgggtttgcttctgcctttctccgtcactttccatcgcttttcggaggattccttcacccctccccaatccttccctctccctagggtctagctagagtcatctctgggacacctccctcaacccctcctaccctaatcctggcagaattaacttttcctcctccggactgctcaattctatattggagtcttccctacacgtagatctttggggtcttgttcgtgtctttcccctgcactaggtccgcgagcctcccgagggaggagaccttggctcgcccactgtagggcctgacatttaggaagtgaagtaggaaacccggcgtgcccctaaacagggaagtcgtcacaagagtttttattacgggatgtttgggtttggtttcttttggtactcccatctttccggagcaggcggccagctttgtttttaggtattaggagtggactgggatgattttgttgtagtctgcctagcctgctgtccctttaactcttccgtgaccatgcacttgaagatactgtttgtgatatgtaaagaaactcctcgtttctctcatactattatccagccatttgtgtgtgagtgaagccttccccaggacagctttggcacatggtatcatgtttcataatagtttcgtgtttggaaagagttgctggtaaggctgttatttaatag

SEQ ID NO: 2807 - DNA, 6000 bp, Homo sapiens
ggggctcccacagtcaactaattctcagccccccaagaactcgccaatcaaaaaacaatttaaatgcatgtatcaatgcacctttattgaaagataatcacgtttaactggtagagcgtaactcctacaaacagaaaaggaacccacgtcaaagatttacctcattagttaatgagagaaccaataagactaaaaacccagttcaaaggagaatccaaagagcagacatggatacaggccgtgaggaaggaagatatgagttgtaaactggctcctctcacagggaccccgcggtggggtgtgtgagagaggacatcaacttcacctctgagagacaaaatctacttgcatctcagggactagaaacacgtgcgttactatcagttttctacaatttgaagctgtcagacagtttgaagacggtgacaggtgcagacactatgatcacagcctgggagggttatgctacaggcggcctggcctcccacaggacgcccaggaatccttttttgtggcttcaaagtctcagttttacctaacatcagtaacagctctccagcctgggtgacacagcaacaccttgtctcaaaaaagaaaaagctcttagccagccacagggacccttgaggagctcgctggtgtccctggcagtatctcatgaggctgctggttcccagaacacctgtggaggctctggcagcccctggcacctcacaggggtgagctttacccaagcgctgagatcctggaaacaattatgaaaccccccaccctgcagtgtgctgggaaagccttccaccgagaaccaccctccccatacgagccagaggagatcacagatgccccccttgcttacctgcagcaaggccctccaaattcccattctctgcctcagaaaacactggccatttctcctcatgatcaactggaacacaattcccttacctggacttttttttttttttttttgagacagagtcttgctctgtcacccaggctgaagtgcagtggcacaatcttggctcattgcaacctcctcttcccggttcaagtgattctcctgcctcagcctcctgagctgggatacaggcacacaccaccacgcccgactaatttttgaatttttattatttatttatttattttgagacggagtctcgcttggtcgcccaggctggagtgcagctgcacgatctcagctcactgcaacctccacttcctgggttcaagtgattctcctgtctcagcctcccaagtagctggaattacaggcactcatcaccacgcccagctaatttttgtattctggcctcagctctctgatctgctggaggtcctgaccctccactggcccatcccacctccccagcttgattctttctagccttggccactcctccctgcaaaagaaaagccctgtccggcctggcctgtgagaccctcgcagaactcagggtcccctgttctccccgctgcacagctccagacgcctctagcaacagtcctcacttcagatctctcctcatccgagtccaggctcgtgatcagacgcgcacgtgctctctccttcctggctctgaatctagagtatccatcaaagtgtcaacccgccagcatggagctgcggtcattcttctgccagcaccacggatgggaggtgggaggggtgcacagcggcaaggattttaaggataaaactcaggatctcagctgcttgtgacaagcccagatggctgcacgcccggaccgcccacccccaagcccactgccttgcgtcagtgtcggatatttgatggcagagtcagacaagccccagagatcatctgaagcttccttcacacccccaaagcacctctatccaaagtggtgtcgcacgaagctttacacgccgcctctgcctcccctgccccacaggttcctgaggaggcacagactggagaaacgattctcaactggttctgcgtcagagccttgagaatctgagagctgcaggccacctctcggagaaaggtgcatgtgtgcacatgctccccagggggttttgcagcattttaaagggataaccctcatgggcccaaactgataaaccagcccggtcaggcagctggtattcgggagacgggcactgggctggattcagactcccctggctaagaacagagctggaatgaaaatggaccaacacgtttacagatatgacgatgatgccgatcggcacacggccaccaagccaaggacaatgttacccacctgccaagttctaccaaattctcctctccccattccaaaccacctcaaataaacctatttcccacaactggttatctgcacatttgagtcacctcccgacaatcaccttagcggccccaagcacgcagccagcacagtgtagctcagtgtccccttcagcatcaccacatgccaggcgactgttaccgtacatgtcccctcgagctattgcacctaaagctggactttattccaaatcttccagcccttactgccccgttctaagttcctccagaacactgtctttggtcgtttctggcctgtaagaccatgctccaatacaattcacaacgcaaaactcagagacaaagtccatcttattagaatggtttctctgtcccccaagcccacccaatgctaggacctccctcagctgctcagatcccagttaatcatccaaacatggtggggggctctggaggggtatcctgccaccacgccagcgtgggaatgaatcttctcttccacgaggggtgccaccttgactcaagtgtttcaactccactcagtcggaagtcaccgcgggactgccacacagtgcctcagcagaggccacaaagaaaggcagggaaaaatgctaaacaattcagctgataccagaagggctctggaagagagaatgaaggaggggaacacagtggttcactataaaacagaaccgtaagatcagtgcatgtgtacagcagggagaaagaaattgtgctttggtggaaacctctgcctcatcttggccacactttctcacgtgctccttacggttcatacagacgtagagtatttctgtgctattaagagttcgttacaccataaatacaattttcacgtgtcaacttaaaagtaaattttaaaaaagatgaaggaggatgattggcggaaagtgtctaaaaagactcctcatggtggcgatactggggagaggtgggcagcactggtctcaactctccaggacacgctcagtgaccggtgatggctccgtacactgtagatgccagagacacttccccagagtcactcgaattccgtcctgtccccgaggctctgtggccgctcaccccccaccaggcctccaaccaagcttcaatgaacccagtcaattagtgctactttgacttcttgaacctagttccaacgtctgcttagttctatcactgagggaattaaacgaatctgtaacacgtgttaagtatgaaagtcatattacaaaaattctttttctcccccaattttttttttatcgtggtaaaatccacagaacagaaactggacacacctgttagcgcacagccagtgggattaaatgcactcggggccttcccagttggccaaggggctggtgtgaggcaaaggcacctccgatcaggtcacagggaaccccacgggaggcccagcggatggcctggctcagggaccccacgcccacgccccaatgtctgcaggagtggcctgggcaactcctgccgtgtctgggcccatgggaaacgggtgcaaatctgcggtctccttcaaactgtccagtgggcgactgcgacctcgcttccgaggtggagggtggtatagacgaagggaaacggggggcagcctggcccgcagactgggtcctggccctccttccgagcaggaggtggcttcggaaccggccacccgcccgcggcaccgacgcctcccccggttcccgggagggacccctgcggggccgccagctccagcgcttccgcggacagcacgcgccctccccaccgagcctgcgaggaaggcgctccgccttccactttctcgggagcgagccccagctctcgggacgcagtccacacgcgctagcccagcacgaaccggcctcgggcagggccgcacccacccccgggaccagcccgcgccccgcaccccgcctcccggcgcccgccctggacaggtgcctcctgccctcccgggacccccgcaccgggacaccgcgcgcctcccgccctccccgcgggcgtaggagcctgaggcggcggcccggggacgcggccaacctgggagagagcgggggcgggggccggctggggaaggggccgcccggaggcggaggggtcgtcgcgggagcctggaagcccgcggggccgggccggggcggcggggcgggtcggaggcgctggccggggcgacggccacccacctccttgtccgggacccactgcggctcctccaggccgaacgggcttccgaaggcgcggtgttcgggcaccatgcgcaggccgctcggggagcgcaccagcttcttggcgtcgcggcgcgcggacacctcggaggacatgacgccgcctcagcctctcggccagcggccccgcacccggcccctcgcccagcccggggcaccgcccgccccgccccggtccgcgcgcggctgacagcgccggcgtccaatcgccaagcccgccacggagcgcggactaatcggagcttgaactccgccccatcgctgccctctccaatccgtgtaagggcaccgcccctgcaaccctgaggtcgatcaccaatcggcggcgagggctggcccgggtacgctccgcccctctcagggagattgagactttggattggttagttagtcagtcacgttagcgccgcttcgtctctgattggtgtagcccactcagggtgctaggcgcctattggaggagaaggccgagaggagcaggacggcgggaagaggagtgcggaacccgcgggaggtgaggcccgccgagccgggctgcgagccgggctgcgagccgggcggcagcggggtcggaggtcgtgggcggcagcgggcgtgaggggtgaggcagggtcaaggggcgggggcggccgcgggtctccattgcccgagcctgtgggagcaggcgggcctggggctgcagcactcaccccgggagccccgccgcagctcgggtagcgttcaggcacctcgccggggccgggccgcgtgcgttcggagcggggaaggcggtctccggggcccccggtgcgcgcggggaggcgtccgctcaggggaggccgaggtgggcccgcggctgcgcccccggccttcgatgccttcgctcgtccgcctgggaccgcgctggcttcgcatcgaagtgggagaggtctgaacagttattttaatactttgatttggaaagaaaatcctttaggccgggcgcggtggctcacgcctgtaatccgagcactttgggaggccgaggcgggcggatcacgaggtcaggagttcaagaccagcctggccaacatggtgaaaccccgtctctactaaaaatacaaaaattagctgggtgtggtggcacgtgcctgtaatcccagctgcttgggaggctgaggcaggagaattgtttgaaccaggacccgggaggcggaggttgcagtgagccgagatcacattactgcactccagcctgggctacagaaaaagactccatctcagaaagcacacaaaaaaaagaagaaaatgtttgttcatcctgcctttaattccttattacaaggcgtgaatttttattgttttttttgagacagtctggctctgtcatccggggtggagtgcagtggcgtcttcacagctaggcacaacctcgacctcccaggctctcaagtagctgggaccgcaagcgccactacactggccagctatttttctttttttttttttttttcggtagagagtaggtcttgctgtgttgcccaggctggtcttga

SEQ ID NO: 2808 - DNA, 6000 bp, Homo sapiens
atgtagttaagaacacacacacacacacacacacacacacacctgaaaatcccatagtacatcccgccctcggtttaataatcagggtaggcaaaggaaggaaggcttagccagccagcgttttgttaacctgccttatataaactgcacacacccacccacaccctttatgtaaatagaaataaatgtacctttcttaattgcagcaataattctgggattcaggtccagtagatccaaatccattttgtcggtgggctggccaccaggatgaataacttcccaggaaagacagaacaatggatgcaaattctgaggcactcgccttcaattcaaagcctgtgggaggcccgaaccagggaagtgacagcagccgaggtgtccgtgtcatcggggctctgtcactgagggtggaggagacttcactgtagagggaaggctgtctagctacatctagggcaacatgtctgtcatttacctctaagaattatttagcagcttagaacccattccagacactgatgcatttgaaaaaccccccaaacccaccacatttacctcctgtggaaagtgctagaaataagaccatcctcctgcagcagttgagtgccctgcccgactcacctctctggggcttggggatgacccgcgtgtttttggctgacttgactgaggcatctcttgcactctgcagtttaatttcccttaagtgtctccctggggactctggaaagagtgggaaggtgagtctgggattggcagggtgctcagggatccaaacatcagtcgcccccagcagccaacagcagaagacagcttcctgtgggacgggaggaaggtgctgtggaccccacccagcctctcccaggaagggagctggcagccattccacagcccgagcctggcccagcaagggagaagctcagctcttctcccctccggcctcagcaggctgctcagggactcagcctggggtcacataaggcctttccaacaggccactctgcatcccctgtcggcctcccaaatggtgagaccaagagtgtccaggacatggggaaactggaaggcagcagcctcgagggccgggtccaggatccatgtcctccagtgaggcctggcgcccttggccgtaacccagcagaggaaagggcgggccgtggacttggagaaggttttcccttggaccacacagaatgcggcactggcctggacacgatcacgctggtcactcgtatgcccatgttcagcctgctcagggagacaggaacagactacaggagcagcaggctgaggcacgcccccaggcaccccgtgaggcgggcagggcagggaagctggtgctccaggatgcgtttcctgcccgcgcaccaggcttggctcccgggcccccacagcctgtgggttttctgagcaagggacagggaggtgcccaggcctggttgcccaggcaggcctgacaggaactggcgagaagccaccctggagggccgggcgcaggccaaggcagggcggtggggcgctgaaccagctccaaactgctggcagagctggccagagtgaggaagtgaggttcccaagcacagaaggcaaatcaaaaaggaatgccacctccagggaagacactacactgccaaaggagatgcggccttgcccggctcgaaaagaggtcattttcagaacatgggactctccaagccctgaggacaggaggcagcctggggagtatgaacctcgcacctggtaggggaccccacacccgaggtaccacccaaaacacagcccagatctgcacggagggatggttccctgagcaggcgtgactgtcacagacaggctgggcctgggggctgtcgggaggctgctgtcccaggctgggtctggatacaaaacttggactgtgtcaagcagcgggacgctggcaggagcaccgggaaggccagcacgtggctgcaacgtctcccgccttcaggacgcgggccgaggccaaggcacctggaagcagagtgtccactgacggataacagactcaccggttggccaacggcagtccggctcctgaggctcctcctgggccctctgtgcacatcctgctgagaacttggtttaacaggcctggctcaaagtctgtttagtgacgacctcctcccgtgtcccatcacccttgacagctgattaggcgcctcatcttccactgtcccccgggcggcctgatctggcaggtcagttgaacctgcatccccttcgcccctgggggttcctcttagcaaccttccatcctctgcccctgcccagctctggagctgtaagccgccaccagcccatggcctgttcagagctgagcccagcctctctcccactgcaagaccgcagtgtggtggttcccacatctctcaaaggttctgaatgaaagcctggtctctgcctaacgtgctttcacagatatcctggaatattttccctttaacaccaagcacctgccgcatcccagacactggcctgggagctccacagacagcccggcacatgcctctgtcctctcgccgctgtgaggggcaggggtgtgaccagcccatctctctacaccggggtgaaggccacacacagggagcagcccacagcaggcaaggggctggcccaagacagacctgtatgtcttcctgcagcacccgagctgagcaatgacttcagggggagagctgatgtcacgtgctgctaggtgagtacggacggtcacaccagagctgttaggctcacacaccagactctggaaatgccgtggttactgcctggagctgctctgagccttccgaggtggactcactcctctgccttgggccctgggacctgctgtgtagctttgaagtgattcacagcacttacatagtctgatgttttggggtgacctgacccccctgcaagagtgtgatgtcttatcagaccacatatgtgaggacttgagtgaactccgcaaccttgggaatgccacttaaaccttgtcagacactcccttatgtgagttactgaccctgactgctggactgcaaaaacagacatcagcttgaaggttgtgcagatgctttgaggcaagctatacgctgctggcctgggagctggacctcggtcccagcttctcagagagctcccgctctcacgctctccactgctaccaaggcaaacctcgaactctcaccagatctcactctccaggggcccgctccatcccagcagagcaaccggaccctggccgttctgccactcacctccctgccgtgaatgcaccccatccatggaggccctgcttccctgccaggtgtcttcacctcctcccctctcctcccctctgagcactgtgaacccgagaacaaatcttctttgacaataaaccgtgtgattcgtggaatcatactttgatcatctccttatttcctccacacacaaggacccctgcactgccaatggccccaggagagggcagagtcagccacagggaccccacctcacaggcttcaacactgctgatgcctgtcatcccagcaccgtgggaggccaaggcggccaaggtcgcctgagcccaggagttcaagaccagcctgggcaacacagcaagacctactctctaccgaaaaaaaaaaaaaaaaagaaaaatagctggccagtgtagtggcgcttgcggtcccagctacttgagagcctgggaggtcgaggttgtgcctagctgtgaagacgccactgcactccaccccggatgacagagccagactgtctcaaaaaaaacaataaaaattcacgccttgtaataaggaattaaaggcaggatgaacaaacattttcttcttttttttgtgtgctttctgagatggagtctttttctgtagcccaggctggagtgcagtaatgtgatctcggctcactgcaacctccgcctcccgggtcctggttcaaacaattctcctgcctcagcctcccaagcagctgggattacaggcacgtgccaccacacccagctaatttttgtatttttagtagagacggggtttcaccatgttggccaggctggtcttgaactcctgacctcgtgatccgcccgcctcggcctcccaaagtgctcggattacaggcgtgagccaccgcgcccggcctaaaggattttctttccaaatcaaagtattaaaataactgttcagacctctcccacttcgatgcgaagccagcgcggtcccaggcggacgagcgaaggcatcgaaggccgggggcgcagccgcgggcccacctcggcctcccctgagcggacgcctccccgcgcgcaccgggggccccggagaccgccttccccgctccgaacgcacgcggcccggccccggcgaggtgcctgaacgctacccgagctgcggcggggctcccggggtgagtgctgcagccccaggcccgcctgctcccacaggctcgggcaatggagacccgcggccgcccccgccccttgaccctgcctcacccctcacgcccgctgccgcccacgacctccgaccccgctgccgcccggctcgcagcccggctcgcagcccggctcggcgggcctcacctcccgcgggttccgcactcctcttcccgccgtcctgctcctctcggccttctcctccaataggcgcctagcaccctgagtgggctacaccaatcagagacgaagcggcgctaacgtgactgactaactaaccaatccaaagtctcaatctccctgagaggggcggagcgtacccgggccagccctcgccgccgattggtgatcgacctcagggttgcaggggcggtgcccttacacggattggagagggcagcgatggggcggagttcaagctccgattagtccgcgctccgtggcgggcttggcgattggacgccggcgctgtcagccgcgcgcggaccggggcggggcgggcggtgccccgggctgggcgaggggccgggtgcggggccgctggccgagaggctgaggcggcgtcatgtcctccgaggtgtccgcgcgccgcgacgccaagaagctggtgcgctccccgagcggcctgcgcatggtgcccgaacaccgcgccttcggaagcccgttcggcctggaggagccgcagtgggtcccggacaaggaggtgggtggccgtcgccccggccagcgcctccgacccgccccgccgccccggcccggccccgcgggcttccaggctcccgcgacgacccctccgcctccgggcggccccttccccagccggcccccgcccccgctctctcccaggttggccgcgtccccgggccgccgcctcaggctcctacgcccgcggggagggcgggaggcgcgcggtgtcccggtgcgggggtcccgggagggcaggaggcacctgtccagggcgggcgccgggaggcggggtgcggggcgcgggctggtcccgggggtgggtgcggccctgcccgaggccggttcgtgctgggctagcgcgtgtggactgcgtcccgagagctggggctcgctcccgagaaagtggaaggcggagcgccttcctcgcaggctcggtggggagggcgcgtgctgtccgcggaagcgctggagctggcggccccgcaggggtccctcccgggaaccgggggaggcgtcggtgccgcgggcgggtggccggttccgaagccacctcctgctcggaaggagggccaggacccagtctgcgggccaggctgccccccgtttcccttcgtctataccaccctccacctcggaagcgaggtcgcagtcgcccactggacagtttgaaggagaccgcagatttgcacccgtttcccatgggcccagacacggcaggagttgcccaggccactcctgcagacattggggcgtgggcgtggggtccctgagccaggccatccgctgggcctcccgtggggttccctgtgacctgatcggaggtgcctttgcctcacaccagccccttggccaactgggaaggccccgagtgcatttaa

SEQ ID NO: 2809 - DNA, 6000 bp, Homo sapiens
tgtttgagtataaggatgctcatggcaccagaagttatgactctgaactttcaaatgtttatcacaaatccatttaagtaacttctagagtcttttttttttattagccttttgcactcctaacttctagagtcttgaagattagtcagagatgggaaatatgaaaaaaagagacagaagaatcaagtctttctctgctttcctcctacttagcccaaatcagctgcactcacagggcagtctctatacaatgggcagaaatagtgtaaggcctcagctctggtgcttaatgttcttgtgcagaatcctgaattggagcttgtctcttataccataacaccaccacacccttctctctgccaatgacagctgacagcacaaatctaggttaatggagagaaggtgcttccctgtcttccttgcataactggtccaggccgctataattcccagaacagcactttcatacttagtgcaaatagcacaggatgctttggccaggcatggtggctcatgcctgtaatcctagcagtttgggacgccaaggcaggtggactgcttgaggccaggagttcaagatcaacatggtcaacacagttaagacccatttcttaaaaaacaaacaaaaaaacagcacaggctgggcgcagtggcccatgcctgtaatcccagcactttgggaggccaaagagggtggatcacctgaggtcaggagttcgagactagcctgaccaacatggagaaaccctgtctctactaaaaatataaaattagctgggtgtggtggctcatgcctgtaattccagctacttgggaggctgaggcaggagaatcgcttgaacctgggacgcagaggttgcggtgagccgagatcacgccattgcactccagcctgggcaacaagagcgaaactccatcaaaaacaaacaaacaaacaaacaaaaacagcacagagattccaccatgggatcctaggccttagtttctgacagtccaactctcagaaataaaaatgataaagtaggaagagaattgttgacaaaggaagaggccctgccagacatatttagcaatgatctgcagcctttccacaggattattgacaacacttctgaaaagtctaatttgggtcttgaccttggtagtaaacctatattttatgtaaaggttgtaataccttccactaggtagaagaatctagtatataattccaaaattagcaactaaccacatacctctaaccgtgaaatgggttgtgggccaaagctttcttcttccactgaagtatctgcatttgcttcaagctgcatctgcattgccattactgaaaaatacaaatgcttatcagtataaacactagagaaataaggtgcatctctctccccatcttctatctagctagtcgtatcaaaaagactttaggaaaagccaaggccattctcttattgtgcctctctgttctcctgctttatattccttcagtgtaggggccaagttttacttatttttatataccccattatacattataaatgtgtttgcagacaaatactgcatgatctcactcatatgtagaatctaaaaaagttgatcttggcggggcgcggtggctcatgcctgtgatcccagcactttgggaggccgaggcgggcagatcaccaggtcaggagatcaagaccatcccggccaacatgcgaaaccccgtccctactaaaaatacaaatattagcagggtgtggtggcacacgcctgtagtcccagctactcgggaggctgaggcaggtaaatggcttcaacccggaagacagagatcgcagtgagccgagatcgtgccactgtactccagcctcatgacagagtgagactgtgtctcaaaaaaaaaaacaaaaaaaaaaaagttcatctcatacaaggaacaaatagaacagtggtaaccagagactgaggagaatgcagctgttgcagggggcggcaggaaggagagaggttggtcaacaggcacaaagtttcagttagataggaggaataagttctagggttctatttcacagtagggtgactacagtaaacactaatgtaatgtatacttcaaaatagccagaagcgagtattttgaatgttctcatcacaaagagaaatgacaagtgtttaagtgaactgatggatatgctgattaccctgatttgatcattcattatacaatgtatatatgtattgaaatatcatcttgggccaggtggagtggctcacgcctgtaatcccagcactttgggaggccaaggcgggtggatcaccaggtcaggagatcgagaccatcctggctaacatggtgaaaccctgtctctactaaaaaatacaaaaaattagctgggcgtggtggcaggctgagacaggagaatggcgtgaacccaggaggcggagcttgcagtgagccaagatcgcgccactgcactccagcctgggcgacagagtgagactccgtctcaaaaaaaaaaaaaaaaaaaaagaaatatcatcttgtatctcataaatatgtacaatcgtctgtcaaaaacaaagtaacacttattattttcacaaccttgggacagaaaaagatttcttgaaactggatgcataacgcactagccaaaaaggaaaagactgaaaactgaactacatttaaattcagcacttctactgggcactgtggctcacgtctgcaatcccagcactttgggaggccaaggcgggcagatcacctaagttcaggagttcaagaccagcctgaccaacatggagaaatcctgtctctattaaagaaaaatacaaaattagctgggcgtggtggcacatgcctgtaatcccagctactcgggaggctgaggcaggagaatcgcttgaacccgggaggcggaggttgcggtgagccaagattgtgccattgcactccagcctgggcaacaagagccaaactctgtctcaaaaggaaaaataaataaataaataaataataaaaaaataaattcagcacttctattcatcaaaggacaccactaagagagtgacaagtcaaaccacagtagagaaaacatttagcacaaacataactgagggctgataaccagtatataaagaacttcacatcagtaagaaaaagataatagaaaaataggcaagagatttgaacaagcacatcacagaagatatcaaaatgggcaaaaacatatgaacagatgtccaacatcattattaatcaggaaaattaaaatcacattaagacattactgtgtaaccagcagaatagttaaaatcaaaaaggctgaaaaatatcgtgttggcaagcatgtgaaacaacgaaacactcaacactcctgatgtatttttatataaaattcaaaaacaagcaacattagttcatctcattagaaaccagtatagcagttaccactgtaaaaaggggaaaatattaaatactacacaggaaggcttctgaggaccattctattaagtggtgattacataggtgtatattcattttgtcttgctctatcgcccaggttggagtgcagtggcctgatcacagctcactgcagcttatacctcccaggctagatcctcccttctcagcctcctgaatagctgggcctacaggtgcacgccaccatgcctagctaatttttcctatttgtagagatgcgggtctcactatcttgaccaggctgttctcgaactcttgggctcaatcgtcctcccgcctccacttcccaaagtgctgggactacagacgtgagacacgacgcccggccagtatattttgtaataattcacggagttgtatacagttgtgaatgtgaatttttctacatgtatattacattgcgctttagaagttaaaaacaaacaaacaaacaaaaaaacaggggccaggcgctgtggctcacggctgtaatcccagcactttgggaggcagaggcgggtggataacctgaggtcagaagttcgagaccagcctgaccaacatggtgaaaccccgtctctactaaaaatacaaaaatcagcctggcggcgtggtggtgggggcctgtaatcccagctcctcgggaggctgaggtaggagaatcgcttgaatccgggaggcggaggttgcagtgagccgagatcgcgccactacactccagcctgggcggaagagcgagactccatctcaaaaaaaaagttttaagaaaaccaaacctcacttcagatcattctctaggcatcatgtgaatggttttccgcattagatgatgaaaacactgttttggcaatcggagattggtactttctaagcacggtgtaatggaaagacagatcaggaatccggaagccctggctgtgatattaaacagctgtggctacaccgctctgatctcggacttctcgctcgaacccataaaataggtgttgcctataaaggctctaatgtttctcccctagttctaaagactgaggtccacttgtgttttcgccccagcagctgagggtcggtcgggcgcggacacgccctgccacgtccgggtttcacactgcgcgcggaggccccaactgccgctgagcactggaccggccaggacgcaggtgggcgaggacgagccgcggctctggagggcccagcctgcgcctcacacactcacctcggtccgcagcgctcctctctccagcaggccccgcgctccgacttcaccccgcgggcgtggcacgcgcccgacccgcacggcccccaacgcccctggcttacgctccacttctctactcgcttgccccagccttctgcgcacaacccagatgagttgcagttcccagctgcacgcctcgggaagcgccgcactctccttagggctcggtctctggccgctgcgcgcggtccgccagcggctttcagaattcccgccaaaccctctcgcccagggtcacgcccgcgtcgacgtaacgtatccccgcctcccggatccgccttctccccgcttccgccctgcgcgctaacccaagacgggagctcgagagcttgatcctgcgcgagtttacagactgccctcttccctttttgcgtaaggactaattcaaactttatgccgggggcggtggctcacgcgtgtagtcccagctgctcgggaggccgaggcgagagtatcgtctgagcctaggagttcgaggctaaccacggcaacgcccctactcctaccccagtccctcgcgggtggggcgagggatttcagggggcggtgggggaagacttaaccgagttgccgtcttctgtttaccagatcgaagaccacgactcccaagaggtaatgcgtcggcccgggactacatctcccggcatgcatcgccggcgggtccgcgagttctcaccatcgcagctggactattagcgggggccctagcgctcttgtggtttgtttcggcagtatctgaatgtcagcttttggcacttctggtcgctctgagcctcctactcgcattcctggagcaaggtgctttccaggcctcatggaggtggaggagctgaggaagctcgagaagatggatagaagtgggaaatggagctagcgtacgggagagggaaatggctggaatattcgtcaatctgtggtgctttactggagatttgcaggagttcagaggaagggggcattgaatttcataacctaaaccgtatcgtggtttaccagaaagttttgacccgtgattccggttttaaaggctgagtagggccgggcgcggtggttcacgccagtaatcccagcagtttaggaggccaaggcaggcggatcacctgaggtcaggggttggagataaacctggccaacgtggtgaaacctcgtctttagtaaaaaatacaaaaattagccaggttttgtggcacatgcctgtaatcctagctactcgaaaggctgaggcatgagaatcgcttgaactcaggaggaggttgcagccaaccgagatctcgccgctgtactccagcctgggcgacagagc

SEQ ID NO: 2810 - DNA, 6000 bp, Homo sapiens
gattacggtacttgtaagtttaatggatgtgaaattgattgaattttaagaaattatagcaaactatattcagttgaaccttggggaaatatacttgtagaaagatgttcatttatttacaatgcatgtctgctattccaggactctcattttgtaagcatactagaggaggtgaattaggagcagattagatcacttgatacacattaccttatatataaagaatacatatatatgtatgtgtgtgtgtatgtatctctatatatatacatttatatatatgtatttatactttttttttttttttttgagacaaagtttcactctttcgcccagactggagtgcagtggtgcaaggtgcaatcatagctcactgtaaccttgaactcctgggctcaagcaatctcccctcctcagcttcccagacagctaggactacaagtgtgcatcaccgcacctggctaatttttaaaaaaaggttttttttggccaggcgcggtggctcacgtctgtaatcccagcactttgggaggccgaggcggatcatgaggtctggagttcgagaccatcctggccaacatggtgaaactccatctctactaaaaatacaaaaaatgagccgggcgtggtggcatgtgcctgtagtcccagctactcgggaggctgaggcaggagtatcgcttgaacctgggaggccgaggttgcagtgagcccagatctcaccactgcactccagcctggcgacagaccgagactctatctcaaaacaaaaacacaaaaaaaacaaaacaacatttttttttgtagagttggggggtctcactacattgcccagactagtctctaactcctggcctcaaatggtcctctcacctcagcctctcaatgcactaggattacaagtgtgagccaccacactccaaaatttttcaattaacacatttataaatattctcagagaatgccaatttaactattagagggaaatctagtttgccttatttccaagttctcagtgggttgttttggaagaaaggaacagaaactactcaaactagtttaatcaataaaaatagaaggtagagttattggaatgtagggatatctcataactcaagagcattaatccttaagagttcaaggttttttttttaaaaaaaaaaaaaaagtaaaaaagaacccaagagcaggaggagtaagtactgctaggcttctgagaaactggaaaggcgatctggaaaggagtcagaattcaaatggtttatttatctttgactctctccttagtatctcaatttctttttctttttctttttttttttttttttgagacagagtcttgctctgtcatccaggctggagtgcagtggcacgatctcagctcactgcaacctctgcctcccagtttcatgcgattctcctgccttggcctcctgcgtagctggaggctaatgtttgtatttttagtagagatggggtttcaccatgttggtcaggctggtctcgaactcctgacctcaggtgatgcgcctgcctcagcctccgaaagtgctgggattacaggcttgagccaccacacccgacatcaatttcttaatctttctgcagatgtgctttctctgattggacattcacacacatctatctgtgtactttgccccataaattcctgaggtcagacttgaatataaagccaagtctaattttccaggagcaggaaaatgattggccaatttggggccagatgaacactgctggtacaactggtggccagaaaggtaaaagtcatgtgactacagtcagctaggaggagggctgtaggtttgcagatgctctaagggtgtgggaagaaccggaggcaaaggtgtgtaactttgatatggaagaaagttcactattatcacaggtagtatctataatcactaagttaggttgtttctacatccagaaagctgcctgagtctgttctctctgtcattcctctaattcagaggaccccaacgccccaacacagacctgtcgcctattaggaactgggctgcacagcaggtgagcagctagcaagcaagcattactgcctgagctctgcctcctgtcagatcaaggagagcattagattctcacaggaactcaaaacctattttgaactgcacctgtgaggaatctagattgcacactccttatggaaatctaattgatgatcttgaggtgcaacagtttcattccgaaaccatcctctgcctcatgcccaccccccgagccctgtggaaaattgtctttcacagaacagctccctggtgccaaaaaggtagaactggaatctaatccaaatcttcatctctttgttgaaatattgcaagaacttcctttttggtgtcttcactttcacgctcctgaaatctgttcttcaacgccacaaggtaatagtgtgaggattaactaaaaactttgtcaactttaaagcactccacaaatataaagtagtaataaggccattgcaatggttcacacctgtaattccaacactttgggaggccaaggtgggaggatcacttgaggccaggagttcaaggccaacttgaacagagcgagatgctgtctcaaaaataaaaaaataaggccgggtgcggtggttcacacctgtaatcccagcactttgggaggccacggtaggtggatcacctgaggtcaggagttcgagaccagcctggccaacatggtgaaaccctgtctctactaaaaatacaaaaaattagctgggcgtggtggcaggcgcctgtaatcccagttacttgggaggctgaggcaggaagactcgcttgaatctgggaggtggggttgcagtgagctgataccacgtccctgcactccagcctgggcaacagagcaagactccatctaaaataaataaataaataaataaataaaaataaaaataaattggtaagtggagggaaaatagatctaaccaaatgacttgtcttcttaaaaacttcaatgatttcttcagtacctagagaccaaagctccttacctttttttttttttttgagacggagtcttgctctgttgcccaggctggagtgcagtggcgtgatctcgctcactgcaacctccacctcccgggttcaagcacttctctgcctcagcctcccaaagagctgggattacaggcatgcaccaccacgcccggctaatttttgtagttttagtagagatggggttttgccatcttggccaggctggtcttgaactcctgacctcgtgatccgcccaccttggcctcccaaagttctgggattacaggcttgagccaccgcgcctggcctctccttacatgttttgttgttgtcgcttgtcttttgagacaaggtctcactctgtagcccaggctggagtgcagtggcccatcatagctcactgcagccttgacgtcctgagctcaagcagtcctcccacctcagcctccgggatagctgagaccacaggcacaagccaccacgcccagcttattttttttttttttttttttgagatatggggtcccactatgttgcccaggctggtctccaactcctgagctcaagcgatcctcccccaccttggcttcccaaagtgctgggattacaggtgtgagccaccgtgcaggccttatatgatcttcatatcctgaactaaatgtaaccttccagtttcggcacttgctctggcacttttcctccctcgccagataatactaatctttaatcatgtagttcgtttccatgcccatactaccctatttgcttataatgtcttccacttcgcccaagaatccctactcagctagcttgtggtgttgttttgacacagtctcgctctgtcgcccaggctggagtacagcggcgagatctcggttggctgcaacctcctcctgagttcaagcgattctcatgcctcagcctttcgagtagctaggattacaggcatgtgccacaaaacctggctaatttttgtattttttactaaagacgaggtttcaccacgttggccaggtttatctccaacccctgacctcaggtgatccgcctgccttggcctcctaaactgctgggattactggcgtgaaccaccgcgcccggccctactcagcctttaaaaccggaatcacgggtcaaaactttctggtaaaccacgatacggtttaggttatgaaattcaatgcccccttcctctgaactcctgcaaatctccagtaaagcaccacagattgacgaatattccagccatttccctctcccgtacgctagctccatttcccacttctatccatcttctcgagcttcctcagctcctccacctccatgaggcctggaaagcaccttgctccaggaatgcgagtaggaggctcagagcgaccagaagtgccaaaagctgacattcagatactgccgaaacaaaccacaagagcgctagggcccccgctaatagtccagctgcgatggtgagaactcgcggacccgccggcgatgcatgccgggagatgtagtcccgggccgacgcattacctcttgggagtcgtggtcttcgatctggtaaacagaagacggcaactcggttaagtcttcccccaccgccccctgaaatccctcgccccacccgcgagggactggggtaggagtaggggcgttgccgtggttagcctcgaactcctaggctcagacgatactctcgcctcggcctcccgagcagctgggactacacgcgtgagccaccgcccccggcataaagtttgaattagtccttacgcaaaaagggaagagggcagtctgtaaactcgcgcaggatcaagctctcgagctcccgtcttgggttagcgcgcagggcggaagcggggagaaggcggatccgggaggcggggatacgttacgtcgacgcgggcgtgaccctgggcgagagggtttggcgggaattctgaaagccgctggcggaccgcgcgcagcggccagagaccgagccctaaggagagtgcggcgcttcccgaggcgtgcagctgggaactgcaactcatctgggttgtgcgcagaaggctggggcaagcgagtagagaagtggagcgtaagccaggggcgttgggggccgtgcgggtcgggcgcgtgccacgcccgcggggtgaagtcggagcgcggggcctgctggagagaggagcgctgcggaccgaggtgagtgtgtgaggcgcaggctgggccctccagagccgcggctcgtcctcgcccacctgcgtcctggccggtccagtgctcagcggcagttggggcctccgcgcgcagtgtgaaacccggacgtggcagggcgtgtccgcgcccgaccgaccctcagctgctggggcgaaaacacaagtggacctcagtctttagaactaggggagaaacattagagcctttataggcaacacctattttatgggttcgagcgagaagtccgagatcagagcggtgtagccacagctgtttaatatcacagccagggcttccggattcctgatctgtctttccattacaccgtgcttagaaagtaccaatctccgattgccaaaacagtgttttcatcatctaatgcggaaaaccattcacatgatgcctagagaatgatctgaagtgaggtttggttttcttaaaactttttttttgagatggagtctcgctcttccgcccaggctggagtgtagtggcgcgatctcggctcactgcaacctccgcctcccggattcaagcgattctcctacctcagcctcccgaggagctgggattacaggcccccaccaccacgccgccaggctgatttttgtatttttagtagagacggggtttcaccatgttggtcaggctggtctcgaacttctgacctcaggttatccacccgcctctgcctcccaaagtgctgggattacagccgtgagccacagcgcctggcccctgtttttttgtttgtttgtttgtttttaacttctaaagcgcaatg

SEQ ID NO: 2811 - DNA, 6000 bp, Homo sapiens
aacaggccactcgcaaatgcagaaacacaatggccaataaacaagtggaaagccactcaacctttacaataagctaagaaacgtggtgataccagctgttgaggagtcggaggggaaagcttattctgatagtgtgggaagtttatcctaaagcaggaaacaaatcacagtcagtttagcagatatgtagttcagcaaatatgtggtttagccatatatagttctgagttgtcaaaaaccagcgaaaaatgctttcattttgcaagtggatctctaagaaccaagaagcgccttctatgaacaatctattgctaatggtgaaaagttcacatagttatgctacctttttggctaaaagagggaaaataggacctgataagattgctcctacctgcatatatattcgtaaagaaactctcagaagaaacattcaaaactagtaacaatggctacctgtggatgggaagagggagaagtggtgggaattaggcagttgggcatggacagaagattgcactctctctctcctctttacaaattttgttcgtgaactgtacgaatgtattacctattaaaaaactgagttaaaatctgtttaataaaaataattacaactggatgtgattttttttccccatacagacattctcagatagcgctgcctggtgttaatggtttcaacttttcagacagaaactaactacttgtctctgatcctagaatccagccttactgagattccgtgtcagtgctctcggaaaattccactaaattctaaagggcagtttggtaacatgtatcaaatgtagaattcccgtccccctacacccagcagtggcacttctaaaaatttatcctaaagaagttactggataaagatgcaaagatgattctgcagcattatttattacaggaggaaactggaaacttactatccacctgcgtggggactggcagcataaattgtggtcatcaacacggacactgcatatctgcagaccacatttagagttgcaaggccccagaagctccttgtcctcagctgtgtgactctttggatctttgctcctctcgccctctacctggtacttggatgcaccaccccaccctgtgccggcctactcacctggtcagcgtaggggtgcggtggttggggttggagcagaagatgttgttggtcttgcgggtgccgtccaggaactcacgcaccgactggttgcgcagctctgctaggggccgggcctcgtgcttgaggaaccactggtgtgcctcgaagcacttggcgcagaggagctgctcgcactcaaagcaccagaagtcggccgactctttgcagcgggtgcacacagcctgcgcatccacaatctgccggtacaccgacaggcgccgctgcagactctcgaaaaagacgttatccagggcgggtgtgtctgcacctaggggccagggcgcctggcagatggggcactgcatgcccgacgcctccaggcatcctgagcacagcgtgtgcagacaaggcagcagcttcgggcacttggcttccgcctggcattgctggcagcgcagaaactggaactcctcctccgaagcgggggctcgctgggggaccagagaggcaggtgaggcctggagaagtcccaaaagcccccacctaccggccaaccacccttacagctggaccctggagtaggacctcatattccattccagccagtcattggatgatgcaaaaccctggcttatcagcaccccaatacccccatttattcaggccctccagctctcactgcaccatttattgagcatctacttctcatcacccacagtaataggctctgagatataagaggtgtaggatacattctgccttcaaggaactcagtttggaaggtagatacactaagtaccaacctcatataaagtgcttaatgcacagtttgggggttcattaaagaggtaagcatggaacaacaatatgacccagaaattccactcttagatatataaccaaaagatgtaaaaacaaggcccaaacagatacttgtacaacaatgtccacagcaacactattcacaatagacaaaatgtagaaacaatccaagtatccatcaacagatgaatagataaacaaaatgtggtctacacatataatggaatattactcagcgttagaaagaaatgaaattctgatacatgctacaacatagatagacctcaatgacattatgctaagtgaaataagccagtcacaaaaggtcaaacactgtatgattctgaggcaggagaatagggtctggaggcagggaacctaaggccgattccctctgacttcctagaactaaatcgaaaggaaaaccgcaactctccatgcctcagtaacaaaaggaagagaggctactctctttgcaaatcaccccatttcctgcagggcagatggaaaattgaaagtacgtctggttggttgctttctgcaaccaatggggtgaacaccaagtggccaatgggaaacctctagggggtatttggaacccagaagattctgtaactggggtccttgagccctgctctagccgctcccaccctgtggggtgtactttcattttcaataaatctctgctttcattgcttcactctttccttgctttgctgtacattttgtccaattctttgttcaaaatgccaagaacctgaacaatttgcagtcaagatcctctactggtaacaattccacttacatgaaatatctagaataagtaagttcatagggacagaaggtagattagaagttaccaagggctaggggaaggagaaaatgaggagctattgcattactggggctcaggacacaccacttcaaagtatgactgcaggaggctcttgaaatatacttctttggcatattttaagctggttattctgagaaactgctgatacaggaatagctctgaaaagctctccttttgtaaaaaagaaaggcatttatatcttaaaagaaaatctacattagtaaaatgatctatattaaaagagggctgctccagacaacttttattatctaagaacttttaatctacatagcaagacaacctctattcaccaaacagctcctctcctcaccctcccataacttgtgttatcaccatcacccagaagctccaagctcttttccgtagctcaggatgttatacaggcttcaatcatctgacctttctttgagtctcatatattgtgggactcctgagtatacatatgtaattaaatatgggttttccgctggtaatctattttatgactatttaattcataggctatttaattcatagcccagccaaggaaactagaagggtggaggcaagccatctttccctcccctatggtttaaagagtacagagtttctggagtaatgaaaaagttctggaaatagatggtggtgatggttacacaatattgtgaatctacttaatgccactgaatggtacacttataaatggttaacataggaacttatccattaggtatattttaccacattttgtaaaatacaaaaacaggccgggcatggtggctcatgcctgtaatcccagcactttgggaggccgaggtgggtggatcacgaggtcaggagttagagaccaatctggccaacatagtgaaaccccatctctactaaaaatataaaaaatagccaggtatggtggcgtggcctgtaatcccagctactcgggaggctgaggcaggagaatggcgtgaacccggaaggaggaggttgcagtgagccgagatcgcaccattgcactccagcctgggcgacagtgtgagactccgtctcaaaaacaaacagataaacaaacaaacaaaaaacaaagcaaaacaaacaaacaacaacaaaaaaaaaccaaagtgcttaatacagtacctggcacatttgaagtgctcataaatgttacctagtattgttaagtaatgttattcttagttgtaataatgtttataaaagttactgtaatacggtgtcctctgtactttcatgaaggggagtaaaagggcctgaaaggcagcagagcaagaaacccaagtagttcctttgtcgggggaggtgggaggtgggcaggaaaggtgtggcaagagaagggttcgttggggaggcttccttaagcagaaaccacatgagctgggaggccttggcaaagatacctcttcagtctgagccagtttctcacctcggatctgggaagttggttttagttttgccgtgcctgggacatgcccctggctccaggccagcgcaacaggggtactacctccatcctccctaatctgaagtcctgcatctgaggcaaagttgaggcagggctcgagggtgggcggaagggcccaggcccggaggccactgacccttctcaccttgcccaactgctcagtggagaaaccgcagcccagcgaggccgccccaactcctccgtgtcctcttttctactctatcctaccctcccttccctgccccacccgagacggtcaggaccctggtgtctggacttcccgctttgtgtcactctctagggtacttgaccaaatcctccgttagaccctctcttcccgcctctccccaccacagcaaaccaacaaagcttaaccccatcatcccctaacccaatagtacctctgtagggctggggctggggctgggctggcggccttcagagggggtctcggggggaggcatggtgggctcctggggccgggcggggtcctgctggggcctcggagatcgggcgggtgcaggctccatggaccccagcttagtttcgattctcggtttagatcttggagtgcgtgaagagaagctgaaggggaggcgtgagccagttggctgagtcccttgagctgtccgaaaggggaggtgccggctcagggcccgcctctggagaggaagtgagacagaagctgggggcggttctagggggcagagaggccgactgtgggttttaaagacacgcccagagcggggaggaggtagaggcggagagctgcagacctaccgctgacttacggtaaagcgggagaggtagggcagagctgcaggggggcagccctgctcccggctttgatccattcatccgttcacactggcactgcttcgtgccacgtcctgccgggagctgggcgtacaaagatgagccacacgcagcccctgctttctaagagccgtagatgtaatggaagagcaagcctgcaaacggagacattctggaaaggagagcccacagctgggacctgcaaaagcagtggaaattcaccagggatttagggttgtaggtggtggggtacgggggacacttgaaacagaaaagatagctcttgcaaaagcctgtttgggaactaattttggccattttcagatttaagagggaattcatgagaaatgatacccaaggagtgtgctaggacaagatcctagctgaggagattgaaccagttctgtgagtgatgggaagttgctgaaggatttggaaccagggaacaacacgatcagctgtgcatgatgggacagtcactctgacaacctaggagcaggtgccctggtctaggacagtggctgtgggatgcagaggagggacttgattcagagatcctgggaagccagtgactggaggtgagggagcaggatgatgccttgagtgacagctggaaaggctggtggatctgaggtggtgggggcaggagggagggggagagctggagagcgggtatgaagagggtgaggggagagccagctaggtcttcgccaatggaaaagcatgtcagactcccagctggtaaggggaaaggggcacagttccaggtgacctcactgggtcagcgccccggcttcaaacttaaaccatcgcaaccactgtgctggctcctgtgtacccattccgtactctgttccaacttagaaacagactagaaaggatgatgatagggcctggctcttgtaaaccttacagtctgcaggg

SEQ ID NO: 2812 - DNA, 6000 bp, Homo sapiens
ttgcagaccacaccaaacccagaggttttctagagagggactgttgcctagggctacacaaagggcaaggcctccttgggcttccaccttcccccagctttcacgtgcgatgctgaactatagctccatggttcatccttttcccactgtaccaccccttatggaaaatgaggcctgaattcctattatgcactaccagctgggctaagttgggtgttttcatttctaatttattctaacccaaagagaagataatttggcaaagacatctgcgtgtaccttaaagccagtgtccagatcccaggacttaggagtttgggacttgcttctaccccctactggctcccagtatgactttagacaagcccaagccttagtttcctcccctgaccaatgtgaatgaatggttcttgcctagcccattacacaaaggggtaataatatttagggaaaggggacagaggataggcaaatttattcatcaatgccaaagctctcagtgtggcccaaccaccctgggggctgacccagccagccttaccttcagggcaaaccagccagaaatggggaaggtgaccaacagcagcaagaaccccaggaaactgatgaggccatgacagaggcaggagggccagctctggggtacatctgcaggtgagagcagaggtggtcaactggacctgcacgacagctgccaagcggagtgaacttgggcaagtgtaccttacgcccaccttcccctcgagaggctccttccttctcagggctctcaatctggctccttgcctaatattcccgtatctttgggcagctgcaagttagggtctgttccctcctcccatacatcaacactcatttgtcccaagtccaacaaccctcacaaggccttattctctgctaggcaacagccattcaatctcagaatccagtccgcgtgatgatgctctcctcactggactgagtaggggtcaatcctctcgtttaatttatattgcctacccatacctggcatggagccaggagcacctgggcatctgtaaacatgcactgaatactgctggcaaaacacattcctcctataccatcagccccagaagtgtgctttccaggagtccttatgaagatgatgccttagcctacagggataaatcataaatagcttatcaacgggagccacagatgaggaattagattattattttctattccacacccaactttaatgccttaatgaccattaaaaaatgcctatttcacgagatggcgccactgcactccagcctgggggacagagcgagactccatctcaaaaaaacaacaaacaacaaaaaacaaaaacaaaaaaaaaccctgcctatttcaattcaagaaaattgttaggggtcggggtcaggggcagggctagaaagatgaggcttatccaagccaaatgtcctggcccctggagattcaggagcccaagttgggagcaaagccgagacagctccagaatctgggatgaggttatttgccgctttcctcccaaccctggacaggaagcagtcgggagccctgctccattcttccaggaagccctgccctctgggctaagccccagagcactgaggctccactttgtgcctggctctgatccaccaggcctctcaagagacttctggatagggagagctttcaggacaggaaggccagggagggatcaaatccaaggttaggcggttaggctgaacagcgtgggatctggcctgtaggccaaaggagccacagaagactttgagggcaagacagaagcagggcagatccaacaggcagctgaggacctgtcattttggcctgcacatccaggagatgcctagttcccgggcttctagaggtgccccctagggcgaaaattcttccatttccctgcagcaggtgcctttagggtgctggtggcctcctctgcctagacctcggtttcttctatgcgaaatagaaacctgaaacgtcttcccaggcctaaagggctgataagagccgaggacaaatgtggtgaggtgaggttttggaagataggagcaacgctggctggctctggggccaaagccccatgaccctagggagggcggatcggcgctagcaccaggcgccgggtccagccccctctccacatcgtatccctttctcagtcccccctcgtagggtgcgacggcaccgggccggccgactcctcggaggcagagattcgggcctgggggttgccggccggtcccccccggctccgccgtgccaggcggccactcaccggcccctgtccccacgccgccccgctccggggacaagcagcccttctgcgagcccagaaagccgaagctcgactgctggaagcggtcaaaatcacccaggggcagcgcccggtacccagacctgccgagcatggcttttgacaggagacacgccccgcgcctccgcgcggcgccctccctggccagtgggccctacgcggccccgccctcctggctgctgcttccggcttcacccgcgcggccacccgcggcggcgcgggcgcaggaagaggaggccggccggggcccgcttccgccgtcgcatggctccccctgcgctgggaggaccgaactgcagcccagggctactgggtgtgatcggcgttcctcggaccccgctggggtcatcgcctcctcccctcttctcctactcagccctagaaaagctggaggggaagctgggcacggtggctcactcctataatccatcaatttgggagactcaggcaggaggatcgcttgaggccaggaattcaggaccatcctgagcaacatagtgagagcccatctctacaaaaaatttttaaaaattagcctggcgtgggatgcctgcctgtggtcccagccacttgggaggctgaggcgggaggatctcttgagtccaggagtttgaggctgcagtgagctatgatcgtgccactgcactgcagtcggagcgagagagcaagatctcatcagggtttacaggaagccaatcttctccaggatcaaggacatgctatatcagccttctcagcactccttctctcacactggaggcaggacatgccatatctggactttgggtttctctgggacatagtctgcaaattattcctctttgtgaacccacagcccagcaagcagggactggcatagggcaggtctcaatacttatttgttaagtaatggcctggccaggtcaccgtgatcaaggtggagtaggaaggcctgaactttggcacaaaaagaaagaagtttcacatgcagacttcggggagcatgggagtgtaaggaagaaggggatagcacagagctacatgagggcaggggccccagagcaccacagaggtgaggccctcagtcctgcaggtccagaaagagcatgccccttgatccaggtacctggaattaacttgcctctccagggcttgagaaaacctgaatgcaactcgtgaatttcctttgagaagtgttaacttccaacaggactttggggtagtctgggagcaggctatcttccaaagcaagcaaagaaatgaataaagcttccccagctctgcctcctcagccaatcgcctctggcctccgaagccccatcctgccatagcccacttccaggtcccttgtgcagatggctgcccaccatatttggctttcatggactgattctctaaaggcctgggagtactgaccaggctggagggaagggcaggctcctgaggccttacagtccctaggaagttgcgtatctgcccaacccctgctctccaccctgcagactgtaaggtttacaagagccaggccctatcatcatcctttctagtctgtttctaagttggaacagagtacggaatgggtacacaggagccagcacagtggttgcgatggtttaagtttgaagccggggcgctgacccagtgaggtcacctggaactgtgcccctttccccttaccagctgggagtctgacatgcttttccattggcgaagacctagctggctctcccctcaccctcttcatacccgctctccagctctccccctccctcctgcccccaccacctcagatccaccagcctttccagctgtcactcaaggcatcatcctgctccctcacctccagtcactggcttcccaggatctctgaatcaagtccctcctctgcatcccacagccactgtcctagaccagggcacctgctcctaggttgtcagagtgactgtcccatcatgcacagctgatcgtgttgttccctggttccaaatccttcagcaacttcccatcactcacagaactggttcaatctcctcagctaggatcttgtcctagcacactccttgggtatcatttctcatgaattccctcttaaatctgaaaatggccaaaattagttcccaaacaggcttttgcaagagctatcttttctgtttcaagtgtcccccgtaccccaccacctacaaccctaaatccctggtgaatttccactgcttttgcaggtcccagctgtgggctctcctttccagaatgtctccgtttgcaggcttgctcttccattacatctacggctcttagaaagcaggggctgcgtgtggctcatctttgtacgcccagctcccggcaggacgtggcacgaagcagtgccagtgtgaacggatgaatggatcaaagccgggagcagggctgcccccctgcagctctgccctacctctcccgctttaccgtaagtcagcggtaggtctgcagctctccgcctctacctcctccccgctctgggcgtgtctttaaaacccacagtcggcctctctgccccctagaaccgcccccagcttctgtctcacttcctctccagaggcgggccctgagccggcacctcccctttcggacagctcaagggactcagccaactggctcacgcctccccttcagcttctcttcacgcactccaagatctaaaccgagaatcgaaactaagctggggtccatggagcctgcacccgcccgatctccgaggccccagcaggaccccgcccggccccaggagcccaccatgcctccccccgagaccccctctgaaggccgccagcccagccccagccccagccctacagaggtactattgggttaggggatgatggggttaagctttgttggtttgctgtggtggggagaggcgggaagagagggtctaacggaggatttggtcaagtaccctagagagtgacacaaagcgggaagtccagacaccagggtcctgaccgtctcgggtggggcagggaagggagggtaggatagagtagaaaagaggacacggaggagttggggcggcctcgctgggctgcggtttctccactgagcagttgggcaaggtgagaagggtcagtggcctccgggcctgggcccttccgcccaccctcgagccctgcctcaactttgcctcagatgcaggacttcagattagggaggatggaggtagtacccctgttgcgctggcctggagccaggggcatgtcccaggcacggcaaaactaaaaccaacttcccagatccgaggtgagaaactggctcagactgaagaggtatctttgccaaggcctcccagctcatgtggtttctgcttaaggaagcctccccaacgaacccttctcttgccacacctttcctgcccacctcccacctcccccgacaaaggaactacttgggtttcttgctctgctgcctttcaggcccttttactccccttcatgaaagtacagaggacaccgtattacagtaacttttataaacattattacaactaagaataacattacttaacaatactaggtaacatttatgagcacttcaaatgtgccaggtactgtattaagcactttggtttttttttgttgttgtttgtttgttttgctttgttttttgtttgtttgtttatctgtttgtttttgagacggagtctcacactgtcgcccaggctggagtgc

SEQ ID NO: 2813 - DNA, 6000 bp, Homo sapiens
aaaaaaagaaaagaaaaagaaagaaaagaaatttagaatactttggttaagtttcaaaaataatttaaattgccttaaacctgtttattaactcaaggagaattaataatcttataatatttagtcttatctcttagtaggtttttgtcattttctaggtattttgtaccttcttttttttaatttaaaaaaagttttttagagatggagttcttgctgagttgcccaggctggcctggaactcctgggtgtaggcaatcctctcaccacagcctccctagtagctgggactataggcacacaatcatggctttgtagaattttttaaatagctgctgtgaatgggaagatggatttttttcccatatttcttctcatttgctttgctaagatagaattatgctatttttctttcttaattattatgtaatctagccactttggtgagcaatttcttattaagttagtggtgtttttgcttattgttttgagtattccagaagcaaatagatgttatttcgcctttctgaagatacggttaagtctgggttcttgtcacggagcccttctgggcagtttcccacttcacctctgcctcctccaaagtgccaagcacgcagcaggtactcagtgagtgtcctctgaatgaaggtaaaggaaccgcttggctaaggtcattcctggccctgggtggcagccctttgattcaggatctgcacctcagtcttaccagagggctgggggcttttagacccaggtgtctgattcaggctagccacctcacagacacttgccgcccatttccatctagagggaaagcaggggccagtcaccctagggagaccccattcaggacaaaagaagcttagaaaaaggacccagcggaggctatggccatccagaacgtcttgctctctatccagccaggctgcctgaggcgtgcccttccaggcttggaaccctgtctccaaggaaggggatccaacatcagacacagcccctctccccaagtgtccaagatccaaagggggaaaataacaactgtttcttattctcttccctttattcctataccctatagaattgcccacatttattagtattctgttttttaatttcaaaaaaaggaatacattcatacattcacaaggctcaaacataatctaaaaaggtatgcagtgaatgtcttactctaccctcattccacccatcccatagccacttttattaatttgcatgtccttttaatatttatttattcaaatacaatcaactatgaagatattcttatttttccccattcttacacaaaaggtagcatctgatacacacatttctgcaccttgatttctaacttaaaatatatatcataataatacaaatagttagcatttattgaacactcattgtatgccagtcatttttcaaacttttatccatatattaactcatttaatccttccagtactcctattattaacctcatttctccatggagaattttccttatcagtatataaagagcttcctcaatggcttacagctacatagtattccgttgtatgggtggatcataatttatgtaactaattgccttgtgagggacacgtgggtggcttctaattctttgctattgtggactgtgctgcagtgaatatattgtatggatatcatcttgttatgtgtagagatagagctgcagagcagatccaaagaaagaggattgctgggttaaatgcatttgtaattctgatgggtattgccaaattgccttctgtagagttattagttcttttcataattgcttagtatttctaattaaacgtagcattgatgagcactatgtatcagtctggctggctagtaggctctctgttggtggttccagaacaagttgatctcagtgtagtcccagatgagaccctttcttctggcctcaggtgggctgacttattccttttttttttttttttttttgagatggagtcttgctctgttggccaggctggagtacagtggtgcaattttggcttactgtaacctccacctcctgggttcaagcagttctcccacctcagcctcccaagtagctgggattacaggcgcacaccaccaagacttattcttatcactgccggtgagagtaaattacagcaatatttctggggaactaacagtattttccctggtaatatttgaagaagcagccttgtaatggttaagaacatggactctaagctggactgcctgggtttttatattttctttcgctgctgtaacaaactaccacaaatttaggggcttaaaacaatgtaaatgtattctgttatggttctggaggtaagaagtctgaaacaggtctcactgaggtatataaaggtgtcagcaggctttgctcctttgggaggctctcagggagaacgttttcttgcctttcccagcttctagaggctgcccacattccttggtgcatggcccctttctgtcttcaaagccggcaacatcacaacattcccacctctgcattcatcacatcacatctcctctcattctcctgcctccctgccctttcctttgaaaggattcacgtgattacgttgaacccacccagataatctagaataatctctttatctcaaagtccttaattgaataacacctgcaaagacccttttgccatagtaaggtgacatattcacaggtctcaggaatttgcacgtggacatctttagaggccactattctgctactacagtttgcatctagactctaccacttactaatcgtgtgatcttgaacaaattattttgcctcttgcaccagttttctcatccttaaaatggggataataatggtatctattccactggattgtcaggaggattgaatgagtaaatatttgccaatgcttataatagtatctgagacacaataaatgctatggaagtatctgctagctaaaatatattaaccaggccaggcacggtggctcacacctgtaatcccagcactttgggaggctggggcgggtggatcacctgaggtcgggagttcaagaccagcctgaccaacatggagaaacctcgtctctactaaaaatacaaaattagccggggtggtggcgcatgcttgtaatcccagctactcgggaggctgaggcaggagaattgcttgaacccgggaggcagaggttgcggtaagctgagatggtgccattgcactccagcctgggcaacaagagcgaaactccatctcaaaaaaaaaataaccaaataaaaatattaaaatacaaacactttgatctagcaggcctatatttataatctatttcataggaacaaaagcttccatgattaggctatataacttggatattactaaagtgttgtccatattggcaccaaaagaaaaaaaaaaggaaaggaaaacgaaagaaagaaaatgcacaaacaggaaattacctgaatgccagcaaaacgacagtgattgaatcaattgtggcccatctgggatataccagagctattaaagagaatacatctgatctgtgcctatgcacctagaggaatgctctgagtgaaagttcgttgagaggaggaagttcaaagtaattatatgacttgatttatttctttcttttttttgagacggagttttgctcttgttgcccaggctggagtgcaatggcaccatctgggctcaccgcagcctccgcctcccgggttcaagcaattctcctgcctcagcctcctgagtagctgggattacaggcatgcggcaacacacccggctaattttgtatttttagtagagacggggtttctccatgttggtcaggcaggtcttgaactcccgacctcaggtgatcctcccgccccggcctcccaaagtgctgggattacaggcgtgagccaccgcgcccggccgatttctttctttctttttttttgaacaaacatcagcccccaaaattattgtagatatctaggtcaatcatttaacatgttctgtttcttcctctgggaaatatgtataacgacaattctcactcaaggggctcttgcaaaggttaagtggcatggctgacatgtgtcaagtctgtaccatcctgcaagcagcagcccagtctggcatttgtgtaaggcggtttcagtggagagatgtgtggaagggtgcaccccacgatgctcacctggtgcttcctcggtggggaagggaaattcagaagtggtggaaagagatgattgtcgtttcgtatatctttgtattgtttcccggatgttgaaattgttactgtagtaactttttatactcatgtgttattggtagtttggatactatcaccataaccacaaacactgaattaggaaaagcagaaacctagaaacatgccatgattcaaagtctggtatttttggaagaggaatttaataacgaacgttttaagaggaaaaagtcaggagagtcctaacccaggccaaccttgtgtgtccacagcatctactgccgaggatgttccaagccgctgtgctgctcgtgcgcgctccttgacagcagccacagtgagctcaagtgcgacatcagcgcagagatccagcagcgacaggaggagctggacgccatgacgcaggcgctgcaggagcaggatagtgcctttggcgcggttcacgcgcagatgcacgcggccgtcggccagctgggccgcgcgcgtgccgagaccgaggagctgatccgcgagcgcgtgcgccaggtggtagctcacgtgcgggctcaggagcgcgagctgctggaggctgtggacgcgcggtaccagcgcgactacgaggagatggccagtcggctgggccgcctggatgctgtgctgcagcgcatccgcacgggcagcgcgctggtgcagaggatgaagtgctacgcctcggaccaggaggtgctggacatgcacggtttcctgcgccaggcgctctgccgcctgcgccaggaggagccccagagcctgcaagctgccgtgcgcaccgatggcttcgacgagttcaaggtgcgcctgcaggacctcagctcttgcatcacccaggggaaaggtaagcacgcacgccaccttcctgggcggcctgtgcctctgctgcaccctagggaaggcgagtcagaagagatcatctccatttgacagaaaagaaaactgggtgtttattcagtctttgggggttggtaaggtcttaggttccagggcacaggataagggggagatgaggccctgacaaagggctgcagccacccagaggggacacattttactaatttacaagactctgtggattgacctagcgatgactcatggggaacacgtgaaagttgaaaaactgcaaagctgagaatcagacccagtatcattttggcgccagagggaccaagcacttcaggaggttctcttaagccaccggtgtctcggaacagagaagtcaattgggacctggggttacggtagaagggggctaagaaaacctcctggggatggttggatgcttacccaaaaccatacagtggctcagtggaggagatcccttgtctgcaggatgacctgctgtctgccaacctttgcgcgccctgcctagtgttggacgcttgagaggtaaggagacacagactagtttctgatctcaaggagccagagccacttcacgtagctggagaatgagacagtgctcagctctgcaatccaaatccgggagatgtagcagctgtgtattagctggaacaggggggctttcaaaataaggggtagggggagtgtgccagagagtctccaggagtctttgactaaatctccaagctggaatgtgagctctgagcagctagtataggatgcccttactgggaaaggggagggaggctatggaatctgaaggcacctgggtagggtgccagtgacaaagagcttatttacttctcctggagctggacatgggtcatgaaggataatcttagagggcctggacctgtgcc

SEQ ID NO: 2814 - DNA, 6000 bp, Homo sapiens
gttccagcacttgggaggttgaggtgggaggattgcttgagccagggcggtcaaggctgcagtgaaccatgatagtgcccctgcactccagcctgggtgacagtgagaccctgtctcaaaaaaaaaaagttaaattcatagaagtcgacagtagaatggtggttagcagaggctggaggagagagagggtgggttgtggggaaaaggggagacaccggtcaaaaggtacaaagttccagttaggaggagtacattctggtgatttattgcccagcgtggtgaccagttaataatgatgtatacttcaaaatagctaaaagagggttttaaatgttctcatcacaaagaaataaatatttgaggtaatggatatcctaattagcctgatttgatctttttttgtgttttttgttttcttgagacagagtctcactctgttgcctaggctggagtgcagtggcgtgatcttggctcactgcaacctccgcctcccgagttcaagtgattctcctgcctcagcctctgtagtagctgggactacaggcatgcaccaccacccctggctaattttttgtattttttgtagagactgggtttcactatgttggccaggctggttttaaacttctgacctcaggtgatccgtctgcctcggcctcccacagtgctgggattacaggcatgagccaccgtgcccagccgatttgatcattccacaatatatgcatgtaacaaaacatcacactgtactccataaatttatacaattattatttgtcaattaaaaataaaactatagataagtcaaactggtattctaaaaaatgctccaccagccacagttgggcaagaagaagcaaaaatgaaaactgggaataaacaaagtgataaaaaaatcacaaggagactatccttggcaacatggcaaaaccccatctctacaaaaaaatacaaaaattaggtgtggtggtatgcaccattgtcccagctactcaggaggctgacgttggaggatcacctgagctcaggagttcgaggttgcagtgaaccatgatcataccactgcactccagccttgagtgacagagtgagatcctgtctcaaaaaaaataaaaaagaggttatcctgtctttttagtcaggataaccaaatagccctggtcaatgaggtaaagctatacttgacagatggattctatcaaatatattaagaatgacaattagaaaatcactttgaggctggacacggtggctcacgcctgtaatcccaatactctgggaggccaaggcaggtggatcgcttgaggtcaggagtttgagactagtcttggcaacgtggtaaaaccctgtctctactaaaaatacaaaaaattaggcatggtggcccccacctgtaatcccagctactgggaggtcgaggctgcagtgagccgagattgcaccatcgttctctagcctgggcaacagagtgagacctgtctcaaaaacaacaataaaaacctaaaactttattttcttttgagacaggatctcaaagcgaactttcgtatttttagtaaagacggggtttcaccatgttggccaggctggtcttgaactcctggcctcaagtgattcactcccccctcggcctcccatagtgttgggatttcaggcatcagccactgcgcctggccaaaaacccaaaactttatattcattgaatagcaactacccatttcctccttcccggcagctcctggcaaccaccattctacttgctgcttctgtgtgtttaactgtttaggtacctgatataagtggaaccatgaagtatttgtctttctggggtttttttgcttgtttgttttatgagacagagtctcgctctgttgccaggctggagtgcagtggcacgatctcagctcactgcaacctctgcctcctgggtgcaagcaattctcctgcctcagcctcccaagtagctgggactacaggtgcccgccaccacacctggataatttttgtatttttattagagacggggtttcaccatgttggccaggatgatctcgatctcctgacctcgtgatccacccgccttggcctcccaaagtgtcgggattataagcgtgagccactgtgtccagcctaagtatttgtccttctgtgaccaacttatttagtgcaatgtcttcgaggttacccatgttgttgcatgtggcagtatttcctttttttaaaggctgaataatattccatcatataccacattttttttaggggggcagggatggggataaggtttcactctgtcatccaggctagagtgcagcagcatgatcacagttcactgtagcctctgactcccaggctcaagcagtcctccaaccacagcctctggagtagctgggactacagatgcataccactatgctaattcttttcttatatagagatggaatctccctatgttgaccaggctggtcttgaactcgtgggctcaagcagtcctcctgtcttggcctcccaaagggctgagattacatgcatgagccaccatgcccagcctattatatatcacattttaaaaaatccatgtatcggttggttgtttccacatcttgggaataatgcttcaatgtgtgttatctcttcattggggtggcagttacatgactatgtgtttgtcaaatattgcagtctgaaaggggtaaattttactatatgtaaattatacctttatttaaacaagagaacaacaaagaaattactccatagattatttggtgttcacaaggtatgaaccatatgttttctaatgcagaggtctggctgccacagcccctgtcttgatcagtttcagctcccaataaagtgggacaatgagatattgggtgcctcctgatatgatgcaattcaaagtacagagcagtggccaggcgtagtggcttatccctgtaatcccagcactttgggaggccgaggcaggcagatcacctgaggtcaggagtttgagaccagcctggccaacatggtgaaaccccgtctctactaaaaatacaaaaatcagctgggagtggtggcatatgcctgtagtctcagctactcaggaggctgaggcaagagaatcacttgaacctgggaggcagaggttgcagtgagccaagatcgtgccactgcactccagtctgggtgacagagcaagactccatctcaaataaaacaaaacaaaacaaaaaacaacgaagtacagagcagcacctaggaagtatccctgaatatttatataatcaagcctttagatctaattcccagcatgcaggatgaaccacagatagaggaccaatctctgtgacaatatcagtgacaccctgaggatacattcagacaaattgagaatgtgatgcagcatctatctcaaacaacaactggctgagactcttcagaaaggtatcatgaagataaaagaaggggatgaagtgggtgggagagggaaggtggtttcatctagatttaaaattattaaaaagatataatccagccaggcgcggtggctcacgcctgtaatcccaacactttgggaccccgaggtcgggggatggcttgagcccaggagtttgaggctggcccaggcaacatagtgagaccacatccttacaaaacatgaattagccaggcgtggtggtgtgtgcctgtagtcccagctacttgggaggctgaggctgaggatcacttgagcccgggaggtcggaggctgcaatgacccatgattgtagcctgggggacagagtgagaccctgtctatatgtgtatatatatatatatttgggacaattggggaaatctggatgtggactagctattagatgatattaagaagttactgttggctgggcatggtggctcacttctgtaatcccagcactttgggaggccgaggcgggcagattacttgaggtcaggagttcaagaccagcctggccaacaaggcgaaacctcatctctactaaaaatatgaaaattagccaggcatgtggcacacgcctgtaatcccagttactcgggaggctgaggcaggagaatcacttgaacccgggaagtggaggctgcagtgagccgagatttcaccaccgcactccagcctgggtgacacagtgagaccctgtctcaaaaaaagaagttactgttaactaatttctaataacttagatattattagatattgtcaactaatatcaagttgttaattctattcatttattatggcagaagtattttaaagtaaattagacaaatcatgacatttcatacccaatactttaacatgcatctctaaaaaccaatttcttacaaagccacataattttattacgcctaataaggagacgtagcagggtagtgtgaaggaggggaaatcgtggcgatgggttaggtatacacttagaatgaagtgcagactccacacggaggccctcccgaggcccaaccggacctgacctgggtttgcttctctgtcttcacctgccagcactaacccgcagctatactccagccacacaggacttctttgagttctttcagtgaccaatctctttctcgcctcagggcctttgtactggcggttccttccgccggacacgtcgggtttcctcgtttttgcggactggcgctttctgatttcagagactctccgcaacagaaccatctcaagtgggtctacctcctcgcctttttttgttgttgttgttgcttggctgcgcttctgacagggcaggccgtgatgatgtttgtttatgagttaggtctgactgttcgttggtgcttaagatccccaccgggtccctagggcctgtgcgtaccgcgcacctgtgcacgtcctgcgcgcagctgcaggcgactccgctctggctcgtcgctgctgtttcctgctgggggtgccgaccctgtcccacgctagctgggtgacttcccccaaccgcagagacagcggcgacccggggcctcagacctgcccccgcatctcgccggcgccaggcagtgggaagtcaggttcttccgccacctcccagccaggtaactgccccgaagcctgccccaaagcctggaaccccccaagctcggggaccccaccccgaagaatcgcgaccgcttccctgagggactacacctcccagcggctcccagcgcgctcccgggcaccgcccgttctggcgttaaccctttagtggctgcagtggcgacgagcggaacggagtgcgggttcccggggagggggcgtgcaggatcgggttgtggggggtgcgctgtagggctaaggagaagatgagctttggggggccctgaggaggaggggagtcaggattaaccgaggacagggtcgcagcgggggcatggggaggacgggcccgagagcgccgctcctccccaaaactaggatttggagcctcacgttctcccgcaaaacgagccctgtgggtgccaggccaggggcggctcccaggtgtggagggggcaaggtacgggcgtctgccgtcgctaagtgcccccttccacttaaggcacaccttcgcctccgattccgaaccgcccggggacagaggcaagtggcaaagcagggagggcggaggtgaggagtcgataccccccaccccagggaccaggcgctgccgcgggccctttccctcccccaggcccggggcaggagctcggggagcccttcctggtgcccgccgtcctcctgcggagccatggggagcggctccagcgcatggcggcagcccgcccgcctcgtcctggcccctgccctgacccgggggcggccgcggggatgtccggtccgtggggcaggcccggttctcgctgcggccaagcggccgattcggccgctcccgccgctcccccgcgccaggccgagcttcgctctttccctcggtggtgagcggccagatccaggcgggtcctaagtgtggggggaggggggcgcagggaggggcggccacgcgatcctaagaccctttc

SEQ ID NO: 2815 - DNA, 6000 bp, Homo sapiens
ccctggctaattttttgtattttttgtagagactgggtttcactatgttggccaggctggttttaaacttctgacctcaggtgatccgtctgcctcggcctcccacagtgctgggattacaggcatgagccaccgtgcccagccgatttgatcattccacaatatatgcatgtaacaaaacatcacactgtactccataaatttatacaattattatttgtcaattaaaaataaaactatagataagtcaaactggtattctaaaaaatgctccaccagccacagttgggcaagaagaagcaaaaatgaaaactgggaataaacaaagtgataaaaaaatcacaaggagactatccttggcaacatggcaaaaccccatctctacaaaaaaatacaaaaattaggtgtggtggtatgcaccattgtcccagctactcaggaggctgacgttggaggatcacctgagctcaggagttcgaggttgcagtgaaccatgatcataccactgcactccagccttgagtgacagagtgagatcctgtctcaaaaaaaataaaaaagaggttatcctgtctttttagtcaggataaccaaatagccctggtcaatgaggtaaagctatacttgacagatggattctatcaaatatattaagaatgacaattagaaaatcactttgaggctggacacggtggctcacgcctgtaatcccaatactctgggaggccaaggcaggtggatcgcttgaggtcaggagtttgagactagtcttggcaacgtggtaaaaccctgtctctactaaaaatacaaaaaattaggcatggtggcccccacctgtaatcccagctactgggaggtcgaggctgcagtgagccgagattgcaccatcgttctctagcctgggcaacagagtgagacctgtctcaaaaacaacaataaaaacctaaaactttattttcttttgagacaggatctcaaagcgaactttcgtatttttagtaaagacggggtttcaccatgttggccaggctggtcttgaactcctggcctcaagtgattcactcccccctcggcctcccatagtgttgggatttcaggcatcagccactgcgcctggccaaaaacccaaaactttatattcattgaatagcaactacccatttcctccttcccggcagctcctggcaaccaccattctacttgctgcttctgtgtgtttaactgtttaggtacctgatataagtggaaccatgaagtatttgtctttctggggtttttttgcttgtttgttttatgagacagagtctcgctctgttgccaggctggagtgcagtggcacgatctcagctcactgcaacctctgcctcctgggtgcaagcaattctcctgcctcagcctcccaagtagctgggactacaggtgcccgccaccacacctggataatttttgtatttttattagagacggggtttcaccatgttggccaggatgatctcgatctcctgacctcgtgatccacccgccttggcctcccaaagtgtcgggattataagcgtgagccactgtgtccagcctaagtatttgtccttctgtgaccaacttatttagtgcaatgtcttcgaggttacccatgttgttgcatgtggcagtatttcctttttttaaaggctgaataatattccatcatataccacattttttttaggggggcagggatggggataaggtttcactctgtcatccaggctagagtgcagcagcatgatcacagttcactgtagcctctgactcccaggctcaagcagtcctccaaccacagcctctggagtagctgggactacagatgcataccactatgctaattcttttcttatatagagatggaatctccctatgttgaccaggctggtcttgaactcgtgggctcaagcagtcctcctgtcttggcctcccaaagggctgagattacatgcatgagccaccatgcccagcctattatatatcacattttaaaaaatccatgtatcggttggttgtttccacatcttgggaataatgcttcaatgtgtgttatctcttcattggggtggcagttacatgactatgtgtttgtcaaatattgcagtctgaaaggggtaaattttactatatgtaaattatacctttatttaaacaagagaacaacaaagaaattactccatagattatttggtgttcacaaggtatgaaccatatgttttctaatgcagaggtctggctgccacagcccctgtcttgatcagtttcagctcccaataaagtgggacaatgagatattgggtgcctcctgatatgatgcaattcaaagtacagagcagtggccaggcgtagtggcttatccctgtaatcccagcactttgggaggccgaggcaggcagatcacctgaggtcaggagtttgagaccagcctggccaacatggtgaaaccccgtctctactaaaaatacaaaaatcagctgggagtggtggcatatgcctgtagtctcagctactcaggaggctgaggcaagagaatcacttgaacctgggaggcagaggttgcagtgagccaagatcgtgccactgcactccagtctgggtgacagagcaagactccatctcaaataaaacaaaacaaaacaaaaaacaacgaagtacagagcagcacctaggaagtatccctgaatatttatataatcaagcctttagatctaattcccagcatgcaggatgaaccacagatagaggaccaatctctgtgacaatatcagtgacaccctgaggatacattcagacaaattgagaatgtgatgcagcatctatctcaaacaacaactggctgagactcttcagaaaggtatcatgaagataaaagaaggggatgaagtgggtgggagagggaaggtggtttcatctagatttaaaattattaaaaagatataatccagccaggcgcggtggctcacgcctgtaatcccaacactttgggaccccgaggtcgggggatggcttgagcccaggagtttgaggctggcccaggcaacatagtgagaccacatccttacaaaacatgaattagccaggcgtggtggtgtgtgcctgtagtcccagctacttgggaggctgaggctgaggatcacttgagcccgggaggtcggaggctgcaatgacccatgattgtagcctgggggacagagtgagaccctgtctatatgtgtatatatatatatatttgggacaattggggaaatctggatgtggactagctattagatgatattaagaagttactgttggctgggcatggtggctcacttctgtaatcccagcactttgggaggccgaggcgggcagattacttgaggtcaggagttcaagaccagcctggccaacaaggcgaaacctcatctctactaaaaatatgaaaattagccaggcatgtggcacacgcctgtaatcccagttactcgggaggctgaggcaggagaatcacttgaacccgggaagtggaggctgcagtgagccgagatttcaccaccgcactccagcctgggtgacacagtgagaccctgtctcaaaaaaagaagttactgttaactaatttctaataacttagatattattagatattgtcaactaatatcaagttgttaattctattcatttattatggcagaagtattttaaagtaaattagacaaatcatgacatttcatacccaatactttaacatgcatctctaaaaaccaatttcttacaaagccacataattttattacgcctaataaggagacgtagcagggtagtgtgaaggaggggaaatcgtggcgatgggttaggtatacacttagaatgaagtgcagactccacacggaggccctcccgaggcccaaccggacctgacctgggtttgcttctctgtcttcacctgccagcactaacccgcagctatactccagccacacaggacttctttgagttctttcagtgaccaatctctttctcgcctcagggcctttgtactggcggttccttccgccggacacgtcgggtttcctcgtttttgcggactggcgctttctgatttcagagactctccgcaacagaaccatctcaagtgggtctacctcctcgcctttttttgttgttgttgttgcttggctgcgcttctgacagggcaggccgtgatgatgtttgtttatgagttaggtctgactgttcgttggtgcttaagatccccaccgggtccctagggcctgtgcgtaccgcgcacctgtgcacgtcctgcgcgcagctgcaggcgactccgctctggctcgtcgctgctgtttcctgctgggggtgccgaccctgtcccacgctagctgggtgacttcccccaaccgcagagacagcggcgacccggggcctcagacctgcccccgcatctcgccggcgccaggcagtgggaagtcaggttcttccgccacctcccagccaggtaactgccccgaagcctgccccaaagcctggaaccccccaagctcggggaccccaccccgaagaatcgcgaccgcttccctgagggactacacctcccagcggctcccagcgcgctcccgggcaccgcccgttctggcgttaaccctttagtggctgcagtggcgacgagcggaacggagtgcgggttcccggggagggggcgtgcaggatcgggttgtggggggtgcgctgtagggctaaggagaagatgagctttggggggccctgaggaggaggggagtcaggattaaccgaggacagggtcgcagcgggggcatggggaggacgggcccgagagcgccgctcctccccaaaactaggatttggagcctcacgttctcccgcaaaacgagccctgtgggtgccaggccaggggcggctcccaggtgtggagggggcaaggtacgggcgtctgccgtcgctaagtgcccccttccacttaaggcacaccttcgcctccgattccgaaccgcccggggacagaggcaagtggcaaagcagggagggcggaggtgaggagtcgataccccccaccccagggaccaggcgctgccgcgggccctttccctcccccaggcccggggcaggagctcggggagcccttcctggtgcccgccgtcctcctgcggagccatggggagcggctccagcgcatggcggcagcccgcccgcctcgtcctggcccctgccctgacccgggggcggccgcggggatgtccggtccgtggggcaggcccggttctcgctgcggccaagcggccgattcggccgctcccgccgctcccccgcgccaggccgagcttcgctctttccctcggtggtgagcggccagatccaggcgggtcctaagtgtggggggaggggggcgcagggaggggcggccacgcgatcctaagaccctttcagatggtgggagagcctggagaaagagacagcgtgtgcggagggggtgctccctcagatggggggtcaggaagtctccctcaagtgtctgggacagagggacagcaggggccaaggcggagatgagatccgtgagtgaggggagccgggaagaagtaaggctgcagccgcggccccgcaaggattgggactttcgtctaaacgcggtggaagcccatggaaggaagcggttagcagcaaggcagagtcctgctccctctgcagccccagctcccagcgccctgggctttccaggcacctgtccgggtaggggattgagggccgtggccaggcccgcactttcctgccagccgcagctggccacatgcccatctgaccctccgagttctcctctaaaaatggggctgacagccgctacctcacaaagtccacaccgggctcaacccgctgccttcctccccaacaggactctgccaccctccctcaggatgcctgagggccccgagctgcacctggccagccagtttgtgaatgaggcctgcagggcgctggtgttcg

SEQ ID NO: 2816 - DNA, 6000 bp, Homo sapiens
cgtgcgtgtgtgtgtgtgtgtgtgtgtgtgtataaatatataaaagaatccttgtcctgcctgtctcatgggcagcttggaggaaacactgtttttttgttttttttttttttgagatggagttttgctcttgttgcccaggctggagtgcaatggcacgatctcagctcaactgcaacctccacctcctgggtttaagcgattttcctgcctcatcctcccgagtagctgagattacaggtgcccaccaccacacctggctaattttttgcatttttagtagagatggggtttcaccatgttggccaggatggtctcgaactcctgacctcaggtgagccaccccactcggcctcccgaagtgctgggattacaggcatgagccactgcgcccagcctggaaacactattgacaagtgaggaggcctagtccattgagtatcagctagggctacaaacttccaaatcggtgaatcaggtccagagagggacaagtgccccagggttacacaatcatttgctgaagcagaggttgctgccatctttggcctcacccaactggaccacttccttgggcactgagtgacatagctccagcaggtctggattctgcagcttggtccttatcttctggctcagggtcagctccgggctctgaggaaggggcaggggcaggacctgtctgtcagcagggccatgtaaaggcagctgaccttctctctgagcttggtcagactttgggcagttcatcccctccccacccctgttgttgagctaagctggggacacctgaccccacccatctccttgccggcccatgtggacaccagtgtgccagcacgtgtgctccatccctctctgggcttaccggcctgtgctgctgcagggcctccaggaccgagcgggccttctcaaagggggggatcttcagcctgtagtgggggcaaggcaagccatgctaggcagtggggaatgtgggcacacctggcccaccgcagtccccatgcccatgcctgcttgctgaccggtacaggatctctgcccgcagatagttgccaatgccattgaagaacctctggtccaggagggcctcgcagatgggccggtcaaaggccttatccgctaggtttcgtagcacattctccctggaggaacacggtctgggtgcgtaagacccatccccaccctccatgggatggggagaggggctcagagaacctgtttctgggtgcaaggggaaggaaactgggagttacagttcctcttctccctgcccccgttttcctatctgttaaatgggaacatcaagggatttaaattcattgtgaaaggacggccaggtgcagtggctcatgcctgtaatctcagcactttgggaggccgaggcgggcagatcacttgaggtcaggaggtcgagaccagcctggccaacatggtgaaaccctgtctctactaaaaattcaaaattagccaggcatgatggtgggtgcctgtaatcccagctacttgggaggcctgaagcagcagaatctctggaacctgggaggtggaggttgcagtgagctgagatcgcagcattgcactccagcctgggccacagagcgagactccatctcaaaaaataaaaacaaaattaaaaataaattcattgtgaaaggtgaaaaatactgatctaaagtaacttgaggctggtgtggtggctcacacctgtaatcccagcattctgggaagctgaagcaggaggatcacttcagcccaggagaccagcctgggcaacaaggaagaccccatctctaccaaaaatttaagaagtagccaggggcttagtgatgcactcctgtggttccagttaatcaggaggttgaggtgagagaatcacctgagccctggaggttaaggctgcaatgagctgtgatggcgccactgtactctagcctaggcaacagagcgagaccctgtctcaaaaaaaaaaaaaaaaaaagcaacatgaggttgtatatgaggttgtgtgtttatcacctcagactcctcaggacatgagaacagtgtggccacaggacctcaagtgtgtttgcagtctggagctccctgtatagcatttgtggtgggttagagaccatatgtgggtttgccattggtagggtccattcttctcaagatcctggacattgtctggctctgtgcaggagatatgtggagtaccagtgagggccctagcagcccccaccccacctccaagggtcatgggtctcccctcctcaccgtgaagaggatgtgcatcttgtttctttgcggaaaagggtcatggcaagactgactaatgggtgtgatgagtgggtcagaagacagagttctggggtgaaggtacaagggtagcctgggaggtgccctgatccctgaggtaagccaattgccacacgccccagctgggggactaagaaaacagcccaaatgctcgtggtttgagagaaacttcagagccagctggcagagttaacttgtggcgtgactccccaggaaggctgaggtgggaggaatccaggaccaaagacagatgtttccctggggatgtgcttggagttcacacaggggaaggccaggagtcaactttcttctaaggcaccagagacatctccaacccatcccacaggtatccaagtctcctaagggtcaacggacgcacagcatcccccagaaagggagaacttgccaaccctactccaggcctctgcatttgtgactcttgccagttccaatgccttcctctggctggctccttctcatcagtcaggcctcagctcaaacctccctagagtggccattgctaatgtacccccaccctcggccaagtcatcctctacctccttcacctgttgggttttcctaaggcatgggtccatttctcattcccctatcctatgtgaacatcagttctgtgggagcagggaccacattcatcttgttcactgctgtaccccgagcccctagaacaaggcctggcatgaagcagagactcatacacgtttcctcttcagaggaaaggaagtggccaacactgtgccatgtgaggtgacctgcatcacatcccaggtggggctgttacaccctactgcaggcagggaagtggcgcagaggagaccacaggacacagaatactgggcaggccggatgtgggagaccacaaagcccaaggcggaagccatgtcatgagatagtcccctccccatccccttgaaacaattccgctcagcctcacttaccatattaaagcccctccaccttcttagcctcctgggagccctgagaggtggtgtgggattgtgggtgggagccccagcttctctgacactaactggccacatgtcctcagggcagtacctacccatcctcctcttggctctcctctctcctcccccatcagttattattatcattattttttgagacagagtcgtgctctgttgcccagactggagtggaatggtgctgtctcagctcactgcaaccccggcctcaccggctcaagcgcttttcctgcctcagcctcccaagtagctggggttacaggcatgtgccaccatgcccggctaatttttgtattttcagtagagacagggtttcaccatactggccaggctggtctcgaactcctgacctcgtgatctgcccgcctcggcttcccaaagtgctgggatttacagacttgagccaccacacccggcccccaattagttttgagtttccatgcccactggctcagggagctgacccaggacaggtatactgtcttgatctgcagatgagagaactgaggcccagaaggggcagggactcgccccttgttggccaagaaggcactaagagagtcaggtgtggagcccgcgactatgttcatcacacctggtgctggccctacctgaactgctggtactcctgcaagacacagggcccgcggcccggctgccactttcccccaaggtcccagcggccgaaccggcggatgtccacgaaacatagggcgagccgggggccaggcggggccgtgtaaaagcgcaggtgggcatggcgtggcagctcctcgcggggcaccagctgaaaagagccggacatgccgaagcggaagaccagggccagtggctcctgttggggctgggccccaggcagagggctcagtatcaggcgcagctccttgccgcgggctgaagctgagatgcggtaggcactgctctcaaagggcacctcagggttgcggctgacagaggacttctccacgcagccgccgaacaccagcgccctgcaggcctcattcacaaactggctggccaggtgcagctcggggccctcaggcatcctgagggagggtggcagagtcctgttggggaggaaggcagcgggttgagcccggtgtggactttgtgaggtagcggctgtcagccccatttttagaggagaactcggagggtcagatgggcatgtggccagctgcggctggcaggaaagtgcgggcctggccacggccctcaatcccctacccggacaggtgcctggaaagcccagggcgctgggagctggggctgcagagggagcaggactctgccttgctgctaaccgcttccttccatgggcttccaccgcgtttagacgaaagtcccaatccttgcggggccgcggctgcagccttacttcttcccggctcccctcactcacggatctcatctccgccttggcccctgctgtccctctgtcccagacacttgagggagacttcctgaccccccatctgagggagcaccccctccgcacacgctgtctctttctccaggctctcccaccatctgaaagggtcttaggatcgcgtggccgcccctccctgcgcccccctccccccacacttaggacccgcctggatctggccgctcaccaccgagggaaagagcgaagctcggcctggcgcgggggagcggcgggagcggccgaatcggccgcttggccgcagcgagaaccgggcctgccccacggaccggacatccccgcggccgcccccgggtcagggcaggggccaggacgaggcgggcgggctgccgccatgcgctggagccgctccccatggctccgcaggaggacggcgggcaccaggaagggctccccgagctcctgccccgggcctgggggagggaaagggcccgcggcagcgcctggtccctggggtggggggtatcgactcctcacctccgccctccctgctttgccacttgcctctgtccccgggcggttcggaatcggaggcgaaggtgtgccttaagtggaagggggcacttagcgacggcagacgcccgtaccttgccccctccacacctgggagccgcccctggcctggcacccacagggctcgttttgcgggagaacgtgaggctccaaatcctagttttggggaggagcggcgctctcgggcccgtcctccccatgcccccgctgcgaccctgtcctcggttaatcctgactcccctcctcctcagggccccccaaagctcatcttctccttagccctacagcgcaccccccacaacccgatcctgcacgccccctccccgggaacccgcactccgttccgctcgtcgccactgcagccactaaagggttaacgccagaacgggcggtgcccgggagcgcgctgggagccgctgggaggtgtagtccctcagggaagcggtcgcgattcttcggggtggggtccccgagcttggggggttccaggctttggggcaggcttcggggcagttacctggctgggaggtggcggaagaacctgacttcccactgcctggcgccggcgagatgcgggggcaggtctgaggccccgggtcgccgctgtctctgcggttgggggaagtcacccagctagcgtgggacagggtcggcacccccagcaggaaacagcagcgacgagccagagcggagtcgcctgcagctgcgcgcaggacgtgcacaggtgcgcggtac

SEQ ID NO: 2817 - DNA, 6000 bp, Homo sapiens
catgcatactccccatcttccttgtccctgcaggtatacccgtgttcattattttcagatcctttgtaggttcctcttcccacaatttaaaaaatacagtcaaacctctgtttcttatttcatcaaccatagacaatatctggactctacattgcaaaaaatgagacaaaaataatactcatatcattaccattaaaaaaaacccagaatcccctagaataaaggacagcaaactttttctgtaaagggccagatagtaaatatactgggctttgcgggccaacaggtctctgtcccaattactaaactcttccactatatcccaacaacaggtacagacaacagtaaattaataggctgtgttccaataaaactttacttacaaaaacaggcaattggccagatttgcccagtcgaccatagtttgccaacctctaccctagaccagtggttttcaatgcaggctgaacatcagtcagctgtgaagcatacagatgtttaagcttcaccctggacttctggatggggtatggaaatcaatgttgcaaatgtcccaatagaatcagatgtgaacacattgtgttgcgttcaagatcttccactgtcttagtccaagctgtcttctggctatttctagctaagttatcatctaacttatcatctctaataagttaacttattaatacaattaagaatgccttaagaaatccttaaggaaaataaggatttttattttcagatggtgaaaattaggtaccaatagggaaatagggttagcaagagaagccaagccttggacctagtagatctgtctcagtctagagctttgctcaccaagctgtgctttttaaaatttgaacacacacaatcatccttcagcaatggagctggaaataaacttgctgttcctctaggcctacacacatatatcagattcatgtttgtacccaccacagccacttgaaatacaatagactccattttagaaattatattataatctaaggactactctcgccccagccctacctgcttttctagaggtattttaaaaggcaaatcaaaaacacattggtattcaaagtttacaactatattctttcctgtgggtttgaccttagaagtgattagaactgcctcgcaatcatacagcacataccctgttcaattatccttccattctcctagatgactcttttatagcttcttttgtctcctctaacctccaactccctgcttcctcattgctgagcggatgacctccacaggggaatagaagcaatcagactttctcccagctcccactactgaacatctgtgcccacagcctttgcgctctctcctgttacagtgctccacttgtgtattagcccctgaaggacactgttcccgcaatgttcccactccagtatcacttgttttttcccctctatactgcactgctcccaatggcaaaacatattgttatgttccaaactgaaaaaataacagaacaaccctcgaaaacctcttgaacccacctcctgggagctattgtccatttctctattcccttatagcagagccctcttaaggaactttaaggtactgactatacttgctgtttcttcctatcctctgcttctattctccttgaacccatttcaatcagatattagcctctaccactccaccaaaaatgctttaatccaactaactccacattactaaatataataggcaattctgttattgatctagcaacctatcacatcagcagcatttgacacagctgatctccccaccttgagccaaattaaaaaacaaatgttctctcctggttttcctattacctctctggaagttccttgtctcttctgatggttcttcctagtctcccaaatctctaaatgtgaaagcgccccagggttcagtccttggacctcttctcttcatctacatttatggtattaatgattttgtcatctcatggttttaaatatcatctctatgatgtctcccaactgtatatctctagctaaagtctgaagtctgactcttgaactccatttctttttttgcttgtttgtttttttgagatggagtctcgtccaggctggactgcagtggcacgatcttggctcactgcaacctccgtctccggggttcaagtgattctcctgcctcagcgtcctgggtagctgggattatagacccacgccaccacacctggctaatttttgtatttttagtagagacggggtttcaccatgttggtcaggttggtctaaaatgcctgacccggtgatccgcctgcctcggcctcccaaagtgctgggattacaggtgtgagccaccgcgcccggcccttgagctccatttctaatggtctacattgtgtctccacttgaatgtttattaagaatctcaaccttaacaactcccatccaaactcctgcagtcttccccatcttaatcaatgacaactccgtctttccagttgtttaggccaacaaaatttggggtcttccttcgctcctttttctcacactgtatattaacaaatcctgcttgttctaccttcaaaatatgtcagaccattcataatacctccatggcaataaccatggtccaagccaccattgtttcttgtctggattatttcaatagtcttctaactgcttagaggacttttcccagcttccattcttgctctccaatggtttaatatcaacacagcagccaaagagcttacaagatcttgtcagcaagatcatgtcaaccctttattcagcaatttccattggcctcccatttcattcacagtaaaagctgaagtcctcacaacggcctacaaagtcctacagaatgtggctatgcaggcctgcttgacccccacttcccctttccaaccgttatactcctacattttacttgttttctatttactgtcttctacccactggaatttaagttctatgagggcagggctttttgtctgtttggtcagggatatatccccaacactctgaacagtgcctggcattgttgaagaaatgactacaacagaatcttggtttagatgctttcagcagctcctcactgccttcagtggggacagcgtaaaagctccagtgtgacagacaagacccctggcattctgatgccttcttgtcttgttggcctcatctgccatcacatacacacctgaacacaccatgttttttcataccacatgcctttacacagatggttacctttgtctccaatgacccacttcaacttgtccagatgaactcccattcacttctgagctccatgttcttttctccatggtcttgcctgatttcctcaggaatgagacacttattctttttttttttttttttctttgagacagagtctcaatctgtcacccaggctggagtacagtggcgtgatcttggctcactgcaacctccgctccctgggttcatgcgattcttctacttcagcctcctgagtggctgggattacaggtgccagacatcacgcctggctagtttttgtgcttttagtggagacggggtttcgccatgttggccaggctggtctcgatctcctgacctcaagtaattcgcccaccttggccgcctaaagtgctgggattaaaggcatgagctactgcacccggccaggagttagacacttatgatttcatacttccaaccaatgcttacctccattatattattgagcagattatggttaaaatgtttgcatgtttgtcttccctcaaagactgtgaactacttgtggggaggaatgatcttttgtatctgtattcacggcacctagcatggtgtctcactcatagtagattcttggtaaatgtttgttaaatggatgtgaagttaagtggatgtgtatacagcatacagaggtggtggcactggtgggaagcaagatgccagttcctagggctgagcacaaaacccaccctggaccatccgtaagacgtgcaggaacatctgttccatcgctagcgccctctacctccccattttgttttggaggcagggaaggttattggtctgaaaagatctccatctcagaagaaaagaacgctgatacatgttatggatatctcacattcactcattgatttaacgaatgttcactgaacatttactctgtaccacggctcatctgattctcacaacctctctcagcattatccgcatttttagatgagaaggctgaggctcagatttatttgcataaggtcccacggatagcaagtgacatagctgaaaattcactggttctgactctggagggtgtcgggcaagagtcaggggttgcgggtctccagagggctggtccaagtggggctcacctgaacttggtgtggctgggagccgcgttctgttcaactttctgcttggccgcagcgtcttggagctgtcgagcgcctgtgcagatggtcccggccggcgttctggccacgaccctgctgggaagaaaagctcggtgagggccacggcctaacggtcactggggcccgggtggctcaagggacacgagtaggagcatagtcctggaggtggcggtgggctcgagggggcagtcatttgttacccggctgtctggggccaagtccaggaccgcaggaaccgcgaccccgcgtttctcacagcctgcatgacttgaattgaccccagtcagtttccgtctgcagcgacagtcacagctgcgccggcgccggtaccatgagtgcctgtcggggaggggacagaagggaaagtcatctactcttcattaggtccactgaatatttttatttccatttaaatgctcaataagactttcactgtagttcaccaggggattctttcccttttttaatgttctgagatggtgggtcaccccctccatatgcgaatggttcgttctagcagttccgggactgagctttcccctagtttgccgctcccgcggctgagggatccctgggagccgcggtgcattgtgggagaacgaaagatggcggcgcccgtaaggcggacgctgttaggggtggcggggggttggcggcggttcgagaggctctgggccggcagtctaagctctcgcagcctggctcttgcagccgcaccctcaagcaacggatccccatggcgcttgttgggcgcgttgtgcctgcagcggccacctgtagtctccaagccgttgaccccattgcaggaagagatggcgtctctactgcagcaggtgggactgagatgcagggttcagagtgacgtttattctgcgtgactttgagcgagtaatttcacctctctgaacttaagtatacggtacttatccgcagaatggtacctaccttactgacttggtttggtacatagatgttcaacaaaaagtggtttcttttcattggccgtgtttattgtcaccttagacaactctttggagatactctacttcttgttcatgcaacacaatagggatcctgtggtgaacaagaatcggtccgtgtcactaggagcttacaagtctggagggagaaagtctttgtgatgtgatgaatgttaagaaggaaatacaagaggcggtgggcacatctgtcagatgcctatgataagcctactctgttttatctcatggggctatctgtgtgaggggcaagtgaggaagcatgggcaaaaacagtgtagtggctgtgaaggtgtgaggtcgctacagaaagtgtttgaagggtgatatgtttcctcagaatccgagatgtttttgtcttggtctgttgagaactataaacttctcttctgtgctttttgcttgatttattcatttactcgctcgcttgacaaatatttgttactcaacctacagatgttcattgtgcccatactatgcatcagagagtatgttaagtgatagagatgctgtaatgaataaggcagaagtagctctggttctcagagtacttcagtctagttgagtgaggggatcagtcagtaaccaaataatcatacaact

SEQ ID NO: 2818 - DNA, 6000 bp, Homo sapiens
tactggcagtgtggagccagaggggaggaaaggagcgcactttcactttttaaatatacagtatatactcttacattgcttgagtttttctttgccattttatattatttgtcagtttagtaaatttgtaataagtcaatacactattttatatgcatctattaaacataaatatgtgttttaatatatttgatatatttccttttacatttacttattacaatggcaatgtttaaaggaaagcatagtgcttgggtagaacccctttcctcactgcaaacagaaaggggagctgagcaaggatcagttgtgaatgtttgacgttaagagacgttgagcatctggacacaatgatcctcgcaagaaactcagctgctgactcctatgtgatggctgaggagactgagaaagcagcaacctcctctcctaccatattccattctgtcttgatgtctctcctgcaggccacacaggccccttgggagagtcaagggaacacacactggctaccgacatttcgttagcaggtacttgtgctgatgggagggcaggtaaagtggctgtgcaccaccaaatccatttagtcaacattcaacaaatgcctatgtgccaggtactttgctgaaagctaggatcagagagaggaacagatactgcccacatgtttaaggaagtcaaaattctgactagggagaaaaatgtgttagtaaacaattatagtgcaatggcataagtgaaagaatgtattctccactagaacacaagctcctagggagtagggtagtgtcctgttcatcactgagaccctatatgtctgttgcataaatggaataaggacacacaccagtgctacgggagcctagagagaggagtagctctgtcttcctgaaggctcaggaaaggtttcaccacatacggtataatgtataaactgtcttaaaaactgagcagtcaggccaggaaggagtaaagtatttcatcagggaccagcaggccccaaagcagagacacatgaaagaccatactattcaaggaatgcaaaaggtttgttaagttagaacttgaattttacattaatgaacagcaagacggcagactgatgagactgggatcagggcaaataagatttgcaggccatgcttgacagttagaatttttattggaaaccttttaagaattccatgcagagaagtgacaagggatgtgtgtttcagaaagctcattttggcagcactgaagggcactccacaaaaccaaggttaaacttactgggcatctaattcaatagctcagtatagtacttctcaaccactgtaatttgctccctgggaaatatctggccatgtctagagatatttttggttactgcactgggggtggggtcaggggatgaggtagtgctactggcatctagtaggtacaggccagagatactgctaaacatcctataacacaaagaatagctccccacacttatccgaccccaaacaccaataatgccagagatgggaaaccctagtctagtgagaagtgaagagggtcacagctaaagctgttagaacaaagaggggactatttagaacagatcacgagggactcaaggacttatggatgtgggaatgaggtcaaggacaattctgaggtttcaagttgagtgaacagataagcagtgatggcaataagcagtgctgcaaagataagaagacaagcaggctgagaaaatggtagaaatatcaattttgaatgtactaaattttaaaatctcagtggaacaaaggattctcacctggtctaaaaataaaaataaaaaaaaaataaaaaaaatccttacctgggtttttctggctgaaatttttataaacttcaaaatttccattaaccttcccacccccacccttaatccaattccccagtcagcctaaaaatcctctggctgagtctgaagtgaattttgtggaatttagaggaaggcagaaaacccacctgagagtgtggccagggttcgttcagctgttcctcgaagggtctccccaggctgccactctgcctggggcagtatccaaacatcctggtctccaaacttctctctgactaacaggacaaggttcctgtctagcttcctgttcagggatgttcggtcattcttttcatcagcttctacagcaaagggggtcagaggaggtaagaagactgtgatctgccagaaccaagaaacctggagttttacaatcttcctttaagatccacaatccttgccctcaaagagcttagaaccaaattacacctcgacccatctctctaactctgacctcttccagggaagagtctcacaatcttgaggaaactaaaaggtaagaaatcaagaggtaagcttctttgaacagcaaaccatattttgagtcttcaaaaaagaaacaatgatcatactaattcaaacacaactacttcattggttttgatactattactgacttaactagcccctactttctctgttcttcagtcttcatctgtgaaacaaggaaaacagaactcaatctcccgctttaagagggatttcacataaaacacaggaattagtggaaaaaggcttcatttgccccactctcagtctcaaacttggagttaaacacagataacattcacaaagtttaactgagagaaaaggctattccaatacccttacctctcacccgaaaataagacagactttttaagtcgtattatggtagatgtgagcaacaaagaaaagaatatgaaattatttgttacttaaaacacaaagcaggggccaagcaactgtcttttatttgggaatccaaataccccttttcccttccttctggctggcctaaaaggatcacaacctgttatgcgagctccaagtttgaactgtagaaatttctgctcccacatatcttccaaatcttgcgccagcaatatatcctgttcatcttcttcatcatgaaggtcagctttcttctttgccagtcgctggttttcatccagagcacgaagctcgtggtctgaatacaggcttctctctatctcaatctgggaaaattcaaagggcaaaaaactaccttaatctggcaaaattaaaaggaaaaaaaaaacaggaagaataaaacagagacatggcacacttggcaagctcagaagtttatcacccaacataaccagatacacagtcaaaacaccatgcagaaaggaaatggagggaaaaaaaggtcctctgaactttgggcttgagttacatttgccaaaaatgttacaatgtcactgggggtcaagagtgctacaaaaacagagagctgggttgggcaatgcctgctgactcaccacaatccagtcatgtcagtctttgatcagaatctcactcaccaaggactttcctgttcagggactttcaagaggttgttccttcttcctagaatgtttttcctcacattctttcttctgggagagtcctactcatctttctgatttcaatttaaatatgactgtctcagagagacatttctcataaagagaaaaacctgtattcagaaagtctgaggcattccttgacactcaccataaaatcaaaatgtgatgtatttgttaaacactcttatagtgccttgtgttttccttaacaacacttatcagggtctgcatttagttgtatgattatttggttactgactgatcccctcactcaactagactgaagtactctgagaaccagagctacttctgccttattcattacagcatctctatcacttaacatactctctgatgcatagtatgggcacaatgaacatctgtaggttgagtaacaaatatttgtcaagcgagcgagtaaatgaataaatcaagcaaaaagcacagaagagaagtttatagttctcaacagaccaagacaaaaacatctcggattctgaggaaacatatcacccttcaaacactttctgtagcgacctcacaccttcacagccactacactgtttttgcccatgcttcctcacttgcccctcacacagatagccccatgagataaaacagagtaggcttatcataggcatctgacagatgtgcccaccgcctcttgtatttccttcttaacattcatcacatcacaaagactttctccctccagacttgtaagctcctagtgacacggaccgattcttgttcaccacaggatccctattgtgttgcatgaacaagaagtagagtatctccaaagagttgtctaaggtgacaataaacacggccaatgaaaagaaaccactttttgttgaacatctatgtaccaaaccaagtcagtaaggtaggtaccattctgcggataagtaccgtatacttaagttcagagaggtgaaattactcgctcaaagtcacgcagaataaacgtcactctgaaccctgcatctcagtcccacctgctgcagtagagacgccatctcttcctgcaatggggtcaacggcttggagactacaggtggccgctgcaggcacaacgcgcccaacaagcgccatggggatccgttgcttgagggtgcggctgcaagagccaggctgcgagagcttagactgccggcccagagcctctcgaaccgccgccaaccccccgccacccctaacagcgtccgccttacgggcgccgccatctttcgttctcccacaatgcaccgcggctcccagggatccctcagccgcgggagcggcaaactaggggaaagctcagtcccggaactgctagaacgaaccattcgcatatggagggggtgacccaccatctcagaacattaaaaaagggaaagaatcccctggtgaactacagtgaaagtcttattgagcatttaaatggaaataaaaatattcagtggacctaatgaagagtagatgactttcccttctgtcccctccccgacaggcactcatggtaccggcgccggcgcagctgtgactgtcgctgcagacggaaactgactggggtcaattcaagtcatgcaggctgtgagaaacgcggggtcgcggttcctgcggtcctggacttggccccagacagccgggtaacaaatgactgccccctcgagcccaccgccacctccaggactatgctcctactcgtgtcccttgagccacccgggccccagtgaccgttaggccgtggccctcaccgagcttttcttcccagcagggtcgtggccagaacgccggccgggaccatctgcacaggcgctcgacagctccaagacgctgcggccaagcagaaagttgaacagaacgcggctcccagccacaccaagttcaggtgagccccacttggaccagccctctggagacccgcaacccctgactcttgcccgacaccctccagagtcagaaccagtgaattttcagctatgtcacttgctatccgtgggaccttatgcaaataaatctgagcctcagccttctcatctaaaaatgcggataatgctgagagaggttgtgagaatcagatgagccgtggtacagagtaaatgttcagtgaacattcgttaaatcaatgagtgaatgtgagatatccataacatgtatcagcgttcttttcttctgagatggagatcttttcagaccaataaccttccctgcctccaaaacaaaatggggaggtagagggcgctagcgatggaacagatgttcctgcacgtcttacggatggtccagggtgggttttgtgctcagccctaggaactggcatcttgcttcccaccagtgccaccacctctgtatgctgtatacacatccacttaacttcacatccatttaacaaacatttaccaagaatctactatgagtgagacaccatgctaggtgccgtgaatacagatacaaaagatcattcctccccacaagtagttcacagtctttgagggaagacaaacatgcaaacattttaaccataatctgctcaataatataatggaggtaagcattggttggaagtatgaaatcataagtgtc

SEQ ID NO: 2819 - DNA, 6000 bp, Homo sapiens
tcactgagtcagagaagaggccactcagcatccaagacagcttcgtggaggtatccccagtgtgcccccggccccgggtccgccttggctcggagatccgtgactctgtggtgtgagagctgacttccagaggacgctgccctggcttcaggggctgtgaatgctcggagagggtcaactggacctcccctccgctctgctcttcgtggaacacgaccgtggtgcccggcccttgggagccttggggccagctggcctgctgctctccagtcaagtagcgaagctcctaccacccagacacccaaacagccgtggccccagaggtcctggccaaatatgggggcctgcctaggttggtggaacagtgctccttatgtaaactgagccctttgtttaaaaaacaattccaaatgtgaaactagaatgagagggaagagatagcatggcatgcagcacacacggctgctccagttcatggcctcccaggggtgctggggatgcatccaaagtggttgtctgagacagagttggaaaccctcaccaactggcctcttcaccttccacattatcccgctgccaccggctgccctgtctcactgcagattcaggaccagcttgggctgcgtgcgttctgccttgccagtcagccgaggatgtagttgttgctgccgtcgtcccaccacctcagggaccagagggctaggttggcactgcggccctcaccaggtcctgggctcggacccaactcctggacctttccagcctgtatcaggctgtggccacacgagaggacagcgcgagctcaggagagatttcgtgacaatgtacgcctttccctcagaattcagggaagagactgtcgcctgccttcctccgttgttgcgtgagaacccgtgtgccccttcccaccatatccaccctcgctccatctttgaactcaaacacgaggaactaactgcaccctggtcctctccccagtccccagttcaccctccatccctcaccttcctccactctaagggatatcaacactgcccagcacaggggccctgaatttatgtggtttttatacattttttaataagatgcactttatgtcattttttaataaagtctgaagaattactgtttaatcctggctcttcctcttcaaggacagttgctttttgaggtaggtctagtcttctgagttctgagaggttctgaacctcttctttgcaggctcaagtgagccagagtcagcctagcctggtcagcaacgtctccctgtggggcggctctgaggtggggagcttaacgcactgataggcggaggcagggggttcattgcgtttacctcaaccccttcattctgcatccccaattcagtttagcaagggtagggacacaagggaagggatgggatgggatgggggccctgtattaaagtttttaattcttcagatcatgcagtaaaatagactttactgatgtacggttctttacattttgatgcatgcagagactcatctaaccaccaccccaatcaggatacaggcgagtcccacacctcctgctgccccttcatcctcacaccctcccacggggacagccagcgtgggtgcggcttgacttcccgctggcctctgctcgatatgctgcttattcctaggatgattgaaggctcttagaagagaagtccagtccttcctcataccagtgtatctcatgtcacacatagggtcaaacttctaaacctttattactgattagtacaaacacaaacggagcaatgacaacagcagtgaggagaggccctgacaacgagggccgcccctgcccggggtgaggctgcacagcgccagctccaggctgggccagcttggcccgcactggcaacacaggcttgaccttggccacagctcagcagtagaaaggttcttggacagggtgccaggacacacgctggggctgctgtcacaggacaatcttaaaggagctgaacaagagaaaagcggtgggttttctgctggaagaggagggcagggactaaacccgaacttgcccccttctccctttagacccttctttggaacgggctatgttccgtgtgtcagccccctctgcaagaactccccgagacatccagagggagctttctggacccacacactgggtcagagcttctaaacctttattactaatgagtacaaacacagagcaatgacaatggcagtgggaaggggagaggtcttgacaaggagggctgcccctgcccggggcgagactgccagcttagccggccctgtgtgtggggactggggctttctctcaccctggcaccacctcctgtagccatgccctaggcccagaggcagcaggtcggaacctgcaggtacccagaatgaagggggaccactgtcatacctggcaaagtctggagaacgggagatgacgtgctggaactcagagaggttgatggttccatccctgtcaatgtcagactcctccaggatctgggaaagggagagtttcaggccagagccccaactgctccctcccgctcccaggcctgctcagctgctcacgttgtcgatgagctgcttcatctcagacgcactaagccgtgtgtcctcgccctctcccgtgaggcagttcaccagccggctcaggtcttctctgttcaaggttccgtcatcatcaaagtctagagagcagacacaggaagccaaaagacacggttgggaggggctctgaggttccccaaacggcgcccatttcccaagcagggccaccacaaagcccacgtgggaaggggtggtgtcctgccgggctgctcctggttctcaccaaagatgcggaaggcataatgggacttgatgtctggcgtggctgtgtcactgaacacactgaggagatccaggaagtcctcaaagctaaggctgtctttggctggggatgtggagaagaccctgcagattcgctccttgaaggggttggcctaggagaacaaacgccacaggacgtggcccaggtcacacgctcattaaagcctaccagaaacttgagagagcaggtcacaggaccagcaccagcgagctcagcctcgtgggggtgaacagtcagtgctttggggccaacatggagggcagtgggggcacaggaaagcaaactgacccagctggggaagggactgagatggcttcctgggagtcaagtgtttaacccaaaggcaggtcacatacaacgtaagtgtgggcagagagggaagaagaagtcatcctaaacaaagggaacgagatgggctggttattttaaaacacaaatatttacttgaacagctattgtgttacaggcaccgggccaggccctttgcacagaaattttgcagcagccttacggagtggcaatcagcctctagaacacggttcctcaaactctaatgaggtacctcaactcctcttaagggacaaaacttctttgaacttccaagattatgttctagaatccccatttgaaaagcaccattctagataattctgccaggtgattttggtaaagtccttgcccctagaaaatcagaactaagcagaaaaatgaccagagtggggaccagtgaccccatgatcccaaagctagtggcagatggagttagggggtctagcagggagggagtggtgggagaggtgtcaaaggaggggagcgcttgcaccttgagctctggaaggctgagaatctgctcgaagggcacttgtgcccgaagtgacgactccacgctccgctgctcctggggaagcagctcacaaaaccgcctgtgggctctggtagagagaggggaactgtcggtgttctcagcgatcggtctccctgtgtgttcattcccactccttgcctgctgctcattgtcaaccaggtgaggagctaaaaccacgtacacagaacttccgagtcatcaggcaacggtaagcaaaaggacatgtcacaaggcagtacagcctaggagtctattcttgcaatgagtatttactgagcatttactatgtgcttggcactgattctagagatccccaagggatgaagaagttgggaaaggagccagaagttggccctaaagaattggccaggcacggtggctcacacctgtaatcccagcactttgggaggccaaggcgggcggagctttggaggtcaggcgtctgagaccagtctgagcaacatggtgaaccccttctctactaaaaatacaaaaattagccgggcatggtggcgggtgcctataatcccagctactcaggaggctgaggcaggagaatcacttgaacccggaggcaggagaatcacttgaacccggaggcagagcctgcagtgagccaagatcgtgccccagcactccagcctgggcgacagagcgagacgctgtctcaaaaaaaaaaaaacggagaaaagagcaaaaccaaaaatctcattctcaccttcactccagggatctcttaccctcaaagcctcctttttagcaaccacactgaactgtcctcctcggcctccacctccttcccatgagcttatctttgccacaggaacctggcctgcataaatccggcaaaagggcttccagcccaagttcaaatctacttactcagagtgttgtcttaagcagttaccaaacctttctgaacctgtttcattgtccagtacctctctcctaaagattaaattaggtaacgcaggcaaccatttagcacagtccctggcacatggtgagtgctcagaaagcgataacggttactgtattattcaggtaaagttgggagaaggagccgggctccccaaggcttctgtggtttagccactgggcaaggtcggcccctgccggactggggcaggaagttcggcagtgctgaagctagtggagcccagggtcaaagagcgcctaacttttcctggaggctgtaaggtggctccgcggtgccacgctggggcctcaggcgagggcggggagggcgtgccgggaggagggcgcagcccgggctaggtctcccggcctccagctcccgctcctctgcagacctcaggccagcccccgcccctccctcgggacagcgcccccgaagctgtctctagaggatcccggggtcggaggcagggttcaaggcagcacttacaggaggatctcctgcttcgtcaggaacgtcaagtcctggaaggcaaagccagagcggggattagcggaccgctgggaggccgcggccgccccgcagccagctcccggaccctgctcccgagaagaggcccgcacgcgagctccccagggccaggcgtcccgcgcacctggtactcggccagcagctccttggacaggcgactgcccgagccccccatcgccccgccgcgcgcacagctccgccaactcgcctcgagacgcagacaactttctcacttccgcccttgggccgcgtcactgcccggtccccgcggcaaccgctcctggggccaccacccccgggcccgccccctcctaaaagctgccaggcgttcccagccgggtttggcaggcgagctgccggctccaagcggtcctaggcgagctggaggcggggcccggggaggggcccgacgctccggggcggagcccgggactcacggccccgcctccggggtgggaggggggggcgggccacgccgcgcgcgtgcgtgctggctgcgtatgcgtcacgggcgtcatgacctcgctgtggccccggcagcggctgcggggaaagtcgcgaggtgcatccgcttcggctgcagtaggtggtggcggcggcagccctgggtggggtcccataggggcatctgagaagtcactggagctagcgtttccgggaaacctggagactcgctgagtggcgggggtcgtcggctgcccctctgcccagcaagggcttttctagatgttatcatcaggcaatcgctgcacctgtcgcagcccccaagccacctcttccagaagtaaccataaccttgcttccttcttaggctatt

SEQ ID NO: 2820 - DNA, 6000 bp, Homo sapiens
ctcaaattcccatggctcagattttttatacacaccatcaaactgccctccagaaaatcatacctgagttccagtgcatgagagtgctcagggtttcaaagatgaccacttcttttgtgggaaaagcttttccatgttccatagtgattccaattggtcatgcatagaaacatttgggtgaggatggcactgatgtgtgggtaagtgtccagggccaacctttcaagggggaaattagtgcctgtcttcatcttcccctggctgcctggagccctggacccagcactgtcagggagaggggtctgccactggcccagataggatgtcaaaaggaggcattaccttagtagagtcacttcagtccaagtttgggttccttcagctctgctgctccagaaacttcatgttaataaaacagaaaggaaacaaaacatataaaaaattacatatcaaaagtcaagctaagtttaatgagtattgaggcttagtttgcaagatgaaaacgtcctggagatttgccgcacaacatcgtgaatgtgcttaacacgactatacacttagaaatggttcagatggtcaattttttttttaaagacagaatctcactctgtcagccaggctgcagtgcagtggcacgatcttggctcactgcaacctccaccacccaggttcaagtgattttcatgcctcagcctcctgagtagctgggactacaggtgtgtgtcaccacgcccggctaatgtttgtatttttaggaaagaccaggtttcaccatgttggccaggctggtctcgaactcctgacctcaggtgatccacctgcgttggcctcccaaagtgctgggattacaggcgtgagccaccgcacctggccaaaaatgtttaaaagtgaagctaatcctttgagctggagctgcaaggtaaaagacaacaacaacaaaaaagtgaagctaagcataattttgatgatcaaatgtagtatcttattctcaccttactgcaatgtctgcctcccagactcaagcaatccatccacctcagcctcccaagtagctgggaccacaggcacttgcaccaggcctgactaatgtagtatcttattctaataaaagagaatcttatctgacaggcgaaaaaatttaaaatgagataataaaaataatacaaaaccaaaaaaaggagaaaaaaaagagataatcttagacattttttcaaataagatataaagatggccaacaagcacatttgggatgtttaacgtcattaatcaataagaaaaggcaaatcaaaatcacaatgaggggctgggtgcggtggctcacacctgtaatccctggaccagcacattgggaggctgacgcaggtgaatcacgaggtcaagataccgagaccatcctggccaacatggtgaaaccctgtgtctactaaaaatacaaaaattagctgggcgtggtggtgggcacacacctgtagtcccagctacttgggaggctgaggcaggagaatcacttgaacctgggaggtggaggttgtggtgaactgaggtggtgccactgcattccagcctggtgacagagcaagactccatctcaaaaaaaaaaaaaaaaagggaaaaaaagaaaattacaataaagtccgggcacggtggctcacgcctgtaatcccagcactctggggggccaaggtgggtggatcacgaggtcaggagttcgagaccagcctggccaatatggtgaaaccctgtctctactaaaaatacaaaaaaattagccaggtgtggtagtgggcgtctgtaatctcagctactcgggaggctaaggcaggagaatcgcttgaatctgggaggcagaggttgcagtgagctaagatcgcaccactgcactccagcctggtgacagagtgagactctgtctcaaaaaaataaataaaataaaaaataaaagtatatcagcagctcggttttatcactgtaccaagagttgatcaggtacaggagggacaatatgctaaccagattcaccgaggactaccaaatgattcagactgcccatttaataatctaccatgagaggccgggcgtggtggctcagcactttgggaggctgagggaggcggatcaagagatcaggagatcgagaccatcctggccgacatggtgaaaccccgtctctactaaaaaaaaatacaaaaattagctgggcgtggtggtgcactcctgtaatcccagctactcaggaggctgaggcatgagaatcaggtgaacctgggaggcagaggttgcagtaagccaagatcataccactgtactccagcctggtgacagagtgagactccatctcacaaataaaaataatttacaatgagaaatatgccaaatggcacaaaaggttcttgctggctggtcagtgtacaaaatgaatcaggaagcaaaatgaaaaccaaaggttgttccatgaagggttcagagccaagtgaagtgactgagagatctagatcacagctggtcaccaggcacaaagctgactctcatgtcttcactataaagagatacttatggctgggtgcagtggcgcacgcctgtaatcctagcactttgggaggccaagacaggcgatcacctgaggttgggagttcgagacaagcctgaccaacatggagaaaccccgtctctactaaaaatacaaaactagctgggtgtggtggcacatgcctgtaatccgagctattcaggaggctgaggcaggagaactgcttgaactcaggaggcggaggttgcggtgagctgagatcatgccattgcactccagcctgggcaacaggagtgaaactctgtctcaaaaaaaaagaagacagatacttattaccatgcagtccaggtattcgccttggcttgtaagaggcaaacaaggtctatttagtacaggagacataatgacagcttcttgctttttgcctaagcttttactaacagaagactaactctttctcggacagaaagagcctgctattaagagaaaaatgatcggccgggcacggtgggtcacgcctgtaatcccagcactttgagaggccgaggtgggcgaatcacgaggtcaggagatccagaccatcctggctaacagggtgaaaccccgtctctaccaaaaatacaaaaaaattagccgggtgtggtggcgggtgcctgtagtcccagctgctggggaggctaaggtagaagaatggcgtgaacccaggaggcggagcttgcagtgagccaagatcatgccactgcactccagcctaggcgacacagcgagactctgtctcaaaaaaaaagagaaaaatgatcaggttgggatgggcctataccctagttatttttttttatttttattttttgagacagagtctcactctgttgcccaggctggactgcagtggcacaatctccgctcactgcaacctccagctcccaggtttaaccatgtctggctaatttttgtatttttagtagagatggggttttgccatgttggccatgctggtcttgaactcctggcctcaaatgatccgcctgcttcagcctcccaaagtgctgagattacaggcatgagccaccgcgcctggccttgaatatttctacaatgatggaatgtacctgttaatacagtgtgtcttatcaaacacatgctgccaaggagagcactgggtattcttccagtgtaaagtagattcctaggcagtctagggagtcaggaaaggcttccctgaggatgagatggaagagggactgagggcccaaagtggctgaaagacagagagccaataggaggaagtccagttacagagggccaggatttgggtttttaaccatttaatggttataaactgagactaacatactcagatttagactttacaaagatcagcaagtataatggattggaaggatcaagaattaatcccagcctgaccaacacaacctccacttcctcctcccagcagtttggaatccttaccttttgcaatagtatacgttcattcatttattatgcattcgataatatttactgagagcctactatgtgccaaacattatcctagaggttaagaggggacaagagcaaagggtcagcagtctaggggtgagatggagtcaaaaggacggcaggtcagctggaatgatgagaacagcagtggagagcctttaaaagtgccttggactggaccgattaccttctaaatgccggcgcccggaaaaatcactaacaccctttggacttacgtatttccatctttgtaaaatgggaacctacctcgcaagggatgttgcaacaatcgaagaaaactatgcacaatgcttgacatccagtgggtcctcagtaaatagcctaagaaggaagcaaggttatggttacttctggaagaggtggcttgggggctgcgacaggtgcagcgattgcctgatgataacatctagaaaagcccttgctgggcagaggggcagccgacgacccccgccactcagcgagtctccaggtttcccggaaacgctagctccagtgacttctcagatgcccctatgggaccccacccagggctgccgccgccaccacctactgcagccgaagcggatgcacctcgcgactttccccgcagccgctgccggggccacagcgaggtcatgacgcccgtgacgcatacgcagccagcacgcacgcgcgcggcgtggcccgcccccccctcccaccccggaggcggggccgtgagtcccgggctccgccccggagcgtcgggcccctccccgggccccgcctccagctcgcctaggaccgcttggagccggcagctcgcctgccaaacccggctgggaacgcctggcagcttttaggagggggcgggcccgggggtggtggccccaggagcggttgccgcggggaccgggcagtgacgcggcccaagggcggaagtgagaaagttgtctgcgtctcgaggcgagttggcggagctgtgcgcgcggcggggcgatggggggctcgggcagtcgcctgtccaaggagctgctggccgagtaccaggtgcgcgggacgcctggccctggggagctcgcgtgcgggcctcttctcgggagcagggtccgggagctggctgcggggcggccgcggcctcccagcggtccgctaatccccgctctggctttgccttccaggacttgacgttcctgacgaagcaggagatcctcctgtaagtgctgccttgaaccctgcctccgaccccgggatcctctagagacagcttcgggggcgctgtcccgagggaggggcgggggctggcctgaggtctgcagaggagcgggagctggaggccgggagacctagcccgggctgcgccctcctcccggcacgccctccccgccctcgcctgaggccccagcgtggcaccgcggagccaccttacagcctccaggaaaagttaggcgctctttgaccctgggctccactagcttcagcactgccgaacttcctgccccagtccggcaggggccgaccttgcccagtggctaaaccacagaagccttggggagcccggctccttctcccaactttacctgaataatacagtaaccgttatcgctttctgagcactcaccatgtgccagggactgtgctaaatggttgcctgcgttacctaatttaatctttaggagagaggtactggacaatgaaacaggttcagaaaggtttggtaactgcttaagacaacactctgagtaagtagatttgaacttgggctggaagcccttttgccggatttatgcaggccaggttcctgtggcaaagataagctcatgggaaggaggtggaggccgaggaggacagttcagtgtggttgctaaaaaggaggctttgagggtaagagatccctggagtgaaggtgagaatgagatttttggttttgctcttttctccgtttttttttttttgagacagcgtctcgctctgtcgcccaggctggagtgctg

SEQ ID NO: 2821 - DNA, 6000 bp, Homo sapiens
ggtcctgggctcggacccaactcctggacctttccagcctgtatcaggctgtggccacacgagaggacagcgcgagctcaggagagatttcgtgacaatgtacgcctttccctcagaattcagggaagagactgtcgcctgccttcctccgttgttgcgtgagaacccgtgtgccccttcccaccatatccaccctcgctccatctttgaactcaaacacgaggaactaactgcaccctggtcctctccccagtccccagttcaccctccatccctcaccttcctccactctaagggatatcaacactgcccagcacaggggccctgaatttatgtggtttttatacattttttaataagatgcactttatgtcattttttaataaagtctgaagaattactgtttaatcctggctcttcctcttcaaggacagttgctttttgaggtaggtctagtcttctgagttctgagaggttctgaacctcttctttgcaggctcaagtgagccagagtcagcctagcctggtcagcaacgtctccctgtggggcggctctgaggtggggagcttaacgcactgataggcggaggcagggggttcattgcgtttacctcaaccccttcattctgcatccccaattcagtttagcaagggtagggacacaagggaagggatgggatgggatgggggccctgtattaaagtttttaattcttcagatcatgcagtaaaatagactttactgatgtacggttctttacattttgatgcatgcagagactcatctaaccaccaccccaatcaggatacaggcgagtcccacacctcctgctgccccttcatcctcacaccctcccacggggacagccagcgtgggtgcggcttgacttcccgctggcctctgctcgatatgctgcttattcctaggatgattgaaggctcttagaagagaagtccagtccttcctcataccagtgtatctcatgtcacacatagggtcaaacttctaaacctttattactgattagtacaaacacaaacggagcaatgacaacagcagtgaggagaggccctgacaacgagggccgcccctgcccggggtgaggctgcacagcgccagctccaggctgggccagcttggcccgcactggcaacacaggcttgaccttggccacagctcagcagtagaaaggttcttggacagggtgccaggacacacgctggggctgctgtcacaggacaatcttaaaggagctgaacaagagaaaagcggtgggttttctgctggaagaggagggcagggactaaacccgaacttgcccccttctccctttagacccttctttggaacgggctatgttccgtgtgtcagccccctctgcaagaactccccgagacatccagagggagctttctggacccacacactgggtcagagcttctaaacctttattactaatgagtacaaacacagagcaatgacaatggcagtgggaaggggagaggtcttgacaaggagggctgcccctgcccggggcgagactgccagcttagccggccctgtgtgtggggactggggctttctctcaccctggcaccacctcctgtagccatgccctaggcccagaggcagcaggtcggaacctgcaggtacccagaatgaagggggaccactgtcatacctggcaaagtctggagaacgggagatgacgtgctggaactcagagaggttgatggttccatccctgtcaatgtcagactcctccaggatctgggaaagggagagtttcaggccagagccccaactgctccctcccgctcccaggcctgctcagctgctcacgttgtcgatgagctgcttcatctcagacgcactaagccgtgtgtcctcgccctctcccgtgaggcagttcaccagccggctcaggtcttctctgttcaaggttccgtcatcatcaaagtctagagagcagacacaggaagccaaaagacacggttgggaggggctctgaggttccccaaacggcgcccatttcccaagcagggccaccacaaagcccacgtgggaaggggtggtgtcctgccgggctgctcctggttctcaccaaagatgcggaaggcataatgggacttgatgtctggcgtggctgtgtcactgaacacactgaggagatccaggaagtcctcaaagctaaggctgtctttggctggggatgtggagaagaccctgcagattcgctccttgaaggggttggcctaggagaacaaacgccacaggacgtggcccaggtcacacgctcattaaagcctaccagaaacttgagagagcaggtcacaggaccagcaccagcgagctcagcctcgtgggggtgaacagtcagtgctttggggccaacatggagggcagtgggggcacaggaaagcaaactgacccagctggggaagggactgagatggcttcctgggagtcaagtgtttaacccaaaggcaggtcacatacaacgtaagtgtgggcagagagggaagaagaagtcatcctaaacaaagggaacgagatgggctggttattttaaaacacaaatatttacttgaacagctattgtgttacaggcaccgggccaggccctttgcacagaaattttgcagcagccttacggagtggcaatcagcctctagaacacggttcctcaaactctaatgaggtacctcaactcctcttaagggacaaaacttctttgaacttccaagattatgttctagaatccccatttgaaaagcaccattctagataattctgccaggtgattttggtaaagtccttgcccctagaaaatcagaactaagcagaaaaatgaccagagtggggaccagtgaccccatgatcccaaagctagtggcagatggagttagggggtctagcagggagggagtggtgggagaggtgtcaaaggaggggagcgcttgcaccttgagctctggaaggctgagaatctgctcgaagggcacttgtgcccgaagtgacgactccacgctccgctgctcctggggaagcagctcacaaaaccgcctgtgggctctggtagagagaggggaactgtcggtgttctcagcgatcggtctccctgtgtgttcattcccactccttgcctgctgctcattgtcaaccaggtgaggagctaaaaccacgtacacagaacttccgagtcatcaggcaacggtaagcaaaaggacatgtcacaaggcagtacagcctaggagtctattcttgcaatgagtatttactgagcatttactatgtgcttggcactgattctagagatccccaagggatgaagaagttgggaaaggagccagaagttggccctaaagaattggccaggcacggtggctcacacctgtaatcccagcactttgggaggccaaggcgggcggagctttggaggtcaggcgtctgagaccagtctgagcaacatggtgaaccccttctctactaaaaatacaaaaattagccgggcatggtggcgggtgcctataatcccagctactcaggaggctgaggcaggagaatcacttgaacccggaggcaggagaatcacttgaacccggaggcagagcctgcagtgagccaagatcgtgccccagcactccagcctgggcgacagagcgagacgctgtctcaaaaaaaaaaaaacggagaaaagagcaaaaccaaaaatctcattctcaccttcactccagggatctcttaccctcaaagcctcctttttagcaaccacactgaactgtcctcctcggcctccacctccttcccatgagcttatctttgccacaggaacctggcctgcataaatccggcaaaagggcttccagcccaagttcaaatctacttactcagagtgttgtcttaagcagttaccaaacctttctgaacctgtttcattgtccagtacctctctcctaaagattaaattaggtaacgcaggcaaccatttagcacagtccctggcacatggtgagtgctcagaaagcgataacggttactgtattattcaggtaaagttgggagaaggagccgggctccccaaggcttctgtggtttagccactgggcaaggtcggcccctgccggactggggcaggaagttcggcagtgctgaagctagtggagcccagggtcaaagagcgcctaacttttcctggaggctgtaaggtggctccgcggtgccacgctggggcctcaggcgagggcggggagggcgtgccgggaggagggcgcagcccgggctaggtctcccggcctccagctcccgctcctctgcagacctcaggccagcccccgcccctccctcgggacagcgcccccgaagctgtctctagaggatcccggggtcggaggcagggttcaaggcagcacttacaggaggatctcctgcttcgtcaggaacgtcaagtcctggaaggcaaagccagagcggggattagcggaccgctgggaggccgcggccgccccgcagccagctcccggaccctgctcccgagaagaggcccgcacgcgagctccccagggccaggcgtcccgcgcacctggtactcggccagcagctccttggacaggcgactgcccgagccccccatcgccccgccgcgcgcacagctccgccaactcgcctcgagacgcagacaactttctcacttccgcccttgggccgcgtcactgcccggtccccgcggcaaccgctcctggggccaccacccccgggcccgccccctcctaaaagctgccaggcgttcccagccgggtttggcaggcgagctgccggctccaagcggtcctaggcgagctggaggcggggcccggggaggggcccgacgctccggggcggagcccgggactcacggccccgcctccggggtgggaggggggggcgggccacgccgcgcgcgtgcgtgctggctgcgtatgcgtcacgggcgtcatgacctcgctgtggccccggcagcggctgcggggaaagtcgcgaggtgcatccgcttcggctgcagtaggtggtggcggcggcagccctgggtggggtcccataggggcatctgagaagtcactggagctagcgtttccgggaaacctggagactcgctgagtggcgggggtcgtcggctgcccctctgcccagcaagggcttttctagatgttatcatcaggcaatcgctgcacctgtcgcagcccccaagccacctcttccagaagtaaccataaccttgcttccttcttaggctatttactgaggacccactggatgtcaagcattgtgcatagttttcttcgattgttgcaacatcccttgcgaggtaggttcccattttacaaagatggaaatacgtaagtccaaagggtgttagtgatttttccgggcgccggcatttagaaggtaatcggtccagtccaaggcacttttaaaggctctccactgctgttctcatcattccagctgacctgccgtccttttgactccatctcacccctagactgctgaccctttgctcttgtcccctcttaacctctaggataatgtttggcacatagtaggctctcagtaaatattatcgaatgcataataaatgaatgaacgtatactattgcaaaaggtaaggattccaaactgctgggaggaggaagtggaggttgtgttggtcaggctgggattaattcttgatccttccaatccattatacttgctgatctttgtaaagtctaaatctgagtatgttagtctcagtttataaccattaaatggttaaaaacccaaatcctggccctctgtaactggacttcctcctattggctctctgtctttcagccactttgggccctcagtccctcttccatctcatcctcagggaagcctttcctgactccctagactgcctaggaatctactttacactggaagaatacccagtgctctccttggcagcatgtgtttgataagacacactgtattaac

SEQ ID NO: 2822 - DNA, 6000 bp, Homo sapiens
tttgtatttttagtagagacagggtttcactatgttggccaggctggtctggaactcctgacttcaagtgatccacccacctcagcctcccaaactgctgggattacaggtgtgggccactgtgcccagcttattagatataccacattttgtttattcattcatctgttaatgaacatgtgggtgaaatatgtcaatttttacttgttgcaaaaacaaaacacaccttttttttttttttttttttttgagacggagtctcgctctgtgccccaggctggagtgcagtggcgcgatctcggctcactgcaagctccacctcccaggttcatgccattctcctgcctcagcctcccgagtagctgggactacaggcgtgtgccatgacacctggctaatttttgtatttttagtagagacggcgtttcaccatgttagccacgatggtctcaatgtcctgacctcgtgatctgcctgcctcggcctcccaaagtgctgggattacaggcatgagccaccgcgcctggccaaaacacatcattgttaaataactcctcaggctacccttctctatgggaaaatgcagagtaaatcaacagatttttaatagcaaaatggccaaggaaaaagcaggatagagacaacgcaaagatacaaacaatctaccaaatgaataaagccactaatgttacttaggctcaaacagtatcccccaaagtgagaggctggatactcacaactcgataaagggtgacattcacctgatattgttgctgtctcacatggccttaatcatcttattgcttttgtcttcactgttcttcaattttgtgcccttctctagtgccagccattgtggtaggccctgaagaacaccctcatggagagcatattctgtagaggaagacaggcacactaatagtatcaacacaaccaatacaaatgctgactgctgttatgggaaaacctaggagggatacacaggcagatttggaggattaggtaaggctttccaacttcccaacttctccaacaacttgcagagaagttgtcctgagacctgagagatgaatgagaggtatgatttggaggcaaaggccaggaaactggaaagactataaaacaccttgaggaaatgacaggaaaatggggatgagggacagatgacatatgagaggaagcagggactcaatcggagtttggtattcaccttgaaggcaaatgggagctgctggaaggattctgtgttttttttttttttgagacagattctcactgctgcccagggtggagtgcagtggtgtgatctcagctcactgcaacctttacctcccacctggaaggtagatgttagcgtagggtggtgaaaggcttgtgcactcatcttaatcttaaatatataccttggccaggcaaggaggctcacggctgtaatcccagcacttttggaggctgaggctggcagatcgcctaaggccaggagtttgagaccagcctgggcaacatggcaaaaccccatttctactaaaaatacaaaaattacccaggcgtggtggcatgtgcctgtggtcctagctactcaggaggctgaggtgggtgaattacttgagcctgggaggtggaggttgcactgagccaagatggcaccactgcattccagtctgggcaacagaggcagaccctgtctcaaaaaataaaaataaattttaaaaaattgaaaaaatacatatctcaatgattgtatgtatataatgattttatatataaatgatttatatattactttatctatattaaatgtctatataagacagatatgtaatttccagcactccataagatttccttgggagcttcctcatctacctctgcctccaggggtaacctggtatgcactatatactctttttctcttttttttttgagatggagtcttgctctgtcgcccaggctggagtgcagtggcgtgatctcggctcactgcaagctccgcctcccaggttcacaccattctcctgcctcagcctcctgagtagctgggactacaggcgtccgccaccatgcctgactgatttttttgtattttttagtagagacagggtttcaccgtgttagccaggatggtctcaaatctcctgacctcgtgatccacccacctcggcctcccaaagtgctgggattacaggcgtgagccactgcgcccggccctatatactcttttatctacctctttttgtgctcagcatagtgtctgagcttcatctatattgtatgtaccagtagttcatcctcctattactttgtaatacagaaaaaaactgagaaaagctttgaaatggtctaaaacagattactggggccaggcatggtggctcaagcctgtaatcccagtactttgggaggccaaggcaggcagatcacctgaggtcagaagttcatgaccagcctggaccacatggtgaaaccccatctctactaaaaatacaataaattagccaggcgtggtggcacgtacctgtagtcccagctgctcgggaagctggggcaggaaaatcgcttgaacctgggaagtggaggttgcagtgagctgagatcacaccactgtactccagtctgggtgacagagcaagactccatctaagacaaacaacaaaaaaatgattactgggtgtcattgaaaaacaaggtgcccagctgtccagcttacttttctaggatgtctgattctatgaagactctaaacctttcactgtctttgagctacagaacaactatacaaactatagacacttcttgtctatagaaatgcaaattgtggccgggcacggtggctcatgcctgtaatcctaacactttgggaggccaagacaggcggatcacctgaggtcaggagttcgagaccagcctggccaacacggtgaaaccctgtctctactaaaatacaaaaagctagctgggcatgatggcgggtgcctgtaatcccagctactcgggaggctgagacgggagactctattgaacctgggagatggtggttgcggtgagccgagcttgcgccactgcactccagcctgggcggctgagtgagactccgtctcaaaaaaaaaaaaaaaaaaagaaatgcaaattgttttcagtagaatgcaattgattactaagctgtggatttcatcagttctgccagtttttgtatatatttgtagttatttcattattcctcatttgactatgtgtgtggtactttgaattttccattgaagcagttgtaatctttctggatatctcattcattaatgagttaaataaaatctctaacatttattttatatctgtattatatttgatattaaaattattcttcaacagtagtatacagttatatgaataagctgcaatttatctattcatctattggtggacatctgggttttttccctttggctattatgaataaagctgctatgagtcttttggtgaataaaggcattcattttttggggtaaatatctagaaatgggatttctggggtatagggtaggggtaaatttgatttcagtagagactgatgtttccaaagtggttgtaccattttacactcccatcaacactgtatgagagtcccatttctgcatctttgcaactaagggaattgtcagtcttttcatttcagctattctatggagtgtttaatagtatcatattttggtttcaatttaccatagaagattttcaggagggaggtaacttgaacagatttttacattttagaaaactctttctgcgtattatgtggagaatgattatttgtataccaaagttcatagcagcattattcacaatagccaaaaggtgggaataaccaagcatccatttatatggatgaatggataaacaaaatgtagtatacatgtataatggaatattatttagcctcaagaaggaagaaattctgatacatgctacaacatagatgctccttgaagacattatgctaagtgaaataagccaatcagaaaagagcaattattgtatgattcaatttatatgcggtacctcgcacttacagacagaaagtgcaatatcggctataaggggttgtgagaaacgggtaacggggagttactgtgtaacaggcagattttctatttgggataatgaaaaagttctggagatggatagtggtgatggtttcacaacaatgtgaatgtacttaatgccagtgaactgtacacttaaaaatggtgaattttatgttagatagattttatcacacacacaaagaggagggagggcgggagggaaggagagagggaaggaagtagagaggggagaagagaggaagaaaggaaagaaagtaagatctggcatcacagggcccacattcccgcgtgtcagcaataggctgaaacagaagcatggtttctcacgtgtccatggaggcatctgagtgtgtgcccactttcccggttcaatgacaatttgcacctgctcgtgtagaggggtacgggtgaaacagagaccagtattattaaggggatggagaggagagaccgccaaaacatcgcagagacacaccgtcggaaccaagagaatggggtgcagacgcctggcttggcctgtgggaactggcaagtctcagctctcaaacgcccgggcttttcaacccgccacagccgggttccagctgcctacttcctttaaagccttcaccgactctaaaacaccaaaaacaaagacccaactagctccggaagcccgagatgtaaccgtagtcatctgaccctcccgtccggactctgattgggctttggagatacgcgtccctcccggcgctgtacggcgaccccgccccagcagcctgagggggcgggaacagatgtccgagtgcgacagtattggtcggcttccccaggaagcagccaatcggaataggcaagcttccggcgggaagtgagccagggcttggcgcggcggccgtggttgcggcgcgggaagtttggatcctggttccgtccgctaggagtctgcgtgcgaggtgagtaccgcgcgcgtaactacgggtcggtccgcattgatctagccctgctctggcggcccggcccggagctggaggccgctcgggttcttccgtttcctgcactggttcgcctcggcccgctgagtcctctagtctggccaacatcctgggaggacagcagatacataaatacgttcccaaatggggaaacagaggcccggggcgggggcgaactctgccaaggtctcccggggcgtcggaggccgagcatgggctaggacctggcatgttgttgcccatatactccagtgcgtaacatgatgccctgcacagagtaatcccagcccagacctctggcactactacctccgtgtccctcctgaggaacaacgaaaacactttgtactttttctgtggccttccataatcacgagctgggctactcttgtttttgagtgtctactgtgtgccatgttcctggcacccttgatcttacaactgtagctttacgatatcccagcaaagcgaagtgcttaagaatactgcatcagattgcttgggttcgaattctggctccttcacatttagctctgtgtctactgcacgttactgaaacactaagtgtcttggttttcgtctgtcatatgggggaaatggtctcttctacttcctggcgtttttgttaggattaaacgacttaatatatgcaataataaatgcttcgaaggctacctgttacatagtacacagtaagggttctgttatcattacccagagaagcggatgaaattgtccccattttagacatggagaatctgaagtacaaagaggttgtctccgtacagaaagagcatttggtgattaagtgctagagatacaggatttgaactaagcgcctgattttaaagtatgtcccacaacattaggctttctcctatagccctcacctgtccttaggtcacacagaactttaggtacctcat

SEQ ID NO: 2823 - DNA, 6000 bp, Homo sapiens
aatttctgatcaggatttcactgataccatttccaccagtggcagatactggggcctctcacccctccccacccccatggccaacacacacccctcttccttgttggcagagcctcctgggggagaccacaccctcctcagcccagagagtggcctgggatttcatggcaactcactgcagtgacccttttagggatgagtgcatgacccaagcctggctgaggggtctgcaagggcatccactaggaggttatggagagggcagagggctgtccctgatccaagggacacagggtgagacaccctcttctctgctggacatcatcttgtccaccaatgggctcaagtgggcatgactgtggcctgacaaggatgctgaatagagacaaacgtattgtggtccctgatgccatgctgcgcccttgccctgttcctacgacgcacctgccacacgtgctgttttgttgtatcacaaatgcccattgtattttttttttatttttgagacggagtctcgccctgtcgcccaggccggagtgcaatggcgtgatctcagctctctgcaacctctgcctcccgggttcaagtgattctcctgcctcagcctcccaagtagctgagattagaggcgcccgtcatcacacccagctaatttttgtatttttagtagagatggggtttcaccatgttggtcaggctggtctcaaactcctgacctcgtgatccacccacctccgcctcccaaagtgctgggattaccggcatgagccaccacacctggccacaaatgcccattacttaaggtgcttttagaaggatccgcatggggacagaatgttctctgttctccatgaggtcgagcccacattctagggtctgctcctttagcacccaactcctggcactggtatttctcttctggttcttcttggtgattataacctaaaagtaggctcattaaaggacaaagggaaggccttggagcctctggagaaccagaaaggcaggcctggggctttggcatcgaggaccaccgccaccacctcgctcccaacagatccagccaagatgccacggctgtgtgagcatctgctcgtggggacaggctgcaccgtaggccccaccaggatgggacctgggcagtccctgcttcttactccaagtctgattggcagagcccagatccttgacctacattaagctgcaggggccctgggaagccagcactgcactgtgagccactacagcgggaaggggcagcccgacactggccacagccacagttcccacgtgtggaaaaactgaggtggattgccggtgaggaaggctaacggtgcaagtgctcctgccctagatgcccagagccgggggcagacagtggcacccctgctccaccctgggcaagcagcactgacaatctctacattcttcccagatgacctcaggcaactgagatgaagctaagcagggaccagtgtgagcaaagccgctaaatgcatgaggacaaggaggactaactgagggccaatccagcaggcagcggacaggggttcagggacaactgcagtgacaggcacttcaggagggccctcgctgctatgttcacattacctgtcccagaaatgcccgggccagggggactgccggctggtcgaagaactccaaccccagtcgggtaaggtggccctttgggcttgagaaatagatgctgcggtatgggcccggagtggtgggcggtcccaagcagcgctccctggggcaaggtgcctgggctgcatcggacgagctgtgtggctgctctgcaggtgcctgggctgcgtcggacgagctgtgtggctgccctgctctagctggtcgctgcttcttttgccccatccgtcggcaaaactgtaatgggaaaaaaaataaataagcatccgaataggagacagctgtgtggtaaggtcaggctcaggaagtgcaaggactggatctgaccacctgctttggtttcttcatctgcaaagcgggggtgaccatcctgtgggttgttatgaggcacaaacaccctgacacactcgaggcctcaggaaatgatcacgtctgacgatggacggctgctgctgggggcagggtggctgctctgccccacatatgtgcgagctgcacggcatgggggcccaggctgcatgacctggggagcagatgggggcctgagcctgggacagcagggctggtgccctccgattcccactcatcatgcaggtcccaagcaaacgtctgagctggtttctggagccctgccctttcatccaacccttgccagaattcaaaacacaggatcttagcagggccaaggtcggacacacagggaggggtgagcaccggggtgaccaccgcgtgctcagggtccctaactgtcctctgcttcatggcccaggctggataacgagcaagtggggcaaaggcaaggtctcctgagggactaggagggtctgctgagaccgagcaggccgccagcctcccacctctggcctccccatgggtagggggaacctaaccacacatcctcggctgtcctggggcaaaggagaagggaagatgaaggtggcgggtgagcgccggcctggcagcacccggagggctggtctttagcagcacctaagtcctcctggcatgggagagatgcattatttttaacgggagtgctgacgttaatgtagaacggagactgccagtcggcctggaacggacgctgacgtgaccgtctccgcagctcggcccgcgctgccagcgcgccgtgggttcagcccccgggcgctgcggccactgctctcggcccgagcttggcccttggcctatgctctggctctgccccgaaccctcggggcggtgggcgctacgcccgtccccggcactcccgctcccgcggccgcgctcgctgctgcgcctgggggtgggcgcgtctgttccgcggggcggccgaggcgcgcgctcacctgggccccgctgcgcgcgggcatccggcggctcgggccggggcttcgtgggactcggaccccggcgcggagcccagcagccgccgaccacggaagcacccctaggaccggggcggagcggcgcctgcgcagaaggggacggaagccgggagaaggggggcagtgagcgccgggaactggctgcgcccccggggcggggcgggccacgtggaggtggatcctcttcccagcgcccaccgccaggtccggaccgattcccgggcccgatgcggtgcctgcgaggcgagagcggggaaggggcacctgggggtggggcgagccccgcactgtgccccggcgcccctcccaatgagctgtccgcccccgcctgcgccctggtcgcctggcggccccagagcccactccaccagccggtggtcagaccaccgagaggacgggcccgtcgtgaacctgagtggatcctcgaggggcccgggcggagtggtcgtgctttgggggagggggcgggccgcagacgtgttttccggtggggtgccagcggagtgagcgcctgggaggccgccccagccctggtccggagtgggccggggagtccttatccaggaagtggacgccaggcttgtgcggaggcccccgcccctggccggggttgtcacaggctggtcgggggaaggaaggagggagcggcgcggattctgcctctgcagcagagcccccatccctctttccgcccagggatgctgaagggagctcgcccacgttctgggttgggcctgctggagcgcaggcagcctcctctagaggccgaggccagaccagggctgaacacggcccggcagtgcgcagccgtcctacgcttctgaggcctccccgacggcccagcgcctgtaagctctcacaacctctcaagtcagatccatgcccctagggaggggcagggacggtgcttggcccagtggacggaagggcctaggggacgggccctgagggagctgggcacactgctggctcccacggcccatggcagccccagcacccagcagagccatcccccgcttctggccacttgaaggtttatctgggtctgcagggcccctccactgtggcaggcacaatcccaccccacaacccacctctgccgcacaaaaaccctcgaggggcttttcctgagctttgacttctgtgaccctggtcctggaaaggagcacctgaaaaggccttgaagagcaactgggcacctggccgcgtcaggtgggagacgctgggcaggacagacgcacaggccatgtgtctggagccctcagatgagtgtgacacctggtcctacagaaaggctaacagggcaggacctggtctccaactgcctctcctcctctgaccagccgtcccacccccatgggccccagccaggacttcctggggagggaggggccatcagccggctggaagccaccagctgtttgtagcactgtgtgccgcttcccggggtgggggcataatgtgtcatcaatccgtgtttataaagcagccctggatgtgattccacaccctccctgcttatctgcagccatgcctcccaaacaatgagtctctccttcctgtgggaacagccccccatccccccgagtgctccccctcagtctagtagggaaactgaggccccagttgagcctttgtcctcttgatgggcagggagaggatgggtgttactttgtacttatatttattctgatgttacaagtgatacatggtccttgcagaactcacggggagtccagaggctcccagaggggtgtttttatccccacctttcttatgaggaaagagaatcacttggagagcagattggcccctgccccaggaggtggagaggccggcaccggggcgccagcaaccaacttctccagatgttctggactgagtgctgggggttgcgcaatctctgggcactccccccccccacttcctggtttgtggtctcatgctcccaccacaggctggaagcggtgggatgagagttccaactgtggcctgcagagtgggctggcgggctggtccaggacaagagaaagtggtgccaggtgagaggagggggcctggggcttcctctgtccccagtttgtcccactgctgggctggaacaggcttgttggaggaggcaaggatatcagtggaagatggagatgagaacacccttgaggctttgaaaggagtgaaggctagtattggtgctggggtgagcagccctgacccccgacctccacaataggccacaggctgtggaggggctggagctgcctccagctgtaggaggtgtggccatcagtcgctggagcctttataaacaagtctttgagagatgtggctgtattggctacaggggccagggttctagtatcagccttatgaccccagggtgcccagcacactggctccgtcttctctctgatggaggggggtgctgacagctgttgaggtgggtgtcaggtcagagcccatggactcctctacacagctttgagctggcagcttcccagcagggtggctgctggcctcttgactggtctctgcggccatctgtgtctgatgagccctggagggccaaagcttccttgggcagagaaggcagccactgggcaggccgaggttgggtgtgtgtgagctacatcctccctgcctggggctgtgctgccaggccctgggcccaggtgcttatgggaaccccttgccaaaccctgggatatggggagggggcagctgcctcagaaatagcctatgacttcaggacactggctggcctggcccccttctgcctcttccccaaatagccaggagctggtcatgggcccatccctggagccctgctccccgggcggtttcttctgatccttccagggactccccaaagcccagggtctgaccccttgggtgattacttgtggcctagaagctgagctgaggattctggggtagcagaggattctggggtagctgttgggaacactcctcttactggtcaggg

SEQ ID NO: 2824 - DNA, 6000 bp, Homo sapiens
cggtgagggcagccgggacagggaccatcccgccctgggctggagtttcagctcggagacaccacccgccggtcgtggccgggaaggaaaatgcagcggggggagttcagaggaacctggggcacccccggactctagactcccgctcctgggaccctcagctgttgggcgggggctggagccgagctgtcccgcccggccaggccgctggggctgctaatccggccacgggctatttttgcggcgcgccgggctaggaatccggggctgggccgcctccgcgggcgactcgggaaactccaggaagaaaagcccggccgccccgggggggcctcgccgcgacccctccccggccccggccccggccccgacacggccccggccgctctgagcagctccggccccgggtgctgaggactcgccccgccctccggacgcagccccggaacccgcccgcccccggagccctgcgctcccggccgcgctcactcactgccgccgccgggggctctggggggtcctgagggcgccggggaggaggctgccgccgctggccgggagggcccgcgccgagtccccgcccgcccgccggtccggcccgcccgggaatgccctggagcgaggggcgtgcgcccgggggcgggcccggccggagcggggcggtcgcgctgactcagagctcaggaatgcgcgccgcccgcctgcccggcccaagtcacctcctcccggaaggccgccgggctcccttctccccagggtccgcctgcggggacacctggggctggggtctccagcgcctcggcccgacggaggacctggtgggagcggaccgcagtgtcagcgctgggcggctccgcctctccctggctccagattgaggcttgagctgtcctgccctgatttgtgctgagaagagggtgaggagggagagcaggcacggggtaaagggcggaggatgggtgtgtatccctggctcccctaaacccgacctcctccagaggcccacgctgacaagtcctgtatcccacactcacccaatcccactaagcactcacattccctcacacacattcatgtgcaccgatcactcacaatcatacacacacgtccccacatccttccacttcatgcgttcattcgcctgcacatgcacgtgctcacatgcacccacctactcatgtacatctttcatgggtacatacacgtgcacacacacacgtgtacacaccgatgcacacactcagttcaggaccacagtcattacccctccccctgccctgtgcccctacccccagaagccccgctccaccagcaggcactcaggccaggctgcaccggccccacccgaagccactcagcagaggcagcgcagtgtctggtgtccactctgggctcttctcactgtctcagagctcagcggccaccccggggtgggctcatatccctgcacaatctgggctggactcaaaatggcactctgctttccgctggggctgctggtgagagtttcccagcatttctctcctgacactgggtgggctgaccctcccagggtgggggacaggggtgccaacagcagagtacgggcagggctgtccaggagctctgagtggtgggtggccaaggcttcctctggatagagggtgcagggatcccttcgtcccatgggtccctaaggacccctctacagggtgcccccccatgcctcggacaaatgtgtcttcaggccctgtgctggtcacaaggtgctgctgcttcagtgccatcctctgggtctgggtggcaccagccctctccaaactgagctgttgcacttgagggcccgacgcagacaatggcctgctccttggctagacagaaaaggggagaatttgaactaaaggtgctggtacacttaccggtagatcccagagcctgggcaagattcccctgcccatatccttgtccatgccacgggatagggcggtgcctgcacataatgggtgctctctgaacacaagcaatatcaacacaattctcatgtagaaggagacaatggaagctttggagggggtggagggtaactccaccaggggatgactgccagtgcatcacggacaccgggtgagagggagcctgccccagtgccaacactcagtgctccgatagcctgcacgtgccacccctcccatgccaggctcacagccagagacaggacagtctccatgcttagcattattgacctgccagggataagcaagccctatcgggcctggatgcccagactaggctggcagggccagaagtggtgtcctctctggaaagctggggactgggcttgcctccaaagcatgccacagctgggcatctggtgtcagcaggtcttcctcctgcagtggactctgtcagaccccacctagacccgctccaagacccagacactcatcgccagctgccaggagcaccagtcacagctggctcagagctgaaaccccccgcacccaggagtcaccttcagtggggagcatgccccagtctgcctctgcaggcaaatccccagctcagagcctgtgtccaggaatccccaggctctcagcccaccctggcctcctgagtgaggtcatcagaaggatgatcagaggggggtcgatacacgtgtgctcagtgtcaggcctctgagcccaagcctgcacgtatacatccagatgaagcaagtgaagaatcacaaaagaagtgaaaatggccggttcctgccttaactgatgacattaccttgtgaaattccttctcctggctcagaagctcccccactgaggcaccttgtgacccccactcctccccgccacagaacaaccccctttgactgtaattttccactgcccgcccaaaccctataaaacggtcccaccccatctcccttccctgactctcttttcttcggactcagcccgcctgcacccaggtgaaataaacagccttgttgctcacacaaagcctgcttggtggtctcttcacacggacgcgcacgaaactcaggattgtacccagtccacatagacaagtgtgtgcacatatgtgtgctctgcctcctgcctgccctactactctctgtcctggtggaggagccccctatacggaaacccagctcccggcccctctcttcccgcgtcatgcaccctggagaaatggaaatcagctgcagttgcccagcactcccggggctggtgggcaggcgtctgagaatgggttagggttagggtctagaccaaacccagggtttgtggccctcacaccaggacacgagggaatgggagccctgaccagtaagaggagtgttcccaacagctaccccagaatcctctgctaccccagaatcctcagctcagcttctaggccacaagtaatcacccaaggggtcagaccctgggctttggggagtccctggaaggatcagaagaaaccgcccggggagcagggctccagggatgggcccatgaccagctcctggctatttggggaagaggcagaagggggccaggccagccagtgtcctgaagtcataggctatttctgaggcagctgccccctccccatatcccagggtttggcaaggggttcccataagcacctgggcccagggcctggcagcacagccccaggcagggaggatgtagctcacacacacccaacctcggcctgcccagtggctgccttctctgcccaaggaagctttggccctccagggctcatcagacacagatggccgcagagaccagtcaagaggccagcagccaccctgctgggaagctgccagctcaaagctgtgtagaggagtccatgggctctgacctgacacccacctcaacagctgtcagcacccccctccatcagagagaagacggagccagtgtgctgggcaccctggggtcataaggctgatactagaaccctggcccctgtagccaatacagccacatctctcaaagacttgtttataaaggctccagcgactgatggccacacctcctacagctggaggcagctccagcccctccacagcctgtggcctattgtggaggtcgggggtcagggctgctcaccccagcaccaatactagccttcactcctttcaaagcctcaagggtgttctcatctccatcttccactgatatccttgcctcctccaacaagcctgttccagcccagcagtgggacaaactggggacagaggaagccccaggccccctcctctcacctggcaccactttctcttgtcctggaccagcccgccagcccactctgcaggccacagttggaactctcatcccaccgcttccagcctgtggtgggagcatgagaccacaaaccaggaagtggggggggggagtgcccagagattgcgcaacccccagcactcagtccagaacatctggagaagttggttgctggcgccccggtgccggcctctccacctcctggggcaggggccaatctgctctccaagtgattctctttcctcataagaaaggtggggataaaaacacccctctgggagcctctggactccccgtgagttctgcaaggaccatgtatcacttgtaacatcagaataaatataagtacaaagtaacacccatcctctccctgcccatcaagaggacaaaggctcaactggggcctcagtttccctactagactgagggggagcactcggggggatggggggctgttcccacaggaaggagagactcattgtttgggaggcatggctgcagataagcagggagggtgtggaatcacatccagggctgctttataaacacggattgatgacacattatgcccccaccccgggaagcggcacacagtgctacaaacagctggtggcttccagccggctgatggcccctccctccccaggaagtcctggctggggcccatgggggtgggacggctggtcagaggaggagaggcagttggagaccaggtcctgccctgttagcctttctgtaggaccaggtgtcacactcatctgagggctccagacacatggcctgtgcgtctgtcctgcccagcgtctcccacctgacgcggccaggtgcccagttgctcttcaaggccttttcaggtgctcctttccaggaccagggtcacagaagtcaaagctcaggaaaagcccctcgagggtttttgtgcggcagaggtgggttgtggggtgggattgtgcctgccacagtggaggggccctgcagacccagataaaccttcaagtggccagaagcgggggatggctctgctgggtgctggggctgccatgggccgtgggagccagcagtgtgcccagctccctcagggcccgtcccctaggcccttccgtccactgggccaagcaccgtccctgcccctccctaggggcatggatctgacttgagaggttgtgagagcttacaggcgctgggccgtcggggaggcctcagaagcgtaggacggctgcgcactgccgggccgtgttcagccctggtctggcctcggcctctagaggaggctgcctgcgctccagcaggcccaacccagaacgtgggcgagctcccttcagcatccctgggcggaaagagggatgggggctctgctgcagaggcagaatccgcgccgctccctccttccttcccccgaccagcctgtgacaaccccggccaggggcgggggcctccgcacaagcctggcgtccacttcctggataaggactccccggcccactccggaccagggctggggcggcctcccaggcgctcactccgctggcaccccaccggaaaacacgtctgcggcccgccccctcccccaaagcacgaccactccgcccgggcccctcgaggatccactcaggttcacgacgggcccgtcctctcggtggtctgaccaccggctggtggagtgggctctggggccgccaggcgaccagggcgcaggcgggggcggacagctcattgggaggggcgccggggcacagtgcggggctcg

SEQ ID NO: 2825 - DNA, 6000 bp, Homo sapiens
ggaccacagtcattacccctccccctgccctgtgcccctacccccagaagccccgctccaccagcaggcactcaggccaggctgcaccggccccacccgaagccactcagcagaggcagcgcagtgtctggtgtccactctgggctcttctcactgtctcagagctcagcggccaccccggggtgggctcatatccctgcacaatctgggctggactcaaaatggcactctgctttccgctggggctgctggtgagagtttcccagcatttctctcctgacactgggtgggctgaccctcccagggtgggggacaggggtgccaacagcagagtacgggcagggctgtccaggagctctgagtggtgggtggccaaggcttcctctggatagagggtgcagggatcccttcgtcccatgggtccctaaggacccctctacagggtgcccccccatgcctcggacaaatgtgtcttcaggccctgtgctggtcacaaggtgctgctgcttcagtgccatcctctgggtctgggtggcaccagccctctccaaactgagctgttgcacttgagggcccgacgcagacaatggcctgctccttggctagacagaaaaggggagaatttgaactaaaggtgctggtacacttaccggtagatcccagagcctgggcaagattcccctgcccatatccttgtccatgccacgggatagggcggtgcctgcacataatgggtgctctctgaacacaagcaatatcaacacaattctcatgtagaaggagacaatggaagctttggagggggtggagggtaactccaccaggggatgactgccagtgcatcacggacaccgggtgagagggagcctgccccagtgccaacactcagtgctccgatagcctgcacgtgccacccctcccatgccaggctcacagccagagacaggacagtctccatgcttagcattattgacctgccagggataagcaagccctatcgggcctggatgcccagactaggctggcagggccagaagtggtgtcctctctggaaagctggggactgggcttgcctccaaagcatgccacagctgggcatctggtgtcagcaggtcttcctcctgcagtggactctgtcagaccccacctagacccgctccaagacccagacactcatcgccagctgccaggagcaccagtcacagctggctcagagctgaaaccccccgcacccaggagtcaccttcagtggggagcatgccccagtctgcctctgcaggcaaatccccagctcagagcctgtgtccaggaatccccaggctctcagcccaccctggcctcctgagtgaggtcatcagaaggatgatcagaggggggtcgatacacgtgtgctcagtgtcaggcctctgagcccaagcctgcacgtatacatccagatgaagcaagtgaagaatcacaaaagaagtgaaaatggccggttcctgccttaactgatgacattaccttgtgaaattccttctcctggctcagaagctcccccactgaggcaccttgtgacccccactcctccccgccacagaacaaccccctttgactgtaattttccactgcccgcccaaaccctataaaacggtcccaccccatctcccttccctgactctcttttcttcggactcagcccgcctgcacccaggtgaaataaacagccttgttgctcacacaaagcctgcttggtggtctcttcacacggacgcgcacgaaactcaggattgtacccagtccacatagacaagtgtgtgcacatatgtgtgctctgcctcctgcctgccctactactctctgtcctggtggaggagccccctatacggaaacccagctcccggcccctctcttcccgcgtcatgcaccctggagaaatggaaatcagctgcagttgcccagcactcccggggctggtgggcaggcgtctgagaatgggttagggttagggtctagaccaaacccagggtttgtggccctcacaccaggacacgagggaatgggagccctgaccagtaagaggagtgttcccaacagctaccccagaatcctctgctaccccagaatcctcagctcagcttctaggccacaagtaatcacccaaggggtcagaccctgggctttggggagtccctggaaggatcagaagaaaccgcccggggagcagggctccagggatgggcccatgaccagctcctggctatttggggaagaggcagaagggggccaggccagccagtgtcctgaagtcataggctatttctgaggcagctgccccctccccatatcccagggtttggcaaggggttcccataagcacctgggcccagggcctggcagcacagccccaggcagggaggatgtagctcacacacacccaacctcggcctgcccagtggctgccttctctgcccaaggaagctttggccctccagggctcatcagacacagatggccgcagagaccagtcaagaggccagcagccaccctgctgggaagctgccagctcaaagctgtgtagaggagtccatgggctctgacctgacacccacctcaacagctgtcagcacccccctccatcagagagaagacggagccagtgtgctgggcaccctggggtcataaggctgatactagaaccctggcccctgtagccaatacagccacatctctcaaagacttgtttataaaggctccagcgactgatggccacacctcctacagctggaggcagctccagcccctccacagcctgtggcctattgtggaggtcgggggtcagggctgctcaccccagcaccaatactagccttcactcctttcaaagcctcaagggtgttctcatctccatcttccactgatatccttgcctcctccaacaagcctgttccagcccagcagtgggacaaactggggacagaggaagccccaggccccctcctctcacctggcaccactttctcttgtcctggaccagcccgccagcccactctgcaggccacagttggaactctcatcccaccgcttccagcctgtggtgggagcatgagaccacaaaccaggaagtggggggggggagtgcccagagattgcgcaacccccagcactcagtccagaacatctggagaagttggttgctggcgccccggtgccggcctctccacctcctggggcaggggccaatctgctctccaagtgattctctttcctcataagaaaggtggggataaaaacacccctctgggagcctctggactccccgtgagttctgcaaggaccatgtatcacttgtaacatcagaataaatataagtacaaagtaacacccatcctctccctgcccatcaagaggacaaaggctcaactggggcctcagtttccctactagactgagggggagcactcggggggatggggggctgttcccacaggaaggagagactcattgtttgggaggcatggctgcagataagcagggagggtgtggaatcacatccagggctgctttataaacacggattgatgacacattatgcccccaccccgggaagcggcacacagtgctacaaacagctggtggcttccagccggctgatggcccctccctccccaggaagtcctggctggggcccatgggggtgggacggctggtcagaggaggagaggcagttggagaccaggtcctgccctgttagcctttctgtaggaccaggtgtcacactcatctgagggctccagacacatggcctgtgcgtctgtcctgcccagcgtctcccacctgacgcggccaggtgcccagttgctcttcaaggccttttcaggtgctcctttccaggaccagggtcacagaagtcaaagctcaggaaaagcccctcgagggtttttgtgcggcagaggtgggttgtggggtgggattgtgcctgccacagtggaggggccctgcagacccagataaaccttcaagtggccagaagcgggggatggctctgctgggtgctggggctgccatgggccgtgggagccagcagtgtgcccagctccctcagggcccgtcccctaggcccttccgtccactgggccaagcaccgtccctgcccctccctaggggcatggatctgacttgagaggttgtgagagcttacaggcgctgggccgtcggggaggcctcagaagcgtaggacggctgcgcactgccgggccgtgttcagccctggtctggcctcggcctctagaggaggctgcctgcgctccagcaggcccaacccagaacgtgggcgagctcccttcagcatccctgggcggaaagagggatgggggctctgctgcagaggcagaatccgcgccgctccctccttccttcccccgaccagcctgtgacaaccccggccaggggcgggggcctccgcacaagcctggcgtccacttcctggataaggactccccggcccactccggaccagggctggggcggcctcccaggcgctcactccgctggcaccccaccggaaaacacgtctgcggcccgccccctcccccaaagcacgaccactccgcccgggcccctcgaggatccactcaggttcacgacgggcccgtcctctcggtggtctgaccaccggctggtggagtgggctctggggccgccaggcgaccagggcgcaggcgggggcggacagctcattgggaggggcgccggggcacagtgcggggctcgccccacccccaggtgccccttccccgctctcgcctcgcaggcaccgcatcgggcccgggaatcggtccggacctggcggtgggcgctgggaagaggatccacctccacgtggcccgccccgccccgggggcgcagccagttcccggcgctcactgccccccttctcccggcttccgtccccttctgcgcaggcgccgctccgccccggtcctaggggtgcttccgtggtcggcggctgctgggctccgcgccggggtccgagtcccacgaagccccggcccgagccgccggatgcccgcgcgcagcggggcccaggtgagcgcgcgcctcggccgccccgcggaacagacgcgcccacccccaggcgcagcagcgagcgcggccgcgggagcgggagtgccggggacgggcgtagcgcccaccgccccgagggttcggggcagagccagagcataggccaagggccaagctcgggccgagagcagtggccgcagcgcccgggggctgaacccacggcgcgctggcagcgcgggccgagctgcggagacggtcacgtcagcgtccgttccaggccgactggcagtctccgttctacattaacgtcagcactcccgttaaaaataatgcatctctcccatgccaggaggacttaggtgctgctaaagaccagccctccgggtgctgccaggccggcgctcacccgccaccttcatcttcccttctcctttgccccaggacagccgaggatgtgtggttaggttccccctacccatggggaggccagaggtgggaggctggcggcctgctcggtctcagcagaccctcctagtccctcaggagaccttgcctttgccccacttgctcgttatccagcctgggccatgaagcagaggacagttagggaccctgagcacgcggtggtcaccccggtgctcacccctccctgtgtgtccgaccttggccctgctaagatcctgtgttttgaattctggcaagggttggatgaaagggcagggctccagaaaccagctcagacgtttgcttgggacctgcatgatgagtgggaatcggagggcaccagccctgctgtcccaggctcaggcccccatctgctccccaggtcatgcagcctgggcccccatgccgtgcagctcgcacatatgtggggcagagcagccaccctgcccccagcagcagccgtccatcgtcagacgtgatcatttcctgaggcctcgagtgtgtcagggt

SEQ ID NO: 2826 - DNA, 6000 bp, Homo sapiens
ccccactctgccctcatctcattccagaacttcctgctcctggccctctctctcgcatcatggttttacagatgctgttccttctgctgggaacacacttcctcctcttggcctggctcaccccaccttgctctgcagctctcaggtgaaggatgaccttgggggccttcccagaggccctgggcccaagccaggccccaagagcaccctgcacaaccatcagggtttccactccacgagtggggaattcctcgctccacatttctcccgaatacaacgcagatggagtccagctccggggcctctctcagagccctgcacggagcaggtgctcagcccatgtgacctcctgccccagcacctgtctctgagtggggctggcctggctccaccctgggagcacctttctgactctatgggctgggtggaggaccagcatgctggaagtggagtcacaggtcacaaggatgtggggaatcccaagagcagccagtgggctggagccagccccgccctcctctactcaccaatgcctgacacagtgccccaggccacagccatagccaggtgtgccatcttgggcccaacacccggcagcgccaccagctcggccacagaggctgggatgtccccaccgtagtgctgctgcaggatggcgctggtctgcttgatgtatttcaccttgctctgaaagacaggggtgggttcagccttggaggcaagggcacagcccaacctgggaggatgcagcccccaggagacccacaggtggccagagctacctgcacctgctgaggacgtgtgcaagctcagcccccgccccccaggaggcgggaacaagcggagggcagcagggaggcccaaggtaggcctgaccccctcctcccacccgtgtgggccaatgatgcacgtgtaggctctggctggggttcccctgcccgtcattccctgccagcacccaggccaggccaagcaggccagccgctcccaggagtggggcttggctgcacctgcgccttcaggaaggagggctggagctggggcttccccaccagctgccaggcctgccgggtggttcccatcctgtgcctgagtggagagggctatttaaaacccatctgagaaactgcggcccacgcgggtgccaaggggaagcggccccacccaccaagctgctttcaacagatccgcccaccaccatccagtgctcggcggggttggggagcagcctccccagggctcctggagggtgaggggctctggacaggagggggtgacacaccgggagaggctagcagtaaacaaagggaaaggcgggtgggcaggcagccttggcggtgaggaagggtgggcaggcggcgaggcggggaagcagaggaaggaagggaggatgcgaacaggaaggccaaggagctgctgggactgggcgtcaggcctcagggccccacggcctggggggggcttcagggggaccccccgagcctgagatgcttgaccctcacttcctgcaccgtcgccacccccctcagccttctgaggtctctctcaggccactgccacccggcccccgttgccacaggcagggctcaccctccagaaaccgacggggtagatgagcttgcccagcgtggcatcatctgtctgcaggatgctgtccaccgtcaggccccgcgcccgcagtcgctgcatggcgcccgccgtcacctggtctttggtttggctggagagcatcagtgacagcagcacctggtacctgcgtacctgcttgtgcagtgacagggaccggggtggcggcgggtcctgggtgattccctggccaggctccgccccccgccctcgacacaccctggtttgttgccctgggccacacttgaggcatcagcctccccctgtggggtggggaggtctggtttgggtatgtttggtcatctacaacaccaggacaataatagtacctgactcactggagtaatgtgaagcttaaatgaattatctcagtgcttagaatcgtatgtggccgggcgtggtggctcgcacccgtcatcccagcacttcgggaggccaaggcaggcggatcacctgaagtcaggagtttgagaccagcctgatcaacgtggtgaaaccccgtctctactaaaaatacaaacattagctgggtgcggtggtgcatgcctgtaatcccagctactcgggaggccgaggcaggagaataatttgaacctcggaggcgaaggttgcagtgagctaagatttcaccactgcactccagcctgggcaacaagagcaagacttggtctcaaaaaaaaacccaacacgatcgtatctggcccatcactactgaacagccattggccactactattatgattgcttcgtgaatcatcacactaccctttaaaacaaatttttttttttgagatgcagtatcactctttcacccaggctgaagtgtggtggtgccatcttggctcactgcaacctccgcctccggggttcaagcgattttcctgcctcgccctcctaagtagctggggttacaggtgcctgccaccacacctggctaatttttgtatttttagtagagacgtggtttcgccacattggccaggctggtctcgaactcctgacctcaggtgatccacccgccttggcctcccgaagtgctgggattacaggcctgaaccaccatgcctggcccatactacccattttacagacaagcaaactgaggctcagagaggcctgtatccaagccacctggtagcagaatagggattagaactcagcttggtctaagggtttcaggccctgggaccgtgaagcaaaaggaactcttccttcctgatatcacacaaagcccaggtcacgcctgcactgggcagaagttcgagcacgaggccctaaaccactggtgtcctgacctgctgagtggctacagtgatgcaggcgatgctctggggcaccgggtgtccatcctcccaaggtgctgtctgcaggggagggtgccagccaaaagccaccgggtagaaagaaaacaaggaccttgctaagatggggggtcatctgggcagatggggcccctgcctacctttgggggggcactggagtcatagcagtgctcagtccccagatggtccacaggtgcatcctttttgttcctcatggcacggatgttgaccagctgttgctgccagtcctggggctcccagactggcaccttgaggggctcagccccctcacctttctcactgtccgagccctcataggccacacgcagtctctgtgctttccgcggacgcttcacggggctgtggcttttcctcgcttctgcaaaaagcaccacgcagtccctctggtggggccacaggtgaaggtagggtaggggtgccatcccgcctgctagctcacccctcactcgttcatgccacaactgtccatcatctaatacacttggggtgctctgccctctgcagtctggggtatgtgggccctccttatgccagcgaccctgacaaggtccatgttagctcatgaggactctagcaacagcctgtaccaaggtgcccccaatacatcttctatactgcaccagagacagtctgctaacacccacatcaggttgtgtcactcccttttaaaaaatcctggccggccgggcgcggtggatcaagcctgtaatcccagcactttgggaggccgaggtgggtggatcacttgaggtcaggagttcaagaccagcctggccaatatggcaaaaccccatctctactaaaaatacaaaagttagccgggtgtggtggcaggggcctatagtctcagctacttgggaggctgaggcaggagaactgcttgaacctggggggcggaggttgcagtgagctgagatcacaacactccactacagcctgggtgacagagcaagacccgatctcaaaacaaacaacaaaacctcctaattgacttccgtttactgtcataataaactccaaactctatcctggcatcaaagctcctgccaccctggctggcatcaccacctgcctgctcccagctgcaccagttcctcctgacatagtctggactacccctggggtccctgggtgcctatgggaatccagctctggccaattctgcagaagtcccagcgggactagcgcagaggccctgtccgtgtccctcactgctcactgcagtgcttggcccccagcaggtcctcaacggctgcaggataaatataataagtgccatgccctttcctgttttccctcagaggcaccctcccccgagctgggggagcaggcttctggctgcgtgtgtccttggcacccagcctctccgaggacagcaagttcactgcaggagggcggggatgggacccacagagcctggagtggagagtcccggacagagtggtgggaaaggaagcgttttcttgcttggggcgaaagggggcagcggagcggagcgcccgaaacccagcccctgcggaccgcaatctttgggaaaaaggcgcaaggtgggaacgcagggccgcacgtgggaaccgttcgcggctgccgggtttgcagcccctgcccgcgcagctgggagccgcaggaggcggcccgggactccagcctgcagcccctatcccgcctcctcccacgctccagccacggcgcggcgctacctgctgcagcctctcttctccggagaggcccgggctcctccctacacccccgcggcccagccccgggtcccaggctccggctccgggtcagcatcctcgcgctcaaggcggtcatgccggactcctgcggactacacatcccggcggcccatgcggccccgtcacgtgatgcaaggatcgccggcctttccgccagagggcggcacagaactacaactcccagcaagctcccaaggcggccctccgcgcaatgccgctaccggaagtgcgggtcgcgcttccggcggcgtcccggggccaggggggtgcgcctttctccgcgtcggggcggcccggagcgcggtggcgcggcgcggggtaagtggcggtccccacggggcaagtggcggtccccacggggcagcggcctagagaggcggaccccgcagtgtccgggtcccgggccctcacccgcgcccactgcaacccgactccggagctccgagcatcccttagttttaagtcatggcgggtgcgaacgggtctctgctgcaggcggctccgtgacagctcctgcttcacatgggtagaggagagacggcaaacgtcggggctcccaggacttcgcggcggcagtcctaacccgtgcactgagtcgggcggggcgggcggcagcgtctgagtagagagctctctagaccaggcctggtgtctcccgggctttcctaggtgcctgtttgcgagctggtcagctgggctgtagttgagttctcccagggagtgtgggaggaaaggttatgcccaccagagacccagggtcctgacggctggaggtccgcagtggggaaggtgggcagaggtgttgctcagatgtccccattcctgtttcgtttgcacagaggggttttctggtgcgtcctggtccaccatggccaaaccaacaagcaaagattcaggcttgaaggagaagtttaagattctgttgggactgggaacaccgaggccaaatcccaggtctgcagagggtaaacagacggagtttatcatcaccgcggaaatactgagagtgagtgagctacctgtgtctttgctaggctagagggaaatgcagagaaggctgggtttggtcttgcaccaggttctgtgggagacgggttgctggcaactgtctacacaggaatgctgtctccagtacttggaggccgacatgtccttcctcaggagacttcgaaagtcaggatcttggtgacctggttcaggcacacttgagttactattcagatgttgatgaaagaaagcccatcttatagatgaggcctgagtatcatcatcttcacaggtaaggatatgtc

SEQ ID NO: 2827 - DNA, 6000 bp, Homo sapiens
cctgacttcaagtgatccatctgccttggcctcccaaagtgctgggattacaggcatgagcacccgccacctaagacacattgtttaataaatgatgggctttgtgacttaccaaggccaagtgattattcgggcaatgctggacctcagtccaggtctacgtgactaaaggccatgttctgtcccctagagcacgcagccactgcagacactgagccatgccaaagcagtggattcagagggacttctggttcacagtcatttagtgcatattggcagaattcctccagatgtgtaaatattatatttagtacttaaattctttaaattcagcatgctcagccggcaatgccagcaaccagagggagttacgactgctgagaatcatgcagcagggagtctgagggcagaaactcaccaattctcagcacaggcgctcttgtggaatattgatagctggtctaatatctaaatagagtatctctggctcttcctacaccagcaggtgtttctcactcctggcgcctgaaatgtgtgtgccttctaagactgtaaaaataggcacctctcatatttctatataggaacacttagaaacaaacagcatttggaaagctgcatacatcttatatgaagtcattccacttttacaagagtcttgctataagtctgatgtatgagcatagatatttgtatgtctataaagttctggtgatgatgcccttaaaattctctgttccagagaaaagtagggagaggcaggacaactgcgatgaagcattgctttgcttgagagctcttcactaaacaaatgtgtaaatatccaaatttatgctttatgttcttaaatccctatatgttatggattaggacaaaagtatcaaattttaagtagaatattgggaaaacctcaaataaaatttaacttttctaattttataaattattttgttgctgtattgttattttttaattggtttttcttttcgatattttcaaaccacagttggttggatccacagatgcagaacccacagagggccaactgtaagtttctatctatctatatctatagtttaggtaaagataatgtgtatttatatctaaatatatctaggtagatatatagaaaatctgcatatatctaaatctatgtagagatagatagagaaataaacataaaatcaagaagcttctatgaaacaaaagtagggagctataaaggtaaagacagaaatgcagaacaaaaagccaaattaagaaaagaataatgaggaaatttaaattctaatagaataattaaaatcctcattggagataatttaaagcagaaaggacatcaaaaaccataagagatataaagaacaaactttaggctggaagtggtggctcatgcctgtaatctcagcactttgggaggctgaggcaggcagattacttgaagtcaggagttcaagaccagcctggccaacatggcgaagccccaactctactaataatacaaaattagctggacatagtggtgtgtgcctgtaatcccagctactcaggaggctgaggcacgagaattgtttgaacccaggaggccgaggttgcagtgagccaagttcatgccactgcactccagcctgggcgacagggtgagaccctgtctcaaaaaaaaaaaaaaaaaaaaaaaaaaaatcttcacctcagattgaaagcttttacccagggacaaaaataaaatgtgtagccacaacctgtcacaatttataaaagtctacttccccagataccaacatttgacattaaatgttgcccaccacacacatttaaatctagaattcacaaggtgatattttttagtgctgatgaagtatttatacagtagctgggaagtttttttctttcatttttattataaaagcaatataagttcatgataagaaagtcaaacagagcagaagggcatatactgaaatacaaaggtctaatcctgaaacccactacttatgtcagctccccagaagtaattgctgtggttaagatctgtttattctaggacttttctatgcacataccatttaccgttttgtttttatacaaatgggaccatactatacattactgttttgcaactgcttttttcagtatacaataatacatattgagtatctttccacatacaggttttcatggctaatattctacctatcagagatgcacaaagaaattttaactactctcctattcttggacatttaggagaaatatccaagaaataacaatagtccacacaatgatataatgaatacacatcttcatatacaagctccccactagaatataagttctatgcccgctttgcccactagtaagctcccagagcttagagcagtgcctgacacattgggtgccccataaacattcaccagatgactgtatgtgtatatgtatctatacatgtatttaaaatttctgtgtagattgaccaatcgccttccaaaaagattgtttcactgtatactcctatgtatagtttttgtttgtttggttggttggttggtttttttgagacggaatttcgcttttgttgcccaggctggagtgcaatggcgccatctcggctcaccgcaacctctgcctcctgggttcaagcgattctcctgcctcagccttagctgagattacaggcatgcgccaccacgcctggctaatttttgtatttttagtagagacggggttccaccatgttggtcaggctggtctcgaactcccgacctcaggtgatccgcctgcctcggcttcacaaagtgctgggattacaggcgtgagccaccgcgtccggccctatgtatagtttttaaattttattttgttttgatcagcttgggacgtcatctgatcaaacggacttaacacaaattcattatcttccagttctgggggtcggaagtccaaaatgggtggatagagctgcagtcctcccgggagccctaggggagaatccatttccttgcctttttcagcttgtaagggctgcattccttggttcagtgcccgttccacatcactctgaactcggcctcctgtcacatctctgaatctgaccctcctacctctctctttctcttataagcacatttgtgatacattgagcccacctggataatccatataatccccccatctcaagaaccttaacatactcacatctgcaaacccccctttgccacataaaacaacctacaggctccagggattaggatatgaacatctttgggaagccgatattctgcctaccaccgcttgggagtcaggtttgaatttcagctttgtcatttcaatcttcatttcctaaatatgtgttgagtacccccatatcacgtcctgaaatagatctaagaaatacactaactagctcccgtggccttgcccaagttatataacctccctgcacctccatttttctcactggcagaactgacgagattaatatctgcctcagaggaaacgctgtatgtaaagtgtctgccggcaaccctttccacttaaacagcattcaggaattatatgctattttcatcttgacaaaatgtaagcaaaataccagattaagcagtaaagaggtagaggaacagatcctcttggaaacggctagtgtgaatgtgaattggtataggctttctagagggcaatgtggcaatgtgaatggaatgaaaagccttacaaatttttttctctttatcccagtgattattcatttctagacgtgtatctgaaggccacggctgaatttacatacaaagatgtttagtgaaatattatttatattactggaagggaaaaagcagaaacagactaaatgtcctctaataagcaattaggtaagtacacccacataatggaaatctcatcagccatataaaaggactttgtaaaagaatatgaaacatcatgttcagaggtttgccaaatgttaatgacaaagctggggatttaaatcagggatattaattatctcgtgtcggtaaaagaactccgtgtgatgagagaatgtgtatatagatagaaaaaaaaggactaaataaaatagatttcgtgatgttaacagtggttatttccaagtaatggaaacaagtgattttcatttttgtttacttgtattttctattttctaataacaaaggtggggggtttctatacaaaacaattcctctactagttcaactatcaggcatttctaggtatagaacaaacactgcgggaggtgtccctctagtggaaggagggatttttaaaaatagtttattgtattgaagtctttgggaggcaaacagaggtctgaagtcagtaaatgattctgcttattccacagccactgcactccagcctgggcaacatatcaacatcctgtctcgggaaagaaaaaaaaaattaaaagaaggatggggagtaatcgcaaaaggaagggccaaaaaccaccctaggaaacaggtgctactaactcttggcgcatttggaatattgaccagtaactttttcaactgtcgatgtcgggggattaagctccttaggcttacttccccttcccttgctttttggcagcttgaggctagggtgccaggggatgtggaaactcaaaagagacgtgaatggagcctgatatctgcaagctacaccgacagggggcgccagcccctacaggtgactccatgaatcttcggctccactcggctcttcttcggctgagttcggccaacgcttgccttctcaggctcggctctcttcggctttctgagagcgcgcctgtcgtggcctcggctcctcttcggctgcgttcggcccacgatcatctcagtctcagctctcctcggctacgttcggctggctgccgtcctctcggactcggctctcttcggttgagttcggcctactctccactaggagtcggcttccttcggctgcgttcggctgcgacccggaagagcttccatggagtcagggcagccggctcgacggattgccatggcgccgctgctggagtacgagcgacagctggtgctggaactgctcgacactgacgggctagtagtgtgcgcccgcgggctcggcgcggaccggctcctctaccactttctccagctgcactgccacccagcctgcctggtgctggtgctcaacacgcagccggccgaggaggtgcggccgcgctggcgcgggagtgaggggactccgagagtgttgagggcctcctgagcggatgcgaggcctctgacagggatggaggggctctgagggggattcaggcccctgacactacgcgatgacacagagaaggatggcaggggtccccagggggatgcaggtccctcacactgcgggaacacagacgtatgtaaggggtcgctaggaggataccggtcgctcacaccgtgcggggacactgataagaattggaggggccccgagaaggctgcaggtccctggcaggagttgaagaacactaagaggaatgccagtccctgacactgtgcggggactctgagagggaagggaggggtcccaagaaggatgcaagtctttgaccagagttcaagaacactaagagaaatgggaggggtccccaggggatgcgggtccctgacactgtgcaggcacagtgagaatgatggaaggggtcccgagaaggatgcaattccctgacaacactaagagggatgggaggggtccccagaaggatgcaggtccctgacatgggtgcaagggcactgaaaggtgaaggggctctgagtggtaggagaggatcggaggtcgctgcaggggagggggagatgtcggaaggaggatctggataggaataacgggagagtcctgaagttggccattaagggagtttctgggggcagaaggaaggtccctgaaagggaacagtgatgaggatggaagatctctgagggtgatggggagacatgaaaggagatgctgaggcgctggaaaaaccccaatagggaaaag

SEQ ID NO: 2828 - DNA, 6000 bp, Homo sapiens
caggcaagggaggtgagtgagtggaggggaaaggtgggataggccggcctgggaaaagtcacctacctgctggctacaggccagtcttgaaggcggcaggggttctggcccagtgcagtccacaggcccccagcagcccaggcattccaggctctgaccacaaggccagtctggagtgatgtgtgggggcagagtgaaggggcagaagtggagcagagcatggacatatagaacaagaaagaggctgagcgtggtggctcacgcctgtaatcccagtactttgggaggtcgatgcagcaggatcacctgaggtcaggagttcgagaccaagctggccaacatggtgaaaccctgtctctactaaaaatacaaaaattagctgggcatgatggcgggcacctgtaatcctagctactcaggaggctgaggcaagagaatcacttgaacccaggaggcggaggtttcagtgagccaagatcacaccactgcactccagcctgggcaacagagtgagactctgtctcaaaaaaaaaaaaaaaaaaaaaaaaagaaagaaagaaagaacagaaagaataagaaaggacaaggacactgtagtcccattgccctaggagccagccctagcttcatggctcctgggggacctcacagagcatcaatagaagatcctagaagaaaaacaaccctggcaggtgcttttctttccctgggtttgaaggaggctccgtagacaagagactagaggagattaagacttggaagccacagggccccgtggaaggagggcatccccccatcctccttggtctttgtcctatttgcattcaatttcaaggtaagtctcccaggcttccaagaattgcatgagctcagaggcaagtaggggaaagctgaggcatggggtttccaggcagagtagaagctgttcacgtgctagggccaggggcccctcctgcctcctctgtgcccctgaggaagccccgtgactggcaggaccttgggctactagctccgcccctcccctcagcatccaccataaggcacccttgactcagactttttattgtactcaagtaaaaacctgctggacccacagcaggtggcacagaaaagaggtaggagggggtaaggacactgaggatcaggtctccagcaggtctgtccagtgtgcctgcagaggcaagcagtgtggtcacaggcagcccagggcagggagtggggtagggagcccgccaccaaagcccactcacctcttctaattctgagtcttctacttctttctcagtgtccatctggcacagccagatcaggtctccccaaagcagtgacttctcacagctaccaaggagaggggcaggtaggagatacagagtcagatgccacaagccccctccagtatccgccctggatgctgagatgagggctcagctgcctgggcctggattgcacaactgggcaccctcttcccagaggtggaccaggctggggccaggggactgcactcaccaagggcattggccctctaggggcagaagctgccctggttcttcctgaagaaactcctctgccaggcagatcacatgggcccttagcaggcagccagggtgggggcaacacaagggcccctcttcatcctgacccaggcagcaggcaggtaagagacaaggagggagaggcagctggcagcaacccctctatgcagcaggcactgttgcgggcattacacagctccatcccatgaggcaggggtgactgttatttgcatcttacaaatgaagaaactgaggtggacagttaaaatccttgcccctaggactaagctggtgcaggtcctgggagcatcagcagtgattgattgagtcacagcctcaccactgcagccagacctgaacttcctcacagctcagcaacacccagcaggtcactgaatgtccccagggcaagtcctctactcactcacaattaccgggagctcagtagaaggcacccatcgtccattattttattaaatatttaggccgggcacggtggctcatgcctgtaataccagcattttgggaggcttaggtgggcaggatcacctgaggtcaggagtttgagaccagcctggccaacatggttgaaaccccatctctactaaaaatacaaaaattagccaggcgcggtggcaggcgcgtgtaatcccagctactctggaggctgaggaaggagaattgcttgaaaccaggaggcagaggttgcagtgagctgagatcgcgccactacactccagcctgagcgacagagtaagactctgtctcaaaaaaaaaataaataaataaataaaaagaaaatttctgggccatcggctcagtgcaggactttgttctacagcagtgataagtgctgccctctgatagtgcagtgtggcagttggggtgggagaggctaatgagatcaagaaaacacgtagcatgccagacaatagtaagtgttaagggaaagggggtgcagaaaagtgcacacaagaatgagctgcagttcattacattgttttagagacagggtcatgtccaggcatggtggctcacgcctataatcccagcactctgggaggccgaggcgggcagatcacttgaggtcaggagtttgagaccagcctgcccaacatggcgaaccccatccctactaaaaacacaaacattcggcaggtgtggtggcacacttgggaggttgagataggagaatcgcttgaacccaggaggcggagcttccagtgagctgagatcactgcactccagcctccgcaacagagcaagactctgtctaaaaaaaaaaaaagggccgggcgcggtggctcatgcctgtaatcccagcactttgggaggctgaggcgggcggatcacgaggctaggacatcgagaccatcctggctaacacggtgaaaccccgtctctactaaaaatacaaaaaattaaccaggcgtggtggcgggcgcctgtagtcccagctactcgggaggctgaggcaggagaatggcgtgaacccaggaggcggagcttgcagtgagcagagatcgcgccactgcactctagcctgggcgacagagctagactccatctcaaaaaaaaaaaaaaaaaaaagagggtcatgctctgtcgaccacactggagtgcagcggagtactgatggcctagggaagaaccttttctttgaaggggaaatggtgaaggccctgagcagggcctgctttgctcaggaatggccgtaagtcctatagcatcagcatcttagagatggggatagggtggccaaagcgtgtcagtgggtttccctcaagaaagagctggatccgaagtcgtctggactctagagccatccattcctcggggggacctcacctggatggtctgggcgcacagggagcagcaggcccctggatccccctggtctggctcaggctccgcgtcatcaaagggacctgcgcggcgccttggggccggggcctggggcggtggaggcccgaaggccagaggcacgtgcggcggcggcgggaggcagaggtcctggcggaggtctgggcgcacccagcgcagcgtgagcgggaggcgagcccagggcggtgcgcgcagcatgtgcgccagcacgcgcaggtggaaagcgaaggctgtctctcctcgcaggcgaggccccacgtgcgccaggcggcgcgaggcgtgcgggtgctgccaagcccactcaaactgcgggcggcgtacaggggcatcagggcggctcggagcgaggggcggaacccaagccctcacccggccgccgctgcccggtctccttccttacccgaagggcggccacggaggacgggaagccgtgcacgacgagcaccatctccctgaggaggagaaccgtgatgtccctgtcgcagcccagcgcctcagccgcgggtcccctccaatcccacccgagagcggggtcctcattcccggcttcagccgagaagtgcagccctctgcacctgcccacctcaggccctgcctccagcccaggtacccacctgtcccacctcctctctctcctgcattccacccgaccccagcgtgcccaccaagagccctatgctggaacccagcctggatcatcacccccgccccagctagctccttccctgagttccgccgcggagatgccccgggcaccgcctccccgtcacgctcctcccctgcgacaggccccgtccccaccacagacgccccgcctctgtcacagtcctggccggtccttctcaacaggcctgtgccccgcggggtccgcctcctctgggacgccttcctcccggcacagaaggcctccccctctcaccagggccctcgcccgctggtccgccaggccccgccttttttgcggcccccattgtgctgctggacccgacgagcagtgttgacagtgaaccccacgtagacgcggccccggtaccgggggttcaggcagtagagcaggtagacgccgaaaaagcgccctggcctcgccgcgacccccgcgggacccatcgggccttggggttcgggaaccacagcagggggttgattgccgtgacctagggtccaggggagggctggatcgctagggctgcagggtgcttgcttcggaacaagctctcggggactatccggaggcagcctgcaggaagccgtagcgccggtacgtgcccctctcctgtctggaggcgggtgtagaagtccgaccgcggaagccagactgctgtccagtcggcgagcgcgtaccattcagcatcggctccgcccgagtcccaccttcctcaggctctgattggctgacacatggcaagcgcgaaaagcctggaccgctggaaagcccggctgcttgagggcggaagtactgcgttgacgtacgccttagtaagggcggaagtgagttttccagcggaagtggctcctgtaaggcagcaaggtagcgtggccggcgcccgagctggggttgtgtccctgctgggctgccgttccagctggactgccgccatggaactcagcgccgaatacctccgcgagaagctgcagcgggacctggaggcggagcatgtggtgagttgagccgccggacaaggggaaaagagctcggggggcgggttcggcaccattcatattcttccgctcggtaggaggtggaggacacgaccctcaaccgttgctcctgtagcttccgagtcctggtggtgtcggccaagttcgaggggaaaccgctgcttcagagacacaggtaaggccctgggagcaccttgcctagctcctgtaccacaaccccagccactccccctacccctgcaacctgactcccgcactccccctggcgtggctcagggaccttgaggatcccgccttcgtgacccctgcttcgagtatttcgatgtagaccctctctccaagtacgtgttcccacggcctggggactacaaccttggggacaccagtctcttgggtcaccctagcctcggggtgtgcgatcaccgctggccttttcctaaccccatctctcgccccaggctggtgaacgcgtgcctagcagaagagctcccgcacatccatgcctttgaacagaaaaccctgaccccagaccagtgggcacgtgagcgacagaaatgagggactgggatctgcacagccattaaattataaatctggaccagcttctgtgtcgatgtgtgtgtgggaggggtgctgaggccgagtctaggacctggcctctccctgccctgcctccgtccattgttttaccttggacacgtctctgtccccatctaggcctctatccctgcttgtaaaatgaaagttctaccgtaaaagtcccttccagggtctaccgagaaagccttctctctgcaactccgtttagacatctaggagtctgtactgccaccacctacccacctcctagagagctcagggttcctcctctctgctagccttcaagatgcagagatgagaaagtgatcggggtttcagggccctg

SEQ ID NO: 2829 - DNA, 6000 bp, Homo sapiens
ggcctccagcagggtcagccattcacacccatccactcacctcccattcccagccacatggcagagaaaaaaatcataataaaatggctttattttctggtacctcccagactctgatgactggtcccctagacacgcagtttgctgaaccaaccagccctagagcttcccctccaccgcgctgaggggactgacccatggcaggggatgtgggatgccccctgacttactacatcacaggaacagggccttcgtgggtagaaaccagccatgctgatgtgggccaggaggctgctctccgtttccgagctccttctcagagctgacacagctgaactatttaaggccctagcttagaacctcaataattcccaaatttaccaaaaatctgcctttcctagtcaaccaaaacatcacgttgcacgtgactctgctggcactgttgcttgtgaggaaatgaaccaaccatcacttacagggtaggcatcttttaaactgcaggtccaaagataaaaataacgagggaggctgggcatggggactcacgtctataatcccagcactgtgggaggctgaggcggcaggatcatttgagcccaggagtttgagacctgcctgagcaacacggcgagataccgtctctacgaaaaataaaataaaaaattagccaggcatggtggtgggcacctatagttccagctactcaggaggctgaggcaggaggatcccttgagcccaggaggtcgaggctgcaatgagccattgcaccactgcactgcagcctgggtgacagagcaagacactgtctctaaaaaatataaataggccgggtgtggcagctcacgcctgtaatcccagcactttaggaggccgaggtgggtgaatcacctgaggtcagaagttcgagaccagcctggccaacatggtgaaaccccatctctactaaaaatacaaaaattagctgggcatggtggcaggcgcctgtaatctcagctactcaggaggctgaggcaagagaattgcttgaatccgggaggcaaaggttgcagtgagccgagatcatgccattgtactccagcctgggggacaggagtgagacttcgtctcaaaaaaaaaaaaaaaaaaaatatatatatatatatatttttttttttttaaatgtataaatacatcatatatattttaatatataaatatattatatatattatatattttaatatataaatatattatatataatatattttaatatataaatattatatatattatattttaatatataaatattatatatattaattatatattttaatatataatatatattatattatataataataaattatatattatattatatagtaataagttatatattatactatataataatatagtataatatataatatatattataatatattatattatattatattatatattataatataaattatatatattttatatatatgttttatatattatatattttaatatatgaaacaggggaacttcttctaaggaaaagacagaattaaggcaacaggctgatcctagtttaccagagaagaaactgaggccgggagcaggagcccagctcactgaagggcagatcccaagtcagagtccaagtctccccacttttttatttatttaattttttctgagatggagtttcattcttgttgcccaaattgagtacaatggcacaatctcggctcaccgcaacctctgccttctgggttcaagccattctcgtgcctcagactcccaagtagctgggattacaggcatgtgccaccacgtccggctaacttttgtgttttcagtagaggtggggtctcaccatgttggccagactggtctcaaactcctggcctcaagtcatctgcctgcctcagcctcccaaagtgctgggattacaggcatgagccgctgtgcctggccttatgtctccccttttgaattcagagccttcccccgtgtagtgagtgcttctgcctctctagcccttcctgtgggttctgcctgggcctgacctctgtgagagacctggcaggaacaggtctgtcaggccttgtggggagtgggtgtgggaataggttttgatacccaacttagcaggtgatcctgagatgggaggacacagggctgtttgggatgggcgtcttagccatagtaaggtttggttcatatcaagcagggaccacccatggcgtcatttccaggccccacctcttcagtatgccatagaaaactacttgggcagtagaggtgtgggaagaaaacaaaaaagaaagctgggcataagtggcacacgcctgtaatcccagcacttttggaggccgaggcgggtggatcacctgaggtcgggagttcaagaccagcctgaacaacatggagaaaccctgtctctattaaaaatacaagattagccgggcgtggtagcacatacctgtaatcccagctacttgggaggctgagacaagagaatcgcttgaacccaggaggcggaggttgtggtgagccgagatcgtgccattgcactccagcctgggcaacaagagtgaaactctgtctcaaaaacagacaaacaaacaaacaataaaaaaaccccaaaaattagctgggcatggtggcgtgtgcctgtaatcccagctactagggaggctgaggcaggagaatcgcttgaacccgggagggggaagttgtagtgagccaagatcatgctactgcactccagcctgggcaacagagccaagactctgtctcaaaacaaacaaacaaacaaacaaaaaaacgcaggaaaagagtgtgtgatggctgaaacttgcaatttctcactctcaacgagccctggccccaactaggttatttgggctccctccctaggtctcagggacctctgttcaaagtcctagcaatctgggccaggtacaatggctcacgcctaaaattccagcactttaggagaccaaggcgggcagatcacttgaggccaggagtttgagactggcctggccaacatggtgaaaccctgtctctactaaaagtacaaaaattagccgggcatggtggtgcacccctgtaatcccagctactcaggaggctgaagcacaagaatcttttgaacctgggaggcagaggttgcaatgagctgagatggcgccacggcactccagcctgggcgacagagcaagaccctgtctcaaacaacaaaaaacaaataaaacaaacaaggtcctagcaaccctactaacctgttatgaagactgatacaggggcatcacctgccccaattttctgactcaggtcagccttatattcctactctaatctcacccctatccccgtcccacacccactattcttaaaacctccatggtcctccgggggcagctgtagacacattaagcccagggctatggggccactggaaccttctccagtgggtctgaaaacatcagcattccaggagttgatgagcccctacctgggcaccactccctcttgggcctgagaaggccggggggaacctgcaaggaatatgtggaattctatatggtgcctctgatactgcggtaatgtcagggagaggtttgttcaactggtcagggccctgaaaccccgatcactttctcatctctgcatcttgaaggctagcagagaggaggaaccctgagctctctaggaggtgggtaggtggtggcagtacagactcctagatgtctaaacggagttgcagagagaaggctttctcggtagaccctggaagggacttttacggtagaactttcattttacaagcagggatagaggcctagatggggacagagacgtgtccaaggtaaaacaatggacggaggcagggcagggagaggccaggtcctagactcggcctcagcacccctcccacacacacatcgacacagaagctggtccagatttataatttaatggctgtgcagatcccagtccctcatttctgtcgctcacgtgcccactggtctggggtcagggttttctgttcaaaggcatggatgtgcgggagctcttctgctaggcacgcgttcaccagcctggggcgagagatggggttaggaaaaggccagcggtgatcgcacaccccgaggctagggtgacccaagagactggtgtccccaaggttgtagtccccaggccgtgggaacacgtacttggagagagggtctacatcgaaatactcgaagcaggggtcacgaaggcgggatcctcaaggtccctgagccacgccagggggagtgcgggagtcaggttgcaggggtagggggagtggctggggttgtggtacaggagctaggcaaggtgctcccagggccttacctgtgtctctgaagcagcggtttcccctcgaacttggccgacaccaccaggactcggaagctacaggagcaacggttgagggtcgtgtcctccacctcctaccgagcggaagaatatgaatggtgccgaacccgccccccgagctcttttccccttgtccggcggctcaactcaccacatgctccgcctccaggtcccgctgcagcttctcgcggaggtattcggcgctgagttccatggcggcagtccagctggaacggcagcccagcagggacacaaccccagctcgggcgccggccacgctaccttgctgccttacaggagccacttccgctggaaaactcacttccgcccttactaaggcgtacgtcaacgcagtacttccgccctcaagcagccgggctttccagcggtccaggcttttcgcgcttgccatgtgtcagccaatcagagcctgaggaaggtgggactcgggcggagccgatgctgaatggtacgcgctcgccgactggacagcagtctggcttccgcggtcggacttctacacccgcctccagacaggagaggggcacgtaccggcgctacggcttcctgcaggctgcctccggatagtccccgagagcttgttccgaagcaagcaccctgcagccctagcgatccagccctcccctggaccctaggtcacggcaatcaaccccctgctgtggttcccgaaccccaaggcccgatgggtcccgcgggggtcgcggcgaggccagggcgctttttcggcgtctacctgctctactgcctgaacccccggtaccggggccgcgtctacgtggggttcactgtcaacactgctcgtcgggtccagcagcacaatgggggccgcaaaaaaggcggggcctggcggaccagcgggcgagggccctggtgagagggggaggccttctgtgccgggaggaaggcgtcccagaggaggcggaccccgcggggcacaggcctgttgagaaggaccggccaggactgtgacagaggcggggcgtctgtggtggggacggggcctgtcgcaggggaggagcgtgacggggaggcggtgcccggggcatctccgcggcggaactcagggaaggagctagctggggcgggggtgatgatccaggctgggttccagcatagggctcttggtgggcacgctggggtcgggtggaatgcaggagagagaggaggtgggacaggtgggtacctgggctggaggcagggcctgaggtgggcaggtgcagagggctgcacttctcggctgaagccgggaatgaggaccccgctctcgggtgggattggaggggacccgcggctgaggcgctgggctgcgacagggacatcacggttctcctcctcagggagatggtgctcgtcgtgcacggcttcccgtcctccgtggccgcccttcgggtaaggaaggagaccgggcagcggcggccgggtgagggcttgggttccgcccctcgctccgagccgccctgatgcccctgtacgccgcccgcagtttgagtgggcttggcagcacccgcacgcctcgcgccgcctggcgcacgtggggcctcgcctgcgaggagagacagccttcgctttccacct

SEQ ID NO: 2830 - DNA, 6000 bp, Homo sapiens
agtatgggtgtggtgtagggagtgtagggctgctctctgccctgagggttttgaaggtccagtgtgggagggatctaaagtcagggctgggaactccaggaaggaaggggtggggttgagggtggggaagcttctctattaccctccttaccaccacagctccagccaagcttggagtgatctgcaaacccaatatgtgagtttagtgtatagaaaacacatgaatgaaaggcaaaaggggccaacattggtatttgggtttttttttttttgagctgtcactaggctcctgaccttccctctgaactccaccctgcagggcaggccaacagacaagctttctttctttctttttcttttttttatatgagatggagactcgctctctcgcccaggctgcaatgcagtagcacgatctccgctcactgtaacctccccctcctgggttcaagcgattcttctgcctcagcctcccgagtagctgggattacaggtgcacaccaccacatccggttaatttttgtatttttagtagagacggggttttgccatgttggccaggctggtctcaaactcctgagctcagatgatccgcccgcctcggcctcccaaagtgctgagattacaggcatgagccaccatgcctggccgacaagctttctctaattgacccaggcaagggaggtgagtgagtggaggggaaaggtgggataggccggcctgggaaaagtcacctacctgctggctacaggccagtcttgaaggcggcaggggttctggcccagtgcagtccacaggcccccagcagcccaggcattccaggctctgaccacaaggccagtctggagtgatgtgtgggggcagagtgaaggggcagaagtggagcagagcatggacatatagaacaagaaagaggctgagcgtggtggctcacgcctgtaatcccagtactttgggaggtcgatgcagcaggatcacctgaggtcaggagttcgagaccaagctggccaacatggtgaaaccctgtctctactaaaaatacaaaaattagctgggcatgatggcgggcacctgtaatcctagctactcaggaggctgaggcaagagaatcacttgaacccaggaggcggaggtttcagtgagccaagatcacaccactgcactccagcctgggcaacagagtgagactctgtctcaaaaaaaaaaaaaaaaaaaaaaaaagaaagaaagaaagaacagaaagaataagaaaggacaaggacactgtagtcccattgccctaggagccagccctagcttcatggctcctgggggacctcacagagcatcaatagaagatcctagaagaaaaacaaccctggcaggtgcttttctttccctgggtttgaaggaggctccgtagacaagagactagaggagattaagacttggaagccacagggccccgtggaaggagggcatccccccatcctccttggtctttgtcctatttgcattcaatttcaaggtaagtctcccaggcttccaagaattgcatgagctcagaggcaagtaggggaaagctgaggcatggggtttccaggcagagtagaagctgttcacgtgctagggccaggggcccctcctgcctcctctgtgcccctgaggaagccccgtgactggcaggaccttgggctactagctccgcccctcccctcagcatccaccataaggcacccttgactcagactttttattgtactcaagtaaaaacctgctggacccacagcaggtggcacagaaaagaggtaggagggggtaaggacactgaggatcaggtctccagcaggtctgtccagtgtgcctgcagaggcaagcagtgtggtcacaggcagcccagggcagggagtggggtagggagcccgccaccaaagcccactcacctcttctaattctgagtcttctacttctttctcagtgtccatctggcacagccagatcaggtctccccaaagcagtgacttctcacagctaccaaggagaggggcaggtaggagatacagagtcagatgccacaagccccctccagtatccgccctggatgctgagatgagggctcagctgcctgggcctggattgcacaactgggcaccctcttcccagaggtggaccaggctggggccaggggactgcactcaccaagggcattggccctctaggggcagaagctgccctggttcttcctgaagaaactcctctgccaggcagatcacatgggcccttagcaggcagccagggtgggggcaacacaagggcccctcttcatcctgacccaggcagcaggcaggtaagagacaaggagggagaggcagctggcagcaacccctctatgcagcaggcactgttgcgggcattacacagctccatcccatgaggcaggggtgactgttatttgcatcttacaaatgaagaaactgaggtggacagttaaaatccttgcccctaggactaagctggtgcaggtcctgggagcatcagcagtgattgattgagtcacagcctcaccactgcagccagacctgaacttcctcacagctcagcaacacccagcaggtcactgaatgtccccagggcaagtcctctactcactcacaattaccgggagctcagtagaaggcacccatcgtccattattttattaaatatttaggccgggcacggtggctcatgcctgtaataccagcattttgggaggcttaggtgggcaggatcacctgaggtcaggagtttgagaccagcctggccaacatggttgaaaccccatctctactaaaaatacaaaaattagccaggcgcggtggcaggcgcgtgtaatcccagctactctggaggctgaggaaggagaattgcttgaaaccaggaggcagaggttgcagtgagctgagatcgcgccactacactccagcctgagcgacagagtaagactctgtctcaaaaaaaaaataaataaataaataaaaagaaaatttctgggccatcggctcagtgcaggactttgttctacagcagtgataagtgctgccctctgatagtgcagtgtggcagttggggtgggagaggctaatgagatcaagaaaacacgtagcatgccagacaatagtaagtgttaagggaaagggggtgcagaaaagtgcacacaagaatgagctgcagttcattacattgttttagagacagggtcatgtccaggcatggtggctcacgcctataatcccagcactctgggaggccgaggcgggcagatcacttgaggtcaggagtttgagaccagcctgcccaacatggcgaaccccatccctactaaaaacacaaacattcggcaggtgtggtggcacacttgggaggttgagataggagaatcgcttgaacccaggaggcggagcttccagtgagctgagatcactgcactccagcctccgcaacagagcaagactctgtctaaaaaaaaaaaaagggccgggcgcggtggctcatgcctgtaatcccagcactttgggaggctgaggcgggcggatcacgaggctaggacatcgagaccatcctggctaacacggtgaaaccccgtctctactaaaaatacaaaaaattaaccaggcgtggtggcgggcgcctgtagtcccagctactcgggaggctgaggcaggagaatggcgtgaacccaggaggcggagcttgcagtgagcagagatcgcgccactgcactctagcctgggcgacagagctagactccatctcaaaaaaaaaaaaaaaaaaaagagggtcatgctctgtcgaccacactggagtgcagcggagtactgatggcctagggaagaaccttttctttgaaggggaaatggtgaaggccctgagcagggcctgctttgctcaggaatggccgtaagtcctatagcatcagcatcttagagatggggatagggtggccaaagcgtgtcagtgggtttccctcaagaaagagctggatccgaagtcgtctggactctagagccatccattcctcggggggacctcacctggatggtctgggcgcacagggagcagcaggcccctggatccccctggtctggctcaggctccgcgtcatcaaagggacctgcgcggcgccttggggccggggcctggggcggtggaggcccgaaggccagaggcacgtgcggcggcggcgggaggcagaggtcctggcggaggtctgggcgcacccagcgcagcgtgagcgggaggcgagcccagggcggtgcgcgcagcatgtgcgccagcacgcgcaggtggaaagcgaaggctgtctctcctcgcaggcgaggccccacgtgcgccaggcggcgcgaggcgtgcgggtgctgccaagcccactcaaactgcgggcggcgtacaggggcatcagggcggctcggagcgaggggcggaacccaagccctcacccggccgccgctgcccggtctccttccttacccgaagggcggccacggaggacgggaagccgtgcacgacgagcaccatctccctgaggaggagaaccgtgatgtccctgtcgcagcccagcgcctcagccgcgggtcccctccaatcccacccgagagcggggtcctcattcccggcttcagccgagaagtgcagccctctgcacctgcccacctcaggccctgcctccagcccaggtacccacctgtcccacctcctctctctcctgcattccacccgaccccagcgtgcccaccaagagccctatgctggaacccagcctggatcatcacccccgccccagctagctccttccctgagttccgccgcggagatgccccgggcaccgcctccccgtcacgctcctcccctgcgacaggccccgtccccaccacagacgccccgcctctgtcacagtcctggccggtccttctcaacaggcctgtgccccgcggggtccgcctcctctgggacgccttcctcccggcacagaaggcctccccctctcaccagggccctcgcccgctggtccgccaggccccgccttttttgcggcccccattgtgctgctggacccgacgagcagtgttgacagtgaaccccacgtagacgcggccccggtaccgggggttcaggcagtagagcaggtagacgccgaaaaagcgccctggcctcgccgcgacccccgcgggacccatcgggccttggggttcgggaaccacagcagggggttgattgccgtgacctagggtccaggggagggctggatcgctagggctgcagggtgcttgcttcggaacaagctctcggggactatccggaggcagcctgcaggaagccgtagcgccggtacgtgcccctctcctgtctggaggcgggtgtagaagtccgaccgcggaagccagactgctgtccagtcggcgagcgcgtaccattcagcatcggctccgcccgagtcccaccttcctcaggctctgattggctgacacatggcaagcgcgaaaagcctggaccgctggaaagcccggctgcttgagggcggaagtactgcgttgacgtacgccttagtaagggcggaagtgagttttccagcggaagtggctcctgtaaggcagcaaggtagcgtggccggcgcccgagctggggttgtgtccctgctgggctgccgttccagctggactgccgccatggaactcagcgccgaatacctccgcgagaagctgcagcgggacctggaggcggagcatgtggtgagttgagccgccggacaaggggaaaagagctcggggggcgggttcggcaccattcatattcttccgctcggtaggaggtggaggacacgaccctcaaccgttgctcctgtagcttccgagtcctggtggtgtcggccaagttcgaggggaaaccgctgcttcagagacacaggtaaggccctgggagcaccttgcctagctcctgtaccacaaccccagccactccccctacccctgcaacctgactccc

SEQ ID NO: 2831 - DNA, 6000 bp, Homo sapiens
aaaataacgagggaggctgggcatggggactcacgtctataatcccagcactgtgggaggctgaggcggcaggatcatttgagcccaggagtttgagacctgcctgagcaacacggcgagataccgtctctacgaaaaataaaataaaaaattagccaggcatggtggtgggcacctatagttccagctactcaggaggctgaggcaggaggatcccttgagcccaggaggtcgaggctgcaatgagccattgcaccactgcactgcagcctgggtgacagagcaagacactgtctctaaaaaatataaataggccgggtgtggcagctcacgcctgtaatcccagcactttaggaggccgaggtgggtgaatcacctgaggtcagaagttcgagaccagcctggccaacatggtgaaaccccatctctactaaaaatacaaaaattagctgggcatggtggcaggcgcctgtaatctcagctactcaggaggctgaggcaagagaattgcttgaatccgggaggcaaaggttgcagtgagccgagatcatgccattgtactccagcctgggggacaggagtgagacttcgtctcaaaaaaaaaaaaaaaaaaaatatatatatatatatatttttttttttttaaatgtataaatacatcatatatattttaatatataaatatattatatatattatatattttaatatataaatatattatatataatatattttaatatataaatattatatatattatattttaatatataaatattatatatattaattatatattttaatatataatatatattatattatataataataaattatatattatattatatagtaataagttatatattatactatataataatatagtataatatataatatatattataatatattatattatattatattatatattataatataaattatatatattttatatatatgttttatatattatatattttaatatatgaaacaggggaacttcttctaaggaaaagacagaattaaggcaacaggctgatcctagtttaccagagaagaaactgaggccgggagcaggagcccagctcactgaagggcagatcccaagtcagagtccaagtctccccacttttttatttatttaattttttctgagatggagtttcattcttgttgcccaaattgagtacaatggcacaatctcggctcaccgcaacctctgccttctgggttcaagccattctcgtgcctcagactcccaagtagctgggattacaggcatgtgccaccacgtccggctaacttttgtgttttcagtagaggtggggtctcaccatgttggccagactggtctcaaactcctggcctcaagtcatctgcctgcctcagcctcccaaagtgctgggattacaggcatgagccgctgtgcctggccttatgtctccccttttgaattcagagccttcccccgtgtagtgagtgcttctgcctctctagcccttcctgtgggttctgcctgggcctgacctctgtgagagacctggcaggaacaggtctgtcaggccttgtggggagtgggtgtgggaataggttttgatacccaacttagcaggtgatcctgagatgggaggacacagggctgtttgggatgggcgtcttagccatagtaaggtttggttcatatcaagcagggaccacccatggcgtcatttccaggccccacctcttcagtatgccatagaaaactacttgggcagtagaggtgtgggaagaaaacaaaaaagaaagctgggcataagtggcacacgcctgtaatcccagcacttttggaggccgaggcgggtggatcacctgaggtcgggagttcaagaccagcctgaacaacatggagaaaccctgtctctattaaaaatacaagattagccgggcgtggtagcacatacctgtaatcccagctacttgggaggctgagacaagagaatcgcttgaacccaggaggcggaggttgtggtgagccgagatcgtgccattgcactccagcctgggcaacaagagtgaaactctgtctcaaaaacagacaaacaaacaaacaataaaaaaaccccaaaaattagctgggcatggtggcgtgtgcctgtaatcccagctactagggaggctgaggcaggagaatcgcttgaacccgggagggggaagttgtagtgagccaagatcatgctactgcactccagcctgggcaacagagccaagactctgtctcaaaacaaacaaacaaacaaacaaaaaaacgcaggaaaagagtgtgtgatggctgaaacttgcaatttctcactctcaacgagccctggccccaactaggttatttgggctccctccctaggtctcagggacctctgttcaaagtcctagcaatctgggccaggtacaatggctcacgcctaaaattccagcactttaggagaccaaggcgggcagatcacttgaggccaggagtttgagactggcctggccaacatggtgaaaccctgtctctactaaaagtacaaaaattagccgggcatggtggtgcacccctgtaatcccagctactcaggaggctgaagcacaagaatcttttgaacctgggaggcagaggttgcaatgagctgagatggcgccacggcactccagcctgggcgacagagcaagaccctgtctcaaacaacaaaaaacaaataaaacaaacaaggtcctagcaaccctactaacctgttatgaagactgatacaggggcatcacctgccccaattttctgactcaggtcagccttatattcctactctaatctcacccctatccccgtcccacacccactattcttaaaacctccatggtcctccgggggcagctgtagacacattaagcccagggctatggggccactggaaccttctccagtgggtctgaaaacatcagcattccaggagttgatgagcccctacctgggcaccactccctcttgggcctgagaaggccggggggaacctgcaaggaatatgtggaattctatatggtgcctctgatactgcggtaatgtcagggagaggtttgttcaactggtcagggccctgaaaccccgatcactttctcatctctgcatcttgaaggctagcagagaggaggaaccctgagctctctaggaggtgggtaggtggtggcagtacagactcctagatgtctaaacggagttgcagagagaaggctttctcggtagaccctggaagggacttttacggtagaactttcattttacaagcagggatagaggcctagatggggacagagacgtgtccaaggtaaaacaatggacggaggcagggcagggagaggccaggtcctagactcggcctcagcacccctcccacacacacatcgacacagaagctggtccagatttataatttaatggctgtgcagatcccagtccctcatttctgtcgctcacgtgcccactggtctggggtcagggttttctgttcaaaggcatggatgtgcgggagctcttctgctaggcacgcgttcaccagcctggggcgagagatggggttaggaaaaggccagcggtgatcgcacaccccgaggctagggtgacccaagagactggtgtccccaaggttgtagtccccaggccgtgggaacacgtacttggagagagggtctacatcgaaatactcgaagcaggggtcacgaaggcgggatcctcaaggtccctgagccacgccagggggagtgcgggagtcaggttgcaggggtagggggagtggctggggttgtggtacaggagctaggcaaggtgctcccagggccttacctgtgtctctgaagcagcggtttcccctcgaacttggccgacaccaccaggactcggaagctacaggagcaacggttgagggtcgtgtcctccacctcctaccgagcggaagaatatgaatggtgccgaacccgccccccgagctcttttccccttgtccggcggctcaactcaccacatgctccgcctccaggtcccgctgcagcttctcgcggaggtattcggcgctgagttccatggcggcagtccagctggaacggcagcccagcagggacacaaccccagctcgggcgccggccacgctaccttgctgccttacaggagccacttccgctggaaaactcacttccgcccttactaaggcgtacgtcaacgcagtacttccgccctcaagcagccgggctttccagcggtccaggcttttcgcgcttgccatgtgtcagccaatcagagcctgaggaaggtgggactcgggcggagccgatgctgaatggtacgcgctcgccgactggacagcagtctggcttccgcggtcggacttctacacccgcctccagacaggagaggggcacgtaccggcgctacggcttcctgcaggctgcctccggatagtccccgagagcttgttccgaagcaagcaccctgcagccctagcgatccagccctcccctggaccctaggtcacggcaatcaaccccctgctgtggttcccgaaccccaaggcccgatgggtcccgcgggggtcgcggcgaggccagggcgctttttcggcgtctacctgctctactgcctgaacccccggtaccggggccgcgtctacgtggggttcactgtcaacactgctcgtcgggtccagcagcacaatgggggccgcaaaaaaggcggggcctggcggaccagcgggcgagggccctggtgagagggggaggccttctgtgccgggaggaaggcgtcccagaggaggcggaccccgcggggcacaggcctgttgagaaggaccggccaggactgtgacagaggcggggcgtctgtggtggggacggggcctgtcgcaggggaggagcgtgacggggaggcggtgcccggggcatctccgcggcggaactcagggaaggagctagctggggcgggggtgatgatccaggctgggttccagcatagggctcttggtgggcacgctggggtcgggtggaatgcaggagagagaggaggtgggacaggtgggtacctgggctggaggcagggcctgaggtgggcaggtgcagagggctgcacttctcggctgaagccgggaatgaggaccccgctctcgggtgggattggaggggacccgcggctgaggcgctgggctgcgacagggacatcacggttctcctcctcagggagatggtgctcgtcgtgcacggcttcccgtcctccgtggccgcccttcgggtaaggaaggagaccgggcagcggcggccgggtgagggcttgggttccgcccctcgctccgagccgccctgatgcccctgtacgccgcccgcagtttgagtgggcttggcagcacccgcacgcctcgcgccgcctggcgcacgtggggcctcgcctgcgaggagagacagccttcgctttccacctgcgcgtgctggcgcacatgctgcgcgcaccgccctgggctcgcctcccgctcacgctgcgctgggtgcgcccagacctccgccaggacctctgcctcccgccgccgccgcacgtgcctctggccttcgggcctccaccgccccaggccccggccccaaggcgccgcgcaggtccctttgatgacgcggagcctgagccagaccagggggatccaggggcctgctgctccctgtgcgcccagaccatccaggtgaggtccccccgaggaatggatggctctagagtccagacgacttcggatccagctctttcttgagggaaacccactgacacgctttggccaccctatccccatctctaagatgctgatgctataggacttacggccattcctgagcaaagcaggccctgctcagggccttcaccatttccccttcaaagaaaaggttcttccctaggccatcagtactccgctgcactccagtgtggtcgacagagcatgaccctctttt

SEQ ID NO: 2832 - DNA, 6000 bp, Homo sapiens
tatattttaatatataatatatattatattatataataataaattatatattatattatatagtaataagttatatattatactatataataatatagtataatatataatatatattataatatattatattatattatattatatattataatataaattatatatattttatatatatgttttatatattatatattttaatatatgaaacaggggaacttcttctaaggaaaagacagaattaaggcaacaggctgatcctagtttaccagagaagaaactgaggccgggagcaggagcccagctcactgaagggcagatcccaagtcagagtccaagtctccccacttttttatttatttaattttttctgagatggagtttcattcttgttgcccaaattgagtacaatggcacaatctcggctcaccgcaacctctgccttctgggttcaagccattctcgtgcctcagactcccaagtagctgggattacaggcatgtgccaccacgtccggctaacttttgtgttttcagtagaggtggggtctcaccatgttggccagactggtctcaaactcctggcctcaagtcatctgcctgcctcagcctcccaaagtgctgggattacaggcatgagccgctgtgcctggccttatgtctccccttttgaattcagagccttcccccgtgtagtgagtgcttctgcctctctagcccttcctgtgggttctgcctgggcctgacctctgtgagagacctggcaggaacaggtctgtcaggccttgtggggagtgggtgtgggaataggttttgatacccaacttagcaggtgatcctgagatgggaggacacagggctgtttgggatgggcgtcttagccatagtaaggtttggttcatatcaagcagggaccacccatggcgtcatttccaggccccacctcttcagtatgccatagaaaactacttgggcagtagaggtgtgggaagaaaacaaaaaagaaagctgggcataagtggcacacgcctgtaatcccagcacttttggaggccgaggcgggtggatcacctgaggtcgggagttcaagaccagcctgaacaacatggagaaaccctgtctctattaaaaatacaagattagccgggcgtggtagcacatacctgtaatcccagctacttgggaggctgagacaagagaatcgcttgaacccaggaggcggaggttgtggtgagccgagatcgtgccattgcactccagcctgggcaacaagagtgaaactctgtctcaaaaacagacaaacaaacaaacaataaaaaaaccccaaaaattagctgggcatggtggcgtgtgcctgtaatcccagctactagggaggctgaggcaggagaatcgcttgaacccgggagggggaagttgtagtgagccaagatcatgctactgcactccagcctgggcaacagagccaagactctgtctcaaaacaaacaaacaaacaaacaaaaaaacgcaggaaaagagtgtgtgatggctgaaacttgcaatttctcactctcaacgagccctggccccaactaggttatttgggctccctccctaggtctcagggacctctgttcaaagtcctagcaatctgggccaggtacaatggctcacgcctaaaattccagcactttaggagaccaaggcgggcagatcacttgaggccaggagtttgagactggcctggccaacatggtgaaaccctgtctctactaaaagtacaaaaattagccgggcatggtggtgcacccctgtaatcccagctactcaggaggctgaagcacaagaatcttttgaacctgggaggcagaggttgcaatgagctgagatggcgccacggcactccagcctgggcgacagagcaagaccctgtctcaaacaacaaaaaacaaataaaacaaacaaggtcctagcaaccctactaacctgttatgaagactgatacaggggcatcacctgccccaattttctgactcaggtcagccttatattcctactctaatctcacccctatccccgtcccacacccactattcttaaaacctccatggtcctccgggggcagctgtagacacattaagcccagggctatggggccactggaaccttctccagtgggtctgaaaacatcagcattccaggagttgatgagcccctacctgggcaccactccctcttgggcctgagaaggccggggggaacctgcaaggaatatgtggaattctatatggtgcctctgatactgcggtaatgtcagggagaggtttgttcaactggtcagggccctgaaaccccgatcactttctcatctctgcatcttgaaggctagcagagaggaggaaccctgagctctctaggaggtgggtaggtggtggcagtacagactcctagatgtctaaacggagttgcagagagaaggctttctcggtagaccctggaagggacttttacggtagaactttcattttacaagcagggatagaggcctagatggggacagagacgtgtccaaggtaaaacaatggacggaggcagggcagggagaggccaggtcctagactcggcctcagcacccctcccacacacacatcgacacagaagctggtccagatttataatttaatggctgtgcagatcccagtccctcatttctgtcgctcacgtgcccactggtctggggtcagggttttctgttcaaaggcatggatgtgcgggagctcttctgctaggcacgcgttcaccagcctggggcgagagatggggttaggaaaaggccagcggtgatcgcacaccccgaggctagggtgacccaagagactggtgtccccaaggttgtagtccccaggccgtgggaacacgtacttggagagagggtctacatcgaaatactcgaagcaggggtcacgaaggcgggatcctcaaggtccctgagccacgccagggggagtgcgggagtcaggttgcaggggtagggggagtggctggggttgtggtacaggagctaggcaaggtgctcccagggccttacctgtgtctctgaagcagcggtttcccctcgaacttggccgacaccaccaggactcggaagctacaggagcaacggttgagggtcgtgtcctccacctcctaccgagcggaagaatatgaatggtgccgaacccgccccccgagctcttttccccttgtccggcggctcaactcaccacatgctccgcctccaggtcccgctgcagcttctcgcggaggtattcggcgctgagttccatggcggcagtccagctggaacggcagcccagcagggacacaaccccagctcgggcgccggccacgctaccttgctgccttacaggagccacttccgctggaaaactcacttccgcccttactaaggcgtacgtcaacgcagtacttccgccctcaagcagccgggctttccagcggtccaggcttttcgcgcttgccatgtgtcagccaatcagagcctgaggaaggtgggactcgggcggagccgatgctgaatggtacgcgctcgccgactggacagcagtctggcttccgcggtcggacttctacacccgcctccagacaggagaggggcacgtaccggcgctacggcttcctgcaggctgcctccggatagtccccgagagcttgttccgaagcaagcaccctgcagccctagcgatccagccctcccctggaccctaggtcacggcaatcaaccccctgctgtggttcccgaaccccaaggcccgatgggtcccgcgggggtcgcggcgaggccagggcgctttttcggcgtctacctgctctactgcctgaacccccggtaccggggccgcgtctacgtggggttcactgtcaacactgctcgtcgggtccagcagcacaatgggggccgcaaaaaaggcggggcctggcggaccagcgggcgagggccctggtgagagggggaggccttctgtgccgggaggaaggcgtcccagaggaggcggaccccgcggggcacaggcctgttgagaaggaccggccaggactgtgacagaggcggggcgtctgtggtggggacggggcctgtcgcaggggaggagcgtgacggggaggcggtgcccggggcatctccgcggcggaactcagggaaggagctagctggggcgggggtgatgatccaggctgggttccagcatagggctcttggtgggcacgctggggtcgggtggaatgcaggagagagaggaggtgggacaggtgggtacctgggctggaggcagggcctgaggtgggcaggtgcagagggctgcacttctcggctgaagccgggaatgaggaccccgctctcgggtgggattggaggggacccgcggctgaggcgctgggctgcgacagggacatcacggttctcctcctcagggagatggtgctcgtcgtgcacggcttcccgtcctccgtggccgcccttcgggtaaggaaggagaccgggcagcggcggccgggtgagggcttgggttccgcccctcgctccgagccgccctgatgcccctgtacgccgcccgcagtttgagtgggcttggcagcacccgcacgcctcgcgccgcctggcgcacgtggggcctcgcctgcgaggagagacagccttcgctttccacctgcgcgtgctggcgcacatgctgcgcgcaccgccctgggctcgcctcccgctcacgctgcgctgggtgcgcccagacctccgccaggacctctgcctcccgccgccgccgcacgtgcctctggccttcgggcctccaccgccccaggccccggccccaaggcgccgcgcaggtccctttgatgacgcggagcctgagccagaccagggggatccaggggcctgctgctccctgtgcgcccagaccatccaggtgaggtccccccgaggaatggatggctctagagtccagacgacttcggatccagctctttcttgagggaaacccactgacacgctttggccaccctatccccatctctaagatgctgatgctataggacttacggccattcctgagcaaagcaggccctgctcagggccttcaccatttccccttcaaagaaaaggttcttccctaggccatcagtactccgctgcactccagtgtggtcgacagagcatgaccctcttttttttttttttttttttgagatggagtctagctctgtcgcccaggctagagtgcagtggcgcgatctctgctcactgcaagctccgcctcctgggttcacgccattctcctgcctcagcctcccgagtagctgggactacaggcgcccgccaccacgcctggttaattttttgtatttttagtagagacggggtttcaccgtgttagccaggatggtctcgatgtcctagcctcgtgatccgcccgcctcagcctcccaaagtgctgggattacaggcatgagccaccgcgcccggccctttttttttttttagacagagtcttgctctgttgcggaggctggagtgcagtgatctcagctcactggaagctccgcctcctgggttcaagcgattctcctatctcaacctcccaagtgtgccaccacacctgccgaatgtttgtgtttttagtagggatggggttcgccatgttgggcaggctggtctcaaactcctgacctcaagtgatctgcccgcctcggcctcccagagtgctgggattataggcgtgagccaccatgcctggacatgaccctgtctctaaaacaatgtaatgaactgcagctcattcttgtgtgcacttttctgcaccccctttcccttaacacttactattgtctggcatgctacgtgttttcttgatctcattagcctctcccaccccaactgccacactgcactatcagagggcagcacttatcactgctgtagaacaaagtcctgcactgagccgatggcccagaaattttcttttta

SEQ ID NO: 2833 - DNA, 6000 bp, Homo sapiens
gtgccaccacgtccggctaacttttgtgttttcagtagaggtggggtctcaccatgttggccagactggtctcaaactcctggcctcaagtcatctgcctgcctcagcctcccaaagtgctgggattacaggcatgagccgctgtgcctggccttatgtctccccttttgaattcagagccttcccccgtgtagtgagtgcttctgcctctctagcccttcctgtgggttctgcctgggcctgacctctgtgagagacctggcaggaacaggtctgtcaggccttgtggggagtgggtgtgggaataggttttgatacccaacttagcaggtgatcctgagatgggaggacacagggctgtttgggatgggcgtcttagccatagtaaggtttggttcatatcaagcagggaccacccatggcgtcatttccaggccccacctcttcagtatgccatagaaaactacttgggcagtagaggtgtgggaagaaaacaaaaaagaaagctgggcataagtggcacacgcctgtaatcccagcacttttggaggccgaggcgggtggatcacctgaggtcgggagttcaagaccagcctgaacaacatggagaaaccctgtctctattaaaaatacaagattagccgggcgtggtagcacatacctgtaatcccagctacttgggaggctgagacaagagaatcgcttgaacccaggaggcggaggttgtggtgagccgagatcgtgccattgcactccagcctgggcaacaagagtgaaactctgtctcaaaaacagacaaacaaacaaacaataaaaaaaccccaaaaattagctgggcatggtggcgtgtgcctgtaatcccagctactagggaggctgaggcaggagaatcgcttgaacccgggagggggaagttgtagtgagccaagatcatgctactgcactccagcctgggcaacagagccaagactctgtctcaaaacaaacaaacaaacaaacaaaaaaacgcaggaaaagagtgtgtgatggctgaaacttgcaatttctcactctcaacgagccctggccccaactaggttatttgggctccctccctaggtctcagggacctctgttcaaagtcctagcaatctgggccaggtacaatggctcacgcctaaaattccagcactttaggagaccaaggcgggcagatcacttgaggccaggagtttgagactggcctggccaacatggtgaaaccctgtctctactaaaagtacaaaaattagccgggcatggtggtgcacccctgtaatcccagctactcaggaggctgaagcacaagaatcttttgaacctgggaggcagaggttgcaatgagctgagatggcgccacggcactccagcctgggcgacagagcaagaccctgtctcaaacaacaaaaaacaaataaaacaaacaaggtcctagcaaccctactaacctgttatgaagactgatacaggggcatcacctgccccaattttctgactcaggtcagccttatattcctactctaatctcacccctatccccgtcccacacccactattcttaaaacctccatggtcctccgggggcagctgtagacacattaagcccagggctatggggccactggaaccttctccagtgggtctgaaaacatcagcattccaggagttgatgagcccctacctgggcaccactccctcttgggcctgagaaggccggggggaacctgcaaggaatatgtggaattctatatggtgcctctgatactgcggtaatgtcagggagaggtttgttcaactggtcagggccctgaaaccccgatcactttctcatctctgcatcttgaaggctagcagagaggaggaaccctgagctctctaggaggtgggtaggtggtggcagtacagactcctagatgtctaaacggagttgcagagagaaggctttctcggtagaccctggaagggacttttacggtagaactttcattttacaagcagggatagaggcctagatggggacagagacgtgtccaaggtaaaacaatggacggaggcagggcagggagaggccaggtcctagactcggcctcagcacccctcccacacacacatcgacacagaagctggtccagatttataatttaatggctgtgcagatcccagtccctcatttctgtcgctcacgtgcccactggtctggggtcagggttttctgttcaaaggcatggatgtgcgggagctcttctgctaggcacgcgttcaccagcctggggcgagagatggggttaggaaaaggccagcggtgatcgcacaccccgaggctagggtgacccaagagactggtgtccccaaggttgtagtccccaggccgtgggaacacgtacttggagagagggtctacatcgaaatactcgaagcaggggtcacgaaggcgggatcctcaaggtccctgagccacgccagggggagtgcgggagtcaggttgcaggggtagggggagtggctggggttgtggtacaggagctaggcaaggtgctcccagggccttacctgtgtctctgaagcagcggtttcccctcgaacttggccgacaccaccaggactcggaagctacaggagcaacggttgagggtcgtgtcctccacctcctaccgagcggaagaatatgaatggtgccgaacccgccccccgagctcttttccccttgtccggcggctcaactcaccacatgctccgcctccaggtcccgctgcagcttctcgcggaggtattcggcgctgagttccatggcggcagtccagctggaacggcagcccagcagggacacaaccccagctcgggcgccggccacgctaccttgctgccttacaggagccacttccgctggaaaactcacttccgcccttactaaggcgtacgtcaacgcagtacttccgccctcaagcagccgggctttccagcggtccaggcttttcgcgcttgccatgtgtcagccaatcagagcctgaggaaggtgggactcgggcggagccgatgctgaatggtacgcgctcgccgactggacagcagtctggcttccgcggtcggacttctacacccgcctccagacaggagaggggcacgtaccggcgctacggcttcctgcaggctgcctccggatagtccccgagagcttgttccgaagcaagcaccctgcagccctagcgatccagccctcccctggaccctaggtcacggcaatcaaccccctgctgtggttcccgaaccccaaggcccgatgggtcccgcgggggtcgcggcgaggccagggcgctttttcggcgtctacctgctctactgcctgaacccccggtaccggggccgcgtctacgtggggttcactgtcaacactgctcgtcgggtccagcagcacaatgggggccgcaaaaaaggcggggcctggcggaccagcgggcgagggccctggtgagagggggaggccttctgtgccgggaggaaggcgtcccagaggaggcggaccccgcggggcacaggcctgttgagaaggaccggccaggactgtgacagaggcggggcgtctgtggtggggacggggcctgtcgcaggggaggagcgtgacggggaggcggtgcccggggcatctccgcggcggaactcagggaaggagctagctggggcgggggtgatgatccaggctgggttccagcatagggctcttggtgggcacgctggggtcgggtggaatgcaggagagagaggaggtgggacaggtgggtacctgggctggaggcagggcctgaggtgggcaggtgcagagggctgcacttctcggctgaagccgggaatgaggaccccgctctcgggtgggattggaggggacccgcggctgaggcgctgggctgcgacagggacatcacggttctcctcctcagggagatggtgctcgtcgtgcacggcttcccgtcctccgtggccgcccttcgggtaaggaaggagaccgggcagcggcggccgggtgagggcttgggttccgcccctcgctccgagccgccctgatgcccctgtacgccgcccgcagtttgagtgggcttggcagcacccgcacgcctcgcgccgcctggcgcacgtggggcctcgcctgcgaggagagacagccttcgctttccacctgcgcgtgctggcgcacatgctgcgcgcaccgccctgggctcgcctcccgctcacgctgcgctgggtgcgcccagacctccgccaggacctctgcctcccgccgccgccgcacgtgcctctggccttcgggcctccaccgccccaggccccggccccaaggcgccgcgcaggtccctttgatgacgcggagcctgagccagaccagggggatccaggggcctgctgctccctgtgcgcccagaccatccaggtgaggtccccccgaggaatggatggctctagagtccagacgacttcggatccagctctttcttgagggaaacccactgacacgctttggccaccctatccccatctctaagatgctgatgctataggacttacggccattcctgagcaaagcaggccctgctcagggccttcaccatttccccttcaaagaaaaggttcttccctaggccatcagtactccgctgcactccagtgtggtcgacagagcatgaccctcttttttttttttttttttttgagatggagtctagctctgtcgcccaggctagagtgcagtggcgcgatctctgctcactgcaagctccgcctcctgggttcacgccattctcctgcctcagcctcccgagtagctgggactacaggcgcccgccaccacgcctggttaattttttgtatttttagtagagacggggtttcaccgtgttagccaggatggtctcgatgtcctagcctcgtgatccgcccgcctcagcctcccaaagtgctgggattacaggcatgagccaccgcgcccggccctttttttttttttagacagagtcttgctctgttgcggaggctggagtgcagtgatctcagctcactggaagctccgcctcctgggttcaagcgattctcctatctcaacctcccaagtgtgccaccacacctgccgaatgtttgtgtttttagtagggatggggttcgccatgttgggcaggctggtctcaaactcctgacctcaagtgatctgcccgcctcggcctcccagagtgctgggattataggcgtgagccaccatgcctggacatgaccctgtctctaaaacaatgtaatgaactgcagctcattcttgtgtgcacttttctgcaccccctttcccttaacacttactattgtctggcatgctacgtgttttcttgatctcattagcctctcccaccccaactgccacactgcactatcagagggcagcacttatcactgctgtagaacaaagtcctgcactgagccgatggcccagaaattttctttttatttatttatttattttttttttgagacagagtcttactctgtcgctcaggctggagtgtagtggcgcgatctcagctcactgcaacctctgcctcctggtttcaagcaattctccttcctcagcctccagagtagctgggattacacgcgcctgccaccgcgcctggctaatttttgtatttttagtagagatggggtttcaaccatgttggccaggctggtctcaaactcctgacctcaggtgatcctgcccacctaagcctcccaaaatgctggtattacaggcatgagccaccgtgcccggcctaaatatttaataaaataatggacgatgggtgccttctactgagctcccggtaattgtgagtgagtagaggacttgccctggggacattcagtgacctgctgggtgttgctgagctgtgaggaagttcaggtctggctgcagtggtgaggctgtgactcaatcaatcactgctgatgctcccaggacctgcaccagct

SEQ ID NO: 2834 - DNA, 6000 bp, Homo sapiens
agagggggaggccttctgtgccgggaggaaggcgtcccagaggaggcggaccccgcggggcacaggcctgttgagaaggaccggccaggactgtgacagaggcggggcgtctgtggtggggacggggcctgtcgcaggggaggagcgtgacggggaggcggtgcccggggcatctccgcggcggaactcagggaaggagctagctggggcgggggtgatgatccaggctgggttccagcatagggctcttggtgggcacgctggggtcgggtggaatgcaggagagagaggaggtgggacaggtgggtacctgggctggaggcagggcctgaggtgggcaggtgcagagggctgcacttctcggctgaagccgggaatgaggaccccgctctcgggtgggattggaggggacccgcggctgaggcgctgggctgcgacagggacatcacggttctcctcctcagggagatggtgctcgtcgtgcacggcttcccgtcctccgtggccgcccttcgggtaaggaaggagaccgggcagcggcggccgggtgagggcttgggttccgcccctcgctccgagccgccctgatgcccctgtacgccgcccgcagtttgagtgggcttggcagcacccgcacgcctcgcgccgcctggcgcacgtggggcctcgcctgcgaggagagacagccttcgctttccacctgcgcgtgctggcgcacatgctgcgcgcaccgccctgggctcgcctcccgctcacgctgcgctgggtgcgcccagacctccgccaggacctctgcctcccgccgccgccgcacgtgcctctggccttcgggcctccaccgccccaggccccggccccaaggcgccgcgcaggtccctttgatgacgcggagcctgagccagaccagggggatccaggggcctgctgctccctgtgcgcccagaccatccaggtgaggtccccccgaggaatggatggctctagagtccagacgacttcggatccagctctttcttgagggaaacccactgacacgctttggccaccctatccccatctctaagatgctgatgctataggacttacggccattcctgagcaaagcaggccctgctcagggccttcaccatttccccttcaaagaaaaggttcttccctaggccatcagtactccgctgcactccagtgtggtcgacagagcatgaccctcttttttttttttttttttttgagatggagtctagctctgtcgcccaggctagagtgcagtggcgcgatctctgctcactgcaagctccgcctcctgggttcacgccattctcctgcctcagcctcccgagtagctgggactacaggcgcccgccaccacgcctggttaattttttgtatttttagtagagacggggtttcaccgtgttagccaggatggtctcgatgtcctagcctcgtgatccgcccgcctcagcctcccaaagtgctgggattacaggcatgagccaccgcgcccggccctttttttttttttagacagagtcttgctctgttgcggaggctggagtgcagtgatctcagctcactggaagctccgcctcctgggttcaagcgattctcctatctcaacctcccaagtgtgccaccacacctgccgaatgtttgtgtttttagtagggatggggttcgccatgttgggcaggctggtctcaaactcctgacctcaagtgatctgcccgcctcggcctcccagagtgctgggattataggcgtgagccaccatgcctggacatgaccctgtctctaaaacaatgtaatgaactgcagctcattcttgtgtgcacttttctgcaccccctttcccttaacacttactattgtctggcatgctacgtgttttcttgatctcattagcctctcccaccccaactgccacactgcactatcagagggcagcacttatcactgctgtagaacaaagtcctgcactgagccgatggcccagaaattttctttttatttatttatttattttttttttgagacagagtcttactctgtcgctcaggctggagtgtagtggcgcgatctcagctcactgcaacctctgcctcctggtttcaagcaattctccttcctcagcctccagagtagctgggattacacgcgcctgccaccgcgcctggctaatttttgtatttttagtagagatggggtttcaaccatgttggccaggctggtctcaaactcctgacctcaggtgatcctgcccacctaagcctcccaaaatgctggtattacaggcatgagccaccgtgcccggcctaaatatttaataaaataatggacgatgggtgccttctactgagctcccggtaattgtgagtgagtagaggacttgccctggggacattcagtgacctgctgggtgttgctgagctgtgaggaagttcaggtctggctgcagtggtgaggctgtgactcaatcaatcactgctgatgctcccaggacctgcaccagcttagtcctaggggcaaggattttaactgtccacctcagtttcttcatttgtaagatgcaaataacagtcacccctgcctcatgggatggagctgtgtaatgcccgcaacagtgcctgctgcatagaggggttgctgccagctgcctctccctccttgtctcttacctgcctgctgcctgggtcaggatgaagaggggcccttgtgttgcccccaccctggctgcctgctaagggcccatgtgatctgcctggcagaggagtttcttcaggaagaaccagggcagcttctgcccctagagggccaatgcccttggtgagtgcagtcccctggccccagcctggtccacctctgggaagagggtgcccagttgtgcaatccaggcccaggcagctgagccctcatctcagcatccagggcggatactggagggggcttgtggcatctgactctgtatctcctacctgcccctctccttggtagctgtgagaagtcactgctttggggagacctgatctggctgtgccagatggacactgagaaagaagtagaagactcagaattagaagaggtgagtgggctttggtggcgggctccctaccccactccctgccctgggctgcctgtgaccacactgcttgcctctgcaggcacactggacagacctgctggagacctgatcctcagtgtccttaccccctcctacctcttttctgtgccacctgctgtgggtccagcaggtttttacttgagtacaataaaaagtctgagtcaagggtgccttatggtggatgctgaggggaggggcggagctagtagcccaaggtcctgccagtcacggggcttcctcaggggcacagaggaggcaggaggggcccctggccctagcacgtgaacagcttctactctgcctggaaaccccatgcctcagctttcccctacttgcctctgagctcatgcaattcttggaagcctgggagacttaccttgaaattgaatgcaaataggacaaagaccaaggaggatggggggatgccctccttccacggggccctgtggcttccaagtcttaatctcctctagtctcttgtctacggagcctccttcaaacccagggaaagaaaagcacctgccagggttgtttttcttctaggatcttctattgatgctctgtgaggtcccccaggagccatgaagctagggctggctcctagggcaatgggactacagtgtccttgtcctttcttattctttctgttctttctttctttctttttttttttttttttttttttttgagacagagtctcactctgttgcccaggctggagtgcagtggtgtgatcttggctcactgaaacctccgcctcctgggttcaagtgattctcttgcctcagcctcctgagtagctaggattacaggtgcccgccatcatgcccagctaatttttgtatttttagtagagacagggtttcaccatgttggccagcttggtctcgaactcctgacctcaggtgatcctgctgcatcgacctcccaaagtactgggattacaggcgtgagccaccacgctcagcctctttcttgttctatatgtccatgctctgctccacttctgccccttcactctgcccccacacatcactccagactggccttgtggtcagagcctggaatgcctgggctgctgggggcctgtggactgcactgggccagaacccctgccgccttcaagactggcctgtagccagcaggtaggtgacttttcccaggccggcctatcccacctttcccctccactcactcacctcccttgcctgggtcaattagagaaagcttgtcggccaggcatggtggctcatgcctgtaatctcagcactttgggaggccgaggcgggcggatcatctgagctcaggagtttgagaccagcctggccaacatggcaaaaccccgtctctactaaaaatacaaaaattaaccggatgtggtggtgtgcacctgtaatcccagctactcgggaggctgaggcagaagaatcgcttgaacccaggagggggaggttacagtgagcggagatcgtgctactgcattgcagcctgggcgagagagcgagtctccatctcatataaaaaaaagaaaaagaaagaaagaaagcttgtctgttggcctgccctgcagggtggagttcagagggaaggtcaggagcctagtgacagctcaaaaaaaaaaaaacccaaataccaatgttggccccttttgcctttcattcatgtgttttctatacactaaactcacatattgggtttgcagatcactccaagcttggctggagctgtggtggtaaggagggtaatagagaagcttccccaccctcaaccccaccccttccttcctggagttcccagccctgactttagatccctcccacactggaccttcaaaaccctcagggcagagagcagccctacactccctacaccacacccatactcagcccctgcaggcaaggagagaacaggtcaggttcccgagagctcaggtgagtgacacgttggaatggcccagggcaccttcaccctgctcagcttgtggctccaacattctagaagccgaggcctctgccatccctgccctttcccatggatattccatttcaattagacaacccagcctggccggaatccccctgcgttccttcttttcctttgtgtatttttgagacagggtgttgctccgtcacccaggctggagtgtagtgggatcctggcccactgcagcctcaaattcctaggctgaggcaatcctgccgcctcagcctcctgagtagctggggttacaagagcaagccaccacacccagctaattttgaaaaatattttttgtagaggagaggtcttgctttgttgtccaggttggtctcaaactccagggctcaagggatcctttcccgttggcctcccaaggctctgggattacaggcgggagtcaccctgcctgggcccctccttttgatgagtcatcagttttcattcccgcacgaggctctagcccctggtaccagcttagttgctcaatgggctgtgtttgttctggagcccagatggactgtggccaggcaagtggatcacagacctggccggcctgggaggtttccacatgtgaggggcatgaggggggctcaaggaggggagcatcggggagaggagcgcactgggtggaggctgggggtcccagcaggaaatggtgagacaaagggcgctggctggcagggagacagcacaggcaggccctagagcttcctcagcacagctggactctcctggagaccttcacacaccctgatatctgggccccgcgctacgagggtgctttcactggtctgcactatgccccaggccctgggattttgaacagctctgcaggtgactgaaaggtgcggccaggctggggaacgacctggtttcagccccagccccgccactgactg

SEQ ID NO: 2835 - DNA, 6000 bp, Homo sapiens
ctgatgcccctgtacgccgcccgcagtttgagtgggcttggcagcacccgcacgcctcgcgccgcctggcgcacgtggggcctcgcctgcgaggagagacagccttcgctttccacctgcgcgtgctggcgcacatgctgcgcgcaccgccctgggctcgcctcccgctcacgctgcgctgggtgcgcccagacctccgccaggacctctgcctcccgccgccgccgcacgtgcctctggccttcgggcctccaccgccccaggccccggccccaaggcgccgcgcaggtccctttgatgacgcggagcctgagccagaccagggggatccaggggcctgctgctccctgtgcgcccagaccatccaggtgaggtccccccgaggaatggatggctctagagtccagacgacttcggatccagctctttcttgagggaaacccactgacacgctttggccaccctatccccatctctaagatgctgatgctataggacttacggccattcctgagcaaagcaggccctgctcagggccttcaccatttccccttcaaagaaaaggttcttccctaggccatcagtactccgctgcactccagtgtggtcgacagagcatgaccctcttttttttttttttttttttgagatggagtctagctctgtcgcccaggctagagtgcagtggcgcgatctctgctcactgcaagctccgcctcctgggttcacgccattctcctgcctcagcctcccgagtagctgggactacaggcgcccgccaccacgcctggttaattttttgtatttttagtagagacggggtttcaccgtgttagccaggatggtctcgatgtcctagcctcgtgatccgcccgcctcagcctcccaaagtgctgggattacaggcatgagccaccgcgcccggccctttttttttttttagacagagtcttgctctgttgcggaggctggagtgcagtgatctcagctcactggaagctccgcctcctgggttcaagcgattctcctatctcaacctcccaagtgtgccaccacacctgccgaatgtttgtgtttttagtagggatggggttcgccatgttgggcaggctggtctcaaactcctgacctcaagtgatctgcccgcctcggcctcccagagtgctgggattataggcgtgagccaccatgcctggacatgaccctgtctctaaaacaatgtaatgaactgcagctcattcttgtgtgcacttttctgcaccccctttcccttaacacttactattgtctggcatgctacgtgttttcttgatctcattagcctctcccaccccaactgccacactgcactatcagagggcagcacttatcactgctgtagaacaaagtcctgcactgagccgatggcccagaaattttctttttatttatttatttattttttttttgagacagagtcttactctgtcgctcaggctggagtgtagtggcgcgatctcagctcactgcaacctctgcctcctggtttcaagcaattctccttcctcagcctccagagtagctgggattacacgcgcctgccaccgcgcctggctaatttttgtatttttagtagagatggggtttcaaccatgttggccaggctggtctcaaactcctgacctcaggtgatcctgcccacctaagcctcccaaaatgctggtattacaggcatgagccaccgtgcccggcctaaatatttaataaaataatggacgatgggtgccttctactgagctcccggtaattgtgagtgagtagaggacttgccctggggacattcagtgacctgctgggtgttgctgagctgtgaggaagttcaggtctggctgcagtggtgaggctgtgactcaatcaatcactgctgatgctcccaggacctgcaccagcttagtcctaggggcaaggattttaactgtccacctcagtttcttcatttgtaagatgcaaataacagtcacccctgcctcatgggatggagctgtgtaatgcccgcaacagtgcctgctgcatagaggggttgctgccagctgcctctccctccttgtctcttacctgcctgctgcctgggtcaggatgaagaggggcccttgtgttgcccccaccctggctgcctgctaagggcccatgtgatctgcctggcagaggagtttcttcaggaagaaccagggcagcttctgcccctagagggccaatgcccttggtgagtgcagtcccctggccccagcctggtccacctctgggaagagggtgcccagttgtgcaatccaggcccaggcagctgagccctcatctcagcatccagggcggatactggagggggcttgtggcatctgactctgtatctcctacctgcccctctccttggtagctgtgagaagtcactgctttggggagacctgatctggctgtgccagatggacactgagaaagaagtagaagactcagaattagaagaggtgagtgggctttggtggcgggctccctaccccactccctgccctgggctgcctgtgaccacactgcttgcctctgcaggcacactggacagacctgctggagacctgatcctcagtgtccttaccccctcctacctcttttctgtgccacctgctgtgggtccagcaggtttttacttgagtacaataaaaagtctgagtcaagggtgccttatggtggatgctgaggggaggggcggagctagtagcccaaggtcctgccagtcacggggcttcctcaggggcacagaggaggcaggaggggcccctggccctagcacgtgaacagcttctactctgcctggaaaccccatgcctcagctttcccctacttgcctctgagctcatgcaattcttggaagcctgggagacttaccttgaaattgaatgcaaataggacaaagaccaaggaggatggggggatgccctccttccacggggccctgtggcttccaagtcttaatctcctctagtctcttgtctacggagcctccttcaaacccagggaaagaaaagcacctgccagggttgtttttcttctaggatcttctattgatgctctgtgaggtcccccaggagccatgaagctagggctggctcctagggcaatgggactacagtgtccttgtcctttcttattctttctgttctttctttctttctttttttttttttttttttttttttgagacagagtctcactctgttgcccaggctggagtgcagtggtgtgatcttggctcactgaaacctccgcctcctgggttcaagtgattctcttgcctcagcctcctgagtagctaggattacaggtgcccgccatcatgcccagctaatttttgtatttttagtagagacagggtttcaccatgttggccagcttggtctcgaactcctgacctcaggtgatcctgctgcatcgacctcccaaagtactgggattacaggcgtgagccaccacgctcagcctctttcttgttctatatgtccatgctctgctccacttctgccccttcactctgcccccacacatcactccagactggccttgtggtcagagcctggaatgcctgggctgctgggggcctgtggactgcactgggccagaacccctgccgccttcaagactggcctgtagccagcaggtaggtgacttttcccaggccggcctatcccacctttcccctccactcactcacctcccttgcctgggtcaattagagaaagcttgtcggccaggcatggtggctcatgcctgtaatctcagcactttgggaggccgaggcgggcggatcatctgagctcaggagtttgagaccagcctggccaacatggcaaaaccccgtctctactaaaaatacaaaaattaaccggatgtggtggtgtgcacctgtaatcccagctactcgggaggctgaggcagaagaatcgcttgaacccaggagggggaggttacagtgagcggagatcgtgctactgcattgcagcctgggcgagagagcgagtctccatctcatataaaaaaaagaaaaagaaagaaagaaagcttgtctgttggcctgccctgcagggtggagttcagagggaaggtcaggagcctagtgacagctcaaaaaaaaaaaaacccaaataccaatgttggccccttttgcctttcattcatgtgttttctatacactaaactcacatattgggtttgcagatcactccaagcttggctggagctgtggtggtaaggagggtaatagagaagcttccccaccctcaaccccaccccttccttcctggagttcccagccctgactttagatccctcccacactggaccttcaaaaccctcagggcagagagcagccctacactccctacaccacacccatactcagcccctgcaggcaaggagagaacaggtcaggttcccgagagctcaggtgagtgacacgttggaatggcccagggcaccttcaccctgctcagcttgtggctccaacattctagaagccgaggcctctgccatccctgccctttcccatggatattccatttcaattagacaacccagcctggccggaatccccctgcgttccttcttttcctttgtgtatttttgagacagggtgttgctccgtcacccaggctggagtgtagtgggatcctggcccactgcagcctcaaattcctaggctgaggcaatcctgccgcctcagcctcctgagtagctggggttacaagagcaagccaccacacccagctaattttgaaaaatattttttgtagaggagaggtcttgctttgttgtccaggttggtctcaaactccagggctcaagggatcctttcccgttggcctcccaaggctctgggattacaggcgggagtcaccctgcctgggcccctccttttgatgagtcatcagttttcattcccgcacgaggctctagcccctggtaccagcttagttgctcaatgggctgtgtttgttctggagcccagatggactgtggccaggcaagtggatcacagacctggccggcctgggaggtttccacatgtgaggggcatgaggggggctcaaggaggggagcatcggggagaggagcgcactgggtggaggctgggggtcccagcaggaaatggtgagacaaagggcgctggctggcagggagacagcacaggcaggccctagagcttcctcagcacagctggactctcctggagaccttcacacaccctgatatctgggccccgcgctacgagggtgctttcactggtctgcactatgccccaggccctgggattttgaacagctctgcaggtgactgaaaggtgcggccaggctggggaacgacctggtttcagccccagccccgccactgactgactttgtgagtgcgggcaagtcactcagcctccctaggcctcagtgacttccctgaaagcaaaaactctgcaaaggggcagctgggtgctggctcacacctgtaatcccagcactttgggaggctgaggtagacaaatcacttgaggccaggagttctagaccagcctggccaacatggtgaaaccccatctctactaaagaaaaaaaaaaattagctgagcatggttgtacatgcttgtaatcccagctacttgggatgccgaggcgggaggattgcttgaacccaagaggtggagtttgcagtgagctgagattgtgccacactgcactccagcttgggtgagagtgagactccatctcaaaaaaaaaaaaaaaaagagagaatcccactttcttgctgttgtgatggtggtaagggaacgggcctggctctggcccctgatgcaggaacatggagctgatccaggacacctcccgcccgccactggagtacgtgaagggggtcccgctcatcaagtactttgcagaggcactggggcccctgcagagcttccaagcccgacctgatgacctgctcatcaac

SEQ ID NO: 2836 - DNA, 6000 bp, Homo sapiens
tttttgtatatttagtagagacggggtttcaccatgttggccaggctggtctcaaactcctgacctcaagtgattcgcccgcctcagcctcccaaagtgctgggattacaggtgtcagccactgtgcctggccgacagcatttattaatatgcaaaataggtaaatgaaatattgcctatgttaaacaaaataatctttgtttttaacaaacaaggcaaacaatctcacaaaggtttcttccctttgtgttctgaggcacctcccaaatgaacaatcttgttattatcaaaagttccaccaaatggctacggcaattacaaactgtccctggtgaaattgtgtcagttacagatatatgggtacatgttattgcaatcgtgagaaaacatgaagggagcaggtctttggcccaattttagttgtgactggggtctaaaagaatggtgcttatacaacttcgtatctctagaatgtggccaaacaccatcgctgatcagaggccagagaaagccccctgatactgagcagaagaaatgaaacaaagcagtttgcaaggacatagacaaaaccaaagaaatccttttcaaggctttgaaatggtgacctggggctgggcgtggtggctcatgcctgtaatcccaacactttgggagccagaggtgggtggatcacctgaggtcaggagttcgagactaacctggccaacatggtgaaaccctgtctctatcaaaaatacaaaaattagccggacatggtagcaggcacctgtaatcccagctactcaggaggctgaggcatgagaatcacttgaacccgggaagtggaggttgcagctgagctgagattgtcctattgcacttcagcaggcaacaagagtaaaactctgtctcaaaaaacaaaaacaaaaaagaaatggtgacctgggcaaagtttacccaaaggacattagtctgagaataccttccgaattgtacagtctctggagctggttgtaggacacacttactggctcttggttgctggagtgatttctctggttaattctgataacaaataagactctcggatgctaactagttgcacaacccctcaacagttggcatccctaccttcctagagggataagttgtgttcggtcaccagagattcagcaataataggtttgtgatgcccttagacatccgaggctacacatccatccttttcttttcttttttttttttttttgagacagagacttttttttttttttctctgtcgcccaggctggagtgccatggcacgaactcggctcactgcaacctctgcctcccaagttcaagcgattctcctgccttggcctcccaagtagctgggattacaggcacctgccaccacacccagctaattttttgcatttttagtagtcggggtttcaccattttggccaggctggtcttgaactcctgatctcaggtgatccacccacctcagcctcccaaagttgctgggattacaggcctgagccaccgcgcccagcctacatccatcctttttatatcgactttgcctcttatagacaaacaatattcaaaatactagacaagaaaacaccataggaatgagtgtagaaggacagaaaacaattgcaccaaggacaaaataaatatttgatcagataaccaaaaatccagtgtgggggccttattccaggagtaaaaaaactgaaaaaccaaataaacccaatgcttggcagggcatggtggctcacatctataatcccagcactttgggaagccaaggtgggaggattgctttgagctcaggagtttgagaccagcctgggtaacagagtgaaaccctatctctacaaaaaaatatatatataaaacttaaccggcattcctgggtgtggtggctcatgcctgtaatcccagaactttgggaggccaaggtgagcagatcatggggtcaggagtttgagaccagcctgaccaacatggagaaaccccatctttgctaaaaatacaaaacttagccaggtgtggtggcgcatgcctgtaaccctagctactcagaaggctgaggcaggagaattgcttgaacccgggaggcagagcttgcagggagcagagatagcgccactgcactccactctgggagacagagcgagactctgtcccccgccaaaaaaaaaaaaaaaaattaaccggcattggttaattttagtgccagctactcaggaggctgaaactggagaatcacttgagctgggaagcagaggttgcagtgagctgagtcgtaccactgcactccagcctggtcaacagagtgagaccctatctcaaaaagtaaaaaatgaaaaataaaaaatatggccaggcatggtggctcacgcctgtaatcctagcactttgggaggccgaggcgggtggatcacctgaggtcaggagtttgagaccagcctgacaaacatggagaaactgtctctactacaaatataaaattagccaggtgtggtggtgcatgcctgtaatcccagctactcaagaggctgaggcagaagaactgcttgaacccaggaggcggaggttgcggtgagccgagatcgtgtcattgcacttcagcctgggcaacaagagtgaaactctgtctcaaaaattaattaattaattaattaaaataaaaagtaaacccaatgcttaagggtatcaacacaatatcagaactcaattagcttccaaccatcagcaggttggcacctcagcgacataagcagtttcaggtgtgcatacaatgacgagtcaagggtcccagtcccaggcagtgagggcttcagctgaatctttgttgctcctccatttctgatagtaccctccaaccaaggaccaccaggaagcacctgtagttgaacaagggaggctgaacaccacagacatctcagcaagaacatgtgtgaaaggacttattacaggattggaactttcattaggggacttcctaggcgggtccaaaaaggggggcatttgctctgggttggatgctatcaggaagtagggataattctttttggttatcttaataattcttatctagaagatgggaggaatgaatcaagctaaaactgtacttggtaaagaagcagcagtggccaggtgcagtggctcacacctgtagtcccagcactttgggaggccaaggtgggcatatcaccggaggtcaagagttcaagactcacctgggcaacttggtgaatccccgtctctactaaaaatacagaaatgatctgggcatgatggtgggtgcctgtaatcccagatactctggaagctgaggcaggagaatcgcttgaacctggaggtggaggttgtggtaagccaagattgcatcactgcactccagcctgggtaacagagcaagacttcatttcaaaaacaaaacaaaacaaacaaaaacaacaaccaaaaaaaaagcagcagtaacttacgctgtgggagagaggattgtgttggtaatttttgtggtttggacaatgttcttgtttctgtattgaggctttattatggaatggtctttttctagatcagtcagagagtgaccttgtctgatgttttttgtgaaattattttgctcaacaggacaccaccatggccgtgctgttggtgccaggtcagctcctagcaacatcaaggcttctggagtgagggtgcaaaccagctcccagctggcagcagttgcttttctcttttacaccgccacactcgaaatcagaaaattggcaacccctttggtagaacatgagctcccggtcactacaggcccatttatacccagtaacaggcccaggtcacacatttacactccgaccttcctcctgcgtgtgcatcccttacaccaaccacgcccagagaaaagtcactcgtctagcatctcccagggacctgctggcagggctgaagatagaactctgactctgtgttttccctccagcaaccccccttgctagacattaagacagattgttaaatccctgatgtatcggcttctaaactggatgcagatcgggtcagataaaaacacttctcagtgcaccttcttgtcaacagtgggttcctatctattcttctttcttttgggattgggtgctaggtcccacgacattagctgggattctaagacctttgctcagctgctgcggccaccactgacacgccctctgctcctcaaatacggagaacagttcagtgttcctgcctgaggatctctgcatttgccttccctctgcctggaactcttccctcacatccgcttcccagcttcagctcggcatcacctcctcagagaggccttccatccttggtgcccgggcaccactgctacccgttttggcctctgttttttttttttttttcaaaggacgttatgttgcccaggctagagtgcaacggtccgatcacggattactgcagcttccaactcctggcttcaagcgctccttctgcctcggcctcccgagtagctaggcttacaggctggggttacaggtgtgagccacagcgcccggccgctttggcctcctttaagagcttccctccgcgctttgttcgcagttctggtcacagtctgttcagtgcgcggggctgggaggcgggaaactgcccaatgcccagacctctctgtctgtttcccctcaagctcgtgaagctctctgacagcagagacccaatcacgaggtggagacttcgctttccacatcgggcagggggtcggccgcatcctcgatctggtcctggtgactcgagaccagagaggagcgcacgtcgacccgcccggggaacccgcaggccacacgccaaacctctacgggatcccccagcgaggccactgcgcatgctccatactcgcagccccgcccccattcaggggcggggccgcgcctgcgcagctgcccggcgccggcttccgggtggtgcgagcgagatggggcggagggccggtcttgcagagtagctgcggtgagtgggcgtgtgcgccgagcggtctggcccaagggctgggggccggccgagggtcttcgggagcaggccgcagggcgcggagagatcctgggatcgccgtccgccgctgctacccggcatgtcggcggaggcctcgggcccggctgccgccgcggccccgtccctggaagcccccaagccctcgggtctcgagcctggccccgccgcctacggtctcaagccgctgaccccgaacagcaaatacgtgaagctgaacgtgggcggctcgttgcactacaccacgctgcgcaccctcacgggacaggacaccatgctcaaagccatgttcagcggccgcgtggaggtgctgaccgatgccggaggtacgagcggcgcccctaccgtgcccccaccccagacccccaactcccgttccccgcagtctctcaccaccggggctcctcatgccccttctctctgcccgctactgtccagtcaactcattctcagctccctccagcccccacatcccatctcctcccctttctcattcataatttctcttctcctcccccaatcctttacccccagcaataaccaacacttacggaacccctaactgccaggcgctgtggtaagtgattgaacgtgtcagttcataatcctcatgaccacctctcccacccttcacccctcagctcaagacttgggaactagccctgctgcctgcagtactactcctggcagccttcctcagtttcttccgactgcccagccttttgtttccctctctgcttcagaactgctcacagccagccaggagagctgggagatcttgtttgcctctgtgttcccctgacacaggtccctgtacactctaggaatccacctgtatacacacattgcagaaggaggctgctttgggtttgccagggacaccagagtggagggtggacaggtctccttggcaggtgaaccttaccttcttggagtgttgcattcaagtatggacccttcgtgccc

SEQ ID NO: 2837 - DNA, 6000 bp, Homo sapiens
ggccgacaagctttctctaattgacccaggcaagggaggtgagtgagtggaggggaaaggtgggataggccggcctgggaaaagtcacctacctgctggctacaggccagtcttgaaggcggcaggggttctggcccagtgcagtccacaggcccccagcagcccaggcattccaggctctgaccacaaggccagtctggagtgatgtgtgggggcagagtgaaggggcagaagtggagcagagcatggacatatagaacaagaaagaggctgagcgtggtggctcacgcctgtaatcccagtactttgggaggtcgatgcagcaggatcacctgaggtcaggagttcgagaccaagctggccaacatggtgaaaccctgtctctactaaaaatacaaaaattagctgggcatgatggcgggcatctgtaatcctagctactcaggaggctgaggcaagagaatcacttgaacccaggaggcggaggtttcagtgagccaagatcacaccactgcactccagcctgggcaacagagtgagactctgtctcaaaaaaaaaaaaaaaaaaaaaaaaagaaagaaagaaagaacagaaagaataagaaaggacaaggacactgtagtcccattgccctaggagccagccctagcttcatggctcctgggggacctcacagagcatcaatagaagatcctagaagaaaaacaaccctggcaggtgattttctttccctgggtttgaaggaggctccgtagacaagagactagaggagattaagacttggaagccacagggccccgtggaaggagggcatccccccatcctccttggtctttgtcctatttgcattcaatttcaaggtaagtctcccaggcttccaagaattgcatgagctcagaggcaagtaggggaaagctgaggcatggggtttccaggcagagtagaagctgttcacgtgctagggccaggggcccctcctgcctcctctgtgcccctgaggaagccccgtgactggcaggaccttgggctactagctccgcccctcccctcagcatccaccataaggcacccttgactcagactttttattgtactcaagtaaaaacctgctggacccacagcaggtggcacagaaaagaggtaggagggggtaaggacactgaggatcaggtctccagcaggtctgtccagtgtgcctgcagaggcaagcagtgtggtcacaggcagcccagggcagggagtggggtagggagcccgccaccaaagcccactcacctcttctaattctgagtcttctacttctttctcagtgtccatctggcacagccagatcaggtctccccaaagcagtgacttctcacagctaccaaggagaggggcaggtaggagatacagagtcagatgccacaagccccctccagtatccgccctgcatgctgagatgagggctcagctgcctgggcctggattgcacaactgggcaccctcttcccagaggtggaccaggctggggccaggggactgcactcaccaagggcattggccctctaggggcagaagctgccctggttcttcctgaagaaactcctctgccaggcagatcacatgggcccttagcaggcagccagggtgggggcaacacaagggcccctcttcatcctgacccaggcagcaggcaggtaagagacaaggagggagaggcagctggcagcaacccctctatgcagcaggcactgttgcgggcattacacagctccatcccatgaggcaggggtgactgttatttgcatcttacaaatgaagaaactgaggtggacagttaaaatccttgcccctaggactaagctggtgcaggtcctgggagcatcagcagtgattgattgagtcacagcctcaccactgcagccagacctgaacttcctcacagctcagcaacacccagcaggtcactgaatgtccccagggcaagtcctctactcactcacaattaccgggagctcagtagaaggcacccatcgtccattattttattaaatatttaggccgggcacggtggctcatgcctgtaataccagcattttgggaggcttaggtgggcaggatcacctgaggtcaggagtttgagaccagcctggccaacatggttgaaaccccatctctactaaaaatacaaaaattagccaggcgcggtggcaggcgcgtgtaatcccagctactctggaggctgaggaaggagaattgcttgaaaccaggaggcagaggttgcagtgagctgagatcgcgccactacactccagcctgagcgacagagtaagactctgtctcaaaaaaaaaataaataaataaataaaaagaaaatttctgggccatcggctcagtgcaggactttgttctacagcagtgataagtgctgccctctgatagtgcagtgtggcagttggggtgggagaggctaatgagatcaagaaaacacgtagcatgccagacaatagtaagtgttaagggaaagggggtgcagaaaagtgcacacaagaatgagctgcagttcattacattgttttagagacagggtcatgtccaggcatggtggctcacgcctataatcccagcactctgggaggccgaggcgggcagatcacttgaggtcaggagtttgagaccagcctgcccaacatggcgaaccccatccctactaaaaacacaaacattcggcaggtgtggtggcacacttgggaggttgagataggagaatcgcttgaacccaggaggcggagcttccagtgagctgagatcactgcactccagcctccgcaacagagcaagactctgtctaaaaaaaaaaaaagggccgggcgcggtggctcatgcctgtaatcccagcactttgggaggctgaggcgggcggatcacgaggctaggacatcgagaccatcctggctaacacggtgaaaccccgtctctactaaaaatacaaaaaattaaccaggcgtggtggcgggcgcctgtagtcccagctactcgggaggctgaggcaggagaatggcgtgaacccaggaggcggagcttgcagtgagcagagatcgcgccactgcactctagcctgggcgacagagctagactccatctcaaaaaaaaaaaaaaaaaaaagagggtcatgctctgtcgaccacactggagtgcagcggagtactgatggcctagggaagaaccttttctttgaaggggaaatggtgaaggccctgagcagggcctgctttgctcaggaatggccgtaagtcctatagcatcagcatcttagagatggggatagggtggccaaagcgtgtcagtgggtttccctcaagaaagagctggatccgaagtcgtctggactctagagccatccattcctcggggggacctcacctggatggtctgggcgcacagggagcagcaggcccctggatccccctggtctggctcaggctccgcgtcatcaaagggacctgcgcggcgccttggggccggggcctggggcggtggaggcccgaaggccagaggcacgtgcggcggcggcgggaggcagaggtcctggcggaggtctgggcgcacccagcgcagcgtgagcgggaggcgagcccagggcggtgcgcgcagcatgtgcgccagcacgcgcaggtggaaagcgaaggctgtctctcctcgcaggcgaggccccacgtgcgccaggcggcgcgaggcgtgcgggtgctgccaagcccactcaaactgcgggcggcgtacaggggcatcagggcggctcggagcgaggggcggaacccaagccctcacccggccgccgctgcccggtctccttccttacccgaagggcggccacggaggacgggaagccgtgcacgacgagcaccatctccctgaggaggagaacggtgatgtccctgtcgcagcccagcgcctcagccgcgggtcccctccaatcccacccgagagcggggtcctcattcccggcttcagccgagaagtgcagccctctgcacctgcccacctcaggccctgcctccagcccaggtacccacctgtcccacctcctctctctcctgcattccacccgaccccagcgtgcccaccaagagccctatgctggaacccagcctggatcatcacccccgccccagctagctccttccctgagttccgccgcggagatgccccgggcaccgcctccccgtcacgctcctcccctgcgacaggccccgtccccaccacagacgccccgcctctgtcacagtcctggccggtccttctcaacaggcctgtgccccgcggggtccgcctcctctgggacgccttcctcccggcacagaaggcctccccctctcaccagggccctcgcccgctggtccgccaggccccgccttttttgcggcccccattgtgctgctggacccgacgagcagtgttgacagtgaaccccacgtagacgcggccccggtaccgggggttcaggcagtagagcaggtagacgccgaaaaagcgccctggcctcgccgcgacccccgcgggacccatcgggccttggggttcgggaaccacagcagggggttgattgccgtgacctagggtccaggggagggctggatcgctagggctgcagggtgcttgcttcggaacaagctctcggggactatccggaggcagcctgcaggaagccgtagcgccggtacgtgcccctctcctgtctggaggcgggtgtagaagtccgaccgcggaagccagactgctgtccagtcggcgagcgcgtaccattcagcatcggctccgcccgagtcccaccttcctcaggctctgattggctgacacatggcaagcgcgaaaagcctggaccgctggaaagcccggctgcttgagggcggaagtactgcgttgacgtacgccttagtaagggcggaagtgagttttccagcggaagtggctcctgtaaggcagcaaggtagcgtggccggcgcccgagctggggttgtgtccctgctgggctgccgttccagctggactgccgccatggaactcagcgccgaatacctccgcgagaagctgcagcgggacctggaggcggagcatgtggtgagttgagccgccggacaaggggaaaagagctcggggggcgggttcggcaccattcatattcttccgctcggtaggaggtggaggacacgaccctcaaccgttgctcctgtagcttccgagtcctggtggtgtcggccaagttcgaggggaaaccgctgcttcagagacacaggtaaggccctgggagcaccttgcctagctcctgtaccacaaccccagccactccccctacccctgcaacctgactcccgcactccccctggcgtggctcagggaccttgaggatcccgccttcgtgacccctgcttcgagtatttcgatgtagaccctctctccaagtacgtgttcccacggcctggggactacaaccttggggacaccagtctcttgggtcaccctagcctcggggtgtgcgatcaccgctggccttttcctaaccccatctctcgccccaggctggtgaacgcgtgcctagcagaagagctcccgcacatccatgcctttgaacagaaaaccctgaccccagaccagtgggcacgtgagcgacagaaatgagggactgggatctgcacagccattaaattataaatctggaccagcttctgtgtcgatgtgtgtgtgggaggggtgctgaggccgagtctaggacctggcctctccctgccctgcctccgtccattgttttaccttggacacgtctctgtccccatctaggcctctatccctgcttgtaaaatgaaagttctaccgtaaaagtcccttccagggtctaccgagaaagccttctctctgcaactccgtttagacatctaggagtctgtactgccaccacctacccacctcctagagagctcagggttcctcctctctgctagccttcaagatgcagagatgag

SEQ ID NO: 2838 - DNA, 6000 bp, Homo sapiens
cctccagcagggtcagccattcacacccatccactcacctcccattcccagccacatggcagagaaaaaaatcataataaaatggctttattttctggtacctcccagactctgatgactggtcccctagacacgcagtttgctgaaccaaccagccctagagcttcccctccaccgcgctgaggggactgacccatggcaggggatgtgggatgccccctgacttactacatcacaggaacagggccttcgtgggtagaaaccagccatgctgatgtgggccaggaggctgctctccgtttccgagctccttctcagagctgacacagctgaactatttaaggccctagcttagaacctcaataattcccaaatttaccaaaaatctgcctttcctagtcaaccaaaacatcacgttgcacgtgactctgctggcactgttgcttgtgaggaaatgaaccaaccatcacttacagggtaggcatcttttaaactgcaggtccaaagataaaaataacgagggaggctgggcatggggactcacgtctataatcccagcactgtgggaggctgaggcggcaggatcatttgagcccaggagtttgagacctgcctgagcaacacggcgagataccgtctctacgaaaaataaaataaaaaattagccaggcatggtggtgggcacctatagttccagctactcaggaggctgaggcaggaggatcccttgagcccaggaggtcgaggctgcaatgagccattgcaccactgcactgcagcctgggtgacagagcaagacactgtctctaaaaaatataaataggccgggtgtggcagctcacgcctgtaatcccagcactttaggaggccgaggtgggtgaatcacctgaggtcagaagttcgagaccagcctggccaacatggtgaaaccccatctctactaaaaatacaaaaattagctgggcatggtggcaggcgcctgtaatctcagctactcaggaggctgaggcaagagaattgcttgaatccgggaggcaaaggttgcagtgagccgagatcatgccattgtactccagcctgggggacaggagtgagacttcgtctcaaaaaaaaaaaaaaatatatatatatatatatatatatattttttaaatgtataaatacatcatatatattttaatatataaatatattatatatattatatattttaatatataaatatattatatataatatattttaatatataaatattatatatattatattttaatatataaatattatatatattaattatatattttaatatataatatatattatattatataataataaattatatattatattatatagtaataagttatatattatactatataataatatagtataatatataatatatattataatatatattatattatattatattatattatatattataatataaattatatatattttatatatatgttttatatattatatattttaatatatgaaacaggggaacttcttctaaggaaaagacagaattaaggcaacaggctgatcctagtttaccagagaagaaactgaggccgggagcaggagcccagctcactgaagggcagatcccaagtcagagtccaagtctccccacttttttatttatttaattttttctgagatggagtttcattcttgttgcccaaattgagtacaatggcacaatctcggctcaccgcaacctctgccttctgggttcaagccattctcgtgcctcagactcccaagtagctgggattacaggcatgtgccaccacgtccggctaacttttgtgttttcagtagaggtggggtctcaccatgttggccagactggtctcaaactcctggcctcaagtcatctgcctgcctcagcctcccaaagtgctgggattacaggcatgagccgctgtgcctggccttatgtctccccttttgaattcagagccttcccccgtgtagtgagtgcttctgcctctctagcccttcctgtgggttctgcctgggcctgacctctgtgagagacctggcaggaacaggtctgtcaggccttgtggggagtgggtgtgggaataggttttgatacccaacttagcaggtgatcctgagatgggaggacacagggctgtttgggatgggcgtcttagccatagtaaggtttggttcatatcaagcagggaccacccatggcgtcatttccaggccccacctcttcagtatgccatagaaaactacttgggcagtagaggtgtgggaagaaaacaaaaaagaaagctgggcataagtggcacacgcctgtaatcccagcacttttggaggccgaggcgggtagatcacctgaggtcgggagttcaagaccagcctgaacaacatggagaaaccctgtctctattaaaaatacaagattagccgggcgtggtagcacatacctgtaatcccagctacttgggaggctgagacaagagaatcgcttgaacccaggaggcggaggttgtggtgagccgagatcgtgccattgcactccagcctgggcaacaagagtgaaactctgtctcaaaaacagacaaacaaacaaacaataaaaaacccccaaaaattagctgggcatggtggcgtgtgcctgtaatcccagctactagggaggctgaggcaggagaatcgcttgaacccgggagggggaagttgtagtgagccaagatcatgctactgcactccagcctgggcaacagagccaagactctgtctcaaaacaaacaaacaaacaaacaaaaaaacgcaggaaaagagtgtgtgatggctgaaacttgcaatttctcactctcaacgagccctggccccaactaggttatttgggctccctccctaggtctcagggacctctgttcaaagtcctagcaatctgggccaggtacaatggctcacgcctaaaattccagcactttaggagaccaaggcgggcagatcacttgaggccaggagtttgagactggcctggccaacatggtgaaaccctgtctctactaaaagtacaaaaattagccgggcatggtggtgcacccctgtaatcccagctactcaggaggctgaagcacaagaatcttttgaacctgggaggcagaggttgcaatgagctgagatggcgccacggcactccagcctgggcgacagagcaagaccctgtctcaaacaacaaaaaacaaataaaacaaacaaggtcctagcaaccctactaacctgttatgaagactgatacaggggcatcacctgccccaattttctgactcaggtcagccttatattcctactctaatctcacccctatccccgtcccacacccactattcttaaaacctccatggtcctccgggggcagctgtagacacattaagcccagggctatggggccactggaaccttctccagtgggtctgaaaacatcagcattccaggagttgatgagcccctacctgggcaccactccctcttgggcctgagaaggccggggggaacctgcaaggaatatgtggaattctatatggtgcctctgatactgcggtaatgtcagggagaggtttgttcaactggtcagggccctgaaaccccgatcactttctcatctctgcatcttgaaggctagcagagaggaggaaccctgagctctctaggaggtgggtaggtggtggcagtacagactcctagatgtctaaacggagttgcagagagaaggctttctcggtagaccctggaagggacttttacggtagaactttcattttacaagcagggatagaggcctagatggggacagagacgtgtccaaggtaaaacaatggacggaggcagggcagggagaggccaggtcctagactcggcctcagcacccctcccacacacacatcgacacagaagctggtccagatttataatttaatggctgtgcagatcccagtccctcatttctgtcgctcacgtgcccactggtctggggtcagggttttctgttcaaaggcatggatgtgcgggagctcttctgctaggcacgcgttcaccagcctggggcgagagatggggttaggaaaaggccagcggtgatcgcacaccccgaggctagggtgacccaagagactggtgtccccaaggttgtagtccccaggccgtgggaacacgtacttggagagagggtctacatcgaaatactcgaagcaggggtcacgaaggcgggatcctcaaggtccctgagccacgccagggggagtgcgggagtcaggttgcaggggtagggggagtggctggggttgtggtacaggagctaggcaaggtgctcccagggccttacctgtgtctctgaagcagcggtttcccctcgaacttggccgacaccaccaggactcggaagctacaggagcaacggttgagggtcgtgtcctccacctcctaccgagcggaagaatatgaatggtgccgaacccgccccccgagctcttttccccttgtccggcggctcaactcaccacatgctccgcctccaggtcccgctgcagcttctcgcggaggtattcggcgctgagttccatggcggcagtccagctggaacggcagcccagcagggacacaaccccagctcgggcgccggccacgctaccttgctgccttacaggagccacttccgctggaaaactcacttccgcccttactaaggcgtacgtcaacgcagtacttccgccctcaagcagccgggctttccagcggtccaggcttttcgcgcttgccatgtgtcagccaatcagagcctgaggaaggtgggactcgggcggagccgatgctgaatggtacgcgctcgccgactggacagcagtctggcttccgcggtcggacttctacacccgcctccagacaggagaggggcacgtaccggcgctacggcttcctgcaggctgcctccggatagtccccgagagcttgttccgaagcaagcaccctgcagccctagcgatccagccctcccctggaccctaggtcacggcaatcaaccccctgctgtggttcccgaaccccaaggcccgatgggtcccgcgggggtcgcggcgaggccagggcgctttttcggcgtctacctgctctactgcctgaacccccggtaccggggccgcgtctacgtggggttcactgtcaacactgctcgtcgggtccagcagcacaatgggggccgcaaaaaaggcggggcctggcggaccagcgggcgagggccctggtgagagggggaggccttctgtgccgggaggaaggcgtcccagaggaggcggaccccgcggggcacaggcctgttgagaaggaccggccaggactgtgacagaggcggggcgtctgtggtggggacggggcctgtcgcaggggaggagcgtgacggggaggcggtgcccggggcatctccgcggcggaactcagggaaggagctagctggggcgggggtgatgatccaggctgggttccagcatagggctcttggtgggcacgctggggtcgggtggaatgcaggagagagaggaggtgggacaggtgggtacctgggctggaggcagggcctgaggtgggcaggtgcagagggctgcacttctcggctgaagccgggaatgaggaccccgctctcgggtgggattggaggggacccgcggctgaggcgctgggctgcgacagggacatcaccgttctcctcctcagggagatggtgctcgtcgtgcacggcttcccgtcctccgtggccgcccttcgggtaaggaaggagaccgggcagcggcggccgggtgagggcttgggttccgcccctcgctccgagccgccctgatgcccctgtacgccgcccgcagtttgagtgggcttggcagcacccgcacgcctcgcgccgcctggcgcacgtggggcctcgcctgcgaggagagacagccttcgctttccacc

SEQ ID NO: 2839 - DNA, 6000 bp, Homo sapiens
agtatgggtgtggtgtagggagtgtagggctgctctctgccctgagggttttgaaggtccagtgtgggagggatctaaagtcagggctgggaactccaggaaggaaggggtggggttgagggtggggaagcttctctattaccctccttaccaccacagctccagccaagcttggagtgatctgcaaacccaatatgtgagtttagtgtatagaaaacacatgaatgaaaggcaaaaggggccaacattggtatttgggtttttttttttttgagctgtcactaggctcctgaccttccctctgaactccaccctgcagggcaggccaacagacaagctttctttctttctttttcttttttttatatgagatggagactcgctctctcgcccaggctgcaatgcagtagcacgatctccgctcactgtaacctccccctcctgggttcaagcgattcttctgcctcagcctcccgagtagctgggattacaggtgcacaccaccacatccggttaatttttgtatttttagtagagacggggttttgccatgttggccaggctggtctcaaactcctgagctcagatgatccgcccgcctcggcctcccaaagtgctgagattacaggcatgagccaccatgcctggccgacaagctttctctaattgacccaggcaagggaggtgagtgagtggaggggaaaggtgggataggccggcctgggaaaagtcacctacctgctggctacaggccagtcttgaaggcggcaggggttctggcccagtgcagtccacaggcccccagcagcccaggcattccaggctctgaccacaaggccagtctggagtgatgtgtgggggcagagtgaaggggcagaagtggagcagagcatggacatatagaacaagaaagaggctgagcgtggtggctcacgcctgtaatcccagtactttgggaggtcgatgcagcaggatcacctgaggtcaggagttcgagaccaagctggccaacatggtgaaaccctgtctctactaaaaatacaaaaattagctgggcatgatggcgggcatctgtaatcctagctactcaggaggctgaggcaagagaatcacttgaacccaggaggcggaggtttcagtgagccaagatcacaccactgcactccagcctgggcaacagagtgagactctgtctcaaaaaaaaaaaaaaaaaaaaaaaaagaaagaaagaaagaacagaaagaataagaaaggacaaggacactgtagtcccattgccctaggagccagccctagcttcatggctcctgggggacctcacagagcatcaatagaagatcctagaagaaaaacaaccctggcaggtgattttctttccctgggtttgaaggaggctccgtagacaagagactagaggagattaagacttggaagccacagggccccgtggaaggagggcatccccccatcctccttggtctttgtcctatttgcattcaatttcaaggtaagtctcccaggcttccaagaattgcatgagctcagaggcaagtaggggaaagctgaggcatggggtttccaggcagagtagaagctgttcacgtgctagggccaggggcccctcctgcctcctctgtgcccctgaggaagccccgtgactggcaggaccttgggctactagctccgcccctcccctcagcatccaccataaggcacccttgactcagactttttattgtactcaagtaaaaacctgctggacccacagcaggtggcacagaaaagaggtaggagggggtaaggacactgaggatcaggtctccagcaggtctgtccagtgtgcctgcagaggcaagcagtgtggtcacaggcagcccagggcagggagtggggtagggagcccgccaccaaagcccactcacctcttctaattctgagtcttctacttctttctcagtgtccatctggcacagccagatcaggtctccccaaagcagtgacttctcacagctaccaaggagaggggcaggtaggagatacagagtcagatgccacaagccccctccagtatccgccctgcatgctgagatgagggctcagctgcctgggcctggattgcacaactgggcaccctcttcccagaggtggaccaggctggggccaggggactgcactcaccaagggcattggccctctaggggcagaagctgccctggttcttcctgaagaaactcctctgccaggcagatcacatgggcccttagcaggcagccagggtgggggcaacacaagggcccctcttcatcctgacccaggcagcaggcaggtaagagacaaggagggagaggcagctggcagcaacccctctatgcagcaggcactgttgcgggcattacacagctccatcccatgaggcaggggtgactgttatttgcatcttacaaatgaagaaactgaggtggacagttaaaatccttgcccctaggactaagctggtgcaggtcctgggagcatcagcagtgattgattgagtcacagcctcaccactgcagccagacctgaacttcctcacagctcagcaacacccagcaggtcactgaatgtccccagggcaagtcctctactcactcacaattaccgggagctcagtagaaggcacccatcgtccattattttattaaatatttaggccgggcacggtggctcatgcctgtaataccagcattttgggaggcttaggtgggcaggatcacctgaggtcaggagtttgagaccagcctggccaacatggttgaaaccccatctctactaaaaatacaaaaattagccaggcgcggtggcaggcgcgtgtaatcccagctactctggaggctgaggaaggagaattgcttgaaaccaggaggcagaggttgcagtgagctgagatcgcgccactacactccagcctgagcgacagagtaagactctgtctcaaaaaaaaaataaataaataaataaaaagaaaatttctgggccatcggctcagtgcaggactttgttctacagcagtgataagtgctgccctctgatagtgcagtgtggcagttggggtgggagaggctaatgagatcaagaaaacacgtagcatgccagacaatagtaagtgttaagggaaagggggtgcagaaaagtgcacacaagaatgagctgcagttcattacattgttttagagacagggtcatgtccaggcatggtggctcacgcctataatcccagcactctgggaggccgaggcgggcagatcacttgaggtcaggagtttgagaccagcctgcccaacatggcgaaccccatccctactaaaaacacaaacattcggcaggtgtggtggcacacttgggaggttgagataggagaatcgcttgaacccaggaggcggagcttccagtgagctgagatcactgcactccagcctccgcaacagagcaagactctgtctaaaaaaaaaaaaagggccgggcgcggtggctcatgcctgtaatcccagcactttgggaggctgaggcgggcggatcacgaggctaggacatcgagaccatcctggctaacacggtgaaaccccgtctctactaaaaatacaaaaaattaaccaggcgtggtggcgggcgcctgtagtcccagctactcgggaggctgaggcaggagaatggcgtgaacccaggaggcggagcttgcagtgagcagagatcgcgccactgcactctagcctgggcgacagagctagactccatctcaaaaaaaaaaaaaaaaaaaagagggtcatgctctgtcgaccacactggagtgcagcggagtactgatggcctagggaagaaccttttctttgaaggggaaatggtgaaggccctgagcagggcctgctttgctcaggaatggccgtaagtcctatagcatcagcatcttagagatggggatagggtggccaaagcgtgtcagtgggtttccctcaagaaagagctggatccgaagtcgtctggactctagagccatccattcctcggggggacctcacctggatggtctgggcgcacagggagcagcaggcccctggatccccctggtctggctcaggctccgcgtcatcaaagggacctgcgcggcgccttggggccggggcctggggcggtggaggcccgaaggccagaggcacgtgcggcggcggcgggaggcagaggtcctggcggaggtctgggcgcacccagcgcagcgtgagcgggaggcgagcccagggcggtgcgcgcagcatgtgcgccagcacgcgcaggtggaaagcgaaggctgtctctcctcgcaggcgaggccccacgtgcgccaggcggcgcgaggcgtgcgggtgctgccaagcccactcaaactgcgggcggcgtacaggggcatcagggcggctcggagcgaggggcggaacccaagccctcacccggccgccgctgcccggtctccttccttacccgaagggcggccacggaggacgggaagccgtgcacgacgagcaccatctccctgaggaggagaacggtgatgtccctgtcgcagcccagcgcctcagccgcgggtcccctccaatcccacccgagagcggggtcctcattcccggcttcagccgagaagtgcagccctctgcacctgcccacctcaggccctgcctccagcccaggtacccacctgtcccacctcctctctctcctgcattccacccgaccccagcgtgcccaccaagagccctatgctggaacccagcctggatcatcacccccgccccagctagctccttccctgagttccgccgcggagatgccccgggcaccgcctccccgtcacgctcctcccctgcgacaggccccgtccccaccacagacgccccgcctctgtcacagtcctggccggtccttctcaacaggcctgtgccccgcggggtccgcctcctctgggacgccttcctcccggcacagaaggcctccccctctcaccagggccctcgcccgctggtccgccaggccccgccttttttgcggcccccattgtgctgctggacccgacgagcagtgttgacagtgaaccccacgtagacgcggccccggtaccgggggttcaggcagtagagcaggtagacgccgaaaaagcgccctggcctcgccgcgacccccgcgggacccatcgggccttggggttcgggaaccacagcagggggttgattgccgtgacctagggtccaggggagggctggatcgctagggctgcagggtgcttgcttcggaacaagctctcggggactatccggaggcagcctgcaggaagccgtagcgccggtacgtgcccctctcctgtctggaggcgggtgtagaagtccgaccgcggaagccagactgctgtccagtcggcgagcgcgtaccattcagcatcggctccgcccgagtcccaccttcctcaggctctgattggctgacacatggcaagcgcgaaaagcctggaccgctggaaagcccggctgcttgagggcggaagtactgcgttgacgtacgccttagtaagggcggaagtgagttttccagcggaagtggctcctgtaaggcagcaaggtagcgtggccggcgcccgagctggggttgtgtccctgctgggctgccgttccagctggactgccgccatggaactcagcgccgaatacctccgcgagaagctgcagcgggacctggaggcggagcatgtggtgagttgagccgccggacaaggggaaaagagctcggggggcgggttcggcaccattcatattcttccgctcggtaggaggtggaggacacgaccctcaaccgttgctcctgtagcttccgagtcctggtggtgtcggccaagttcgaggggaaaccgctgcttcagagacacaggtaaggccctgggagcaccttgcctagctcctgtaccacaaccccagccactccccctacccctgcaacctgactccc

SEQ ID NO: 2840 - DNA, 6000 bp, Homo sapiens
ataacgagggaggctgggcatggggactcacgtctataatcccagcactgtgggaggctgaggcggcaggatcatttgagcccaggagtttgagacctgcctgagcaacacggcgagataccgtctctacgaaaaataaaataaaaaattagccaggcatggtggtgggcacctatagttccagctactcaggaggctgaggcaggaggatcccttgagcccaggaggtcgaggctgcaatgagccattgcaccactgcactgcagcctgggtgacagagcaagacactgtctctaaaaaatataaataggccgggtgtggcagctcacgcctgtaatcccagcactttaggaggccgaggtgggtgaatcacctgaggtcagaagttcgagaccagcctggccaacatggtgaaaccccatctctactaaaaatacaaaaattagctgggcatggtggcaggcgcctgtaatctcagctactcaggaggctgaggcaagagaattgcttgaatccgggaggcaaaggttgcagtgagccgagatcatgccattgtactccagcctgggggacaggagtgagacttcgtctcaaaaaaaaaaaaaaatatatatatatatatatatatatattttttaaatgtataaatacatcatatatattttaatatataaatatattatatatattatatattttaatatataaatatattatatataatatattttaatatataaatattatatatattatattttaatatataaatattatatatattaattatatattttaatatataatatatattatattatataataataaattatatattatattatatagtaataagttatatattatactatataataatatagtataatatataatatatattataatatatattatattatattatattatattatatattataatataaattatatatattttatatatatgttttatatattatatattttaatatatgaaacaggggaacttcttctaaggaaaagacagaattaaggcaacaggctgatcctagtttaccagagaagaaactgaggccgggagcaggagcccagctcactgaagggcagatcccaagtcagagtccaagtctccccacttttttatttatttaattttttctgagatggagtttcattcttgttgcccaaattgagtacaatggcacaatctcggctcaccgcaacctctgccttctgggttcaagccattctcgtgcctcagactcccaagtagctgggattacaggcatgtgccaccacgtccggctaacttttgtgttttcagtagaggtggggtctcaccatgttggccagactggtctcaaactcctggcctcaagtcatctgcctgcctcagcctcccaaagtgctgggattacaggcatgagccgctgtgcctggccttatgtctccccttttgaattcagagccttcccccgtgtagtgagtgcttctgcctctctagcccttcctgtgggttctgcctgggcctgacctctgtgagagacctggcaggaacaggtctgtcaggccttgtggggagtgggtgtgggaataggttttgatacccaacttagcaggtgatcctgagatgggaggacacagggctgtttgggatgggcgtcttagccatagtaaggtttggttcatatcaagcagggaccacccatggcgtcatttccaggccccacctcttcagtatgccatagaaaactacttgggcagtagaggtgtgggaagaaaacaaaaaagaaagctgggcataagtggcacacgcctgtaatcccagcacttttggaggccgaggcgggtagatcacctgaggtcgggagttcaagaccagcctgaacaacatggagaaaccctgtctctattaaaaatacaagattagccgggcgtggtagcacatacctgtaatcccagctacttgggaggctgagacaagagaatcgcttgaacccaggaggcggaggttgtggtgagccgagatcgtgccattgcactccagcctgggcaacaagagtgaaactctgtctcaaaaacagacaaacaaacaaacaataaaaaacccccaaaaattagctgggcatggtggcgtgtgcctgtaatcccagctactagggaggctgaggcaggagaatcgcttgaacccgggagggggaagttgtagtgagccaagatcatgctactgcactccagcctgggcaacagagccaagactctgtctcaaaacaaacaaacaaacaaacaaaaaaacgcaggaaaagagtgtgtgatggctgaaacttgcaatttctcactctcaacgagccctggccccaactaggttatttgggctccctccctaggtctcagggacctctgttcaaagtcctagcaatctgggccaggtacaatggctcacgcctaaaattccagcactttaggagaccaaggcgggcagatcacttgaggccaggagtttgagactggcctggccaacatggtgaaaccctgtctctactaaaagtacaaaaattagccgggcatggtggtgcacccctgtaatcccagctactcaggaggctgaagcacaagaatcttttgaacctgggaggcagaggttgcaatgagctgagatggcgccacggcactccagcctgggcgacagagcaagaccctgtctcaaacaacaaaaaacaaataaaacaaacaaggtcctagcaaccctactaacctgttatgaagactgatacaggggcatcacctgccccaattttctgactcaggtcagccttatattcctactctaatctcacccctatccccgtcccacacccactattcttaaaacctccatggtcctccgggggcagctgtagacacattaagcccagggctatggggccactggaaccttctccagtgggtctgaaaacatcagcattccaggagttgatgagcccctacctgggcaccactccctcttgggcctgagaaggccggggggaacctgcaaggaatatgtggaattctatatggtgcctctgatactgcggtaatgtcagggagaggtttgttcaactggtcagggccctgaaaccccgatcactttctcatctctgcatcttgaaggctagcagagaggaggaaccctgagctctctaggaggtgggtaggtggtggcagtacagactcctagatgtctaaacggagttgcagagagaaggctttctcggtagaccctggaagggacttttacggtagaactttcattttacaagcagggatagaggcctagatggggacagagacgtgtccaaggtaaaacaatggacggaggcagggcagggagaggccaggtcctagactcggcctcagcacccctcccacacacacatcgacacagaagctggtccagatttataatttaatggctgtgcagatcccagtccctcatttctgtcgctcacgtgcccactggtctggggtcagggttttctgttcaaaggcatggatgtgcgggagctcttctgctaggcacgcgttcaccagcctggggcgagagatggggttaggaaaaggccagcggtgatcgcacaccccgaggctagggtgacccaagagactggtgtccccaaggttgtagtccccaggccgtgggaacacgtacttggagagagggtctacatcgaaatactcgaagcaggggtcacgaaggcgggatcctcaaggtccctgagccacgccagggggagtgcgggagtcaggttgcaggggtagggggagtggctggggttgtggtacaggagctaggcaaggtgctcccagggccttacctgtgtctctgaagcagcggtttcccctcgaacttggccgacaccaccaggactcggaagctacaggagcaacggttgagggtcgtgtcctccacctcctaccgagcggaagaatatgaatggtgccgaacccgccccccgagctcttttccccttgtccggcggctcaactcaccacatgctccgcctccaggtcccgctgcagcttctcgcggaggtattcggcgctgagttccatggcggcagtccagctggaacggcagcccagcagggacacaaccccagctcgggcgccggccacgctaccttgctgccttacaggagccacttccgctggaaaactcacttccgcccttactaaggcgtacgtcaacgcagtacttccgccctcaagcagccgggctttccagcggtccaggcttttcgcgcttgccatgtgtcagccaatcagagcctgaggaaggtgggactcgggcggagccgatgctgaatggtacgcgctcgccgactggacagcagtctggcttccgcggtcggacttctacacccgcctccagacaggagaggggcacgtaccggcgctacggcttcctgcaggctgcctccggatagtccccgagagcttgttccgaagcaagcaccctgcagccctagcgatccagccctcccctggaccctaggtcacggcaatcaaccccctgctgtggttcccgaaccccaaggcccgatgggtcccgcgggggtcgcggcgaggccagggcgctttttcggcgtctacctgctctactgcctgaacccccggtaccggggccgcgtctacgtggggttcactgtcaacactgctcgtcgggtccagcagcacaatgggggccgcaaaaaaggcggggcctggcggaccagcgggcgagggccctggtgagagggggaggccttctgtgccgggaggaaggcgtcccagaggaggcggaccccgcggggcacaggcctgttgagaaggaccggccaggactgtgacagaggcggggcgtctgtggtggggacggggcctgtcgcaggggaggagcgtgacggggaggcggtgcccggggcatctccgcggcggaactcagggaaggagctagctggggcgggggtgatgatccaggctgggttccagcatagggctcttggtgggcacgctggggtcgggtggaatgcaggagagagaggaggtgggacaggtgggtacctgggctggaggcagggcctgaggtgggcaggtgcagagggctgcacttctcggctgaagccgggaatgaggaccccgctctcgggtgggattggaggggacccgcggctgaggcgctgggctgcgacagggacatcaccgttctcctcctcagggagatggtgctcgtcgtgcacggcttcccgtcctccgtggccgcccttcgggtaaggaaggagaccgggcagcggcggccgggtgagggcttgggttccgcccctcgctccgagccgccctgatgcccctgtacgccgcccgcagtttgagtgggcttggcagcacccgcacgcctcgcgccgcctggcgcacgtggggcctcgcctgcgaggagagacagccttcgctttccacctgcgcgtgctggcgcacatgctgcgcgcaccgccctgggctcgcctcccgctcacgctgcgctgggtgcgcccagacctccgccaggacctctgcctcccgccgccgccgcacgtgcctctggccttcgggcctccaccgccccaggccccggccccaaggcgccgcgcaggtccctttgatgacgcggagcctgagccagaccagggggatccaggggcctgctgctccctgtgcgcccagaccatccaggtgaggtccccccgaggaatggatggctctagagtccagacgacttcggatccagctctttcttgagggaaacccactgacacgctttggccaccctatccccatctctaagatgctgatgctataggacttacggccattcctgagcaaagcaggccctgctcagggccttcaccatttccccttcaaagaaaaggttcttccctaggccatcagtactccgctgcactccagtgtggtcgacagagcatgaccctctttt

SEQ ID NO: 2841 - DNA, 6000 bp, Homo sapiens
taatatataatatatattatattatataataataaattatatattatattatatagtaataagttatatattatactatataataatatagtataatatataatatatattataatatatattatattatattatattatattatatattataatataaattatatatattttatatatatgttttatatattatatattttaatatatgaaacaggggaacttcttctaaggaaaagacagaattaaggcaacaggctgatcctagtttaccagagaagaaactgaggccgggagcaggagcccagctcactgaagggcagatcccaagtcagagtccaagtctccccacttttttatttatttaattttttctgagatggagtttcattcttgttgcccaaattgagtacaatggcacaatctcggctcaccgcaacctctgccttctgggttcaagccattctcgtgcctcagactcccaagtagctgggattacaggcatgtgccaccacgtccggctaacttttgtgttttcagtagaggtggggtctcaccatgttggccagactggtctcaaactcctggcctcaagtcatctgcctgcctcagcctcccaaagtgctgggattacaggcatgagccgctgtgcctggccttatgtctccccttttgaattcagagccttcccccgtgtagtgagtgcttctgcctctctagcccttcctgtgggttctgcctgggcctgacctctgtgagagacctggcaggaacaggtctgtcaggccttgtggggagtgggtgtgggaataggttttgatacccaacttagcaggtgatcctgagatgggaggacacagggctgtttgggatgggcgtcttagccatagtaaggtttggttcatatcaagcagggaccacccatggcgtcatttccaggccccacctcttcagtatgccatagaaaactacttgggcagtagaggtgtgggaagaaaacaaaaaagaaagctgggcataagtggcacacgcctgtaatcccagcacttttggaggccgaggcgggtagatcacctgaggtcgggagttcaagaccagcctgaacaacatggagaaaccctgtctctattaaaaatacaagattagccgggcgtggtagcacatacctgtaatcccagctacttgggaggctgagacaagagaatcgcttgaacccaggaggcggaggttgtggtgagccgagatcgtgccattgcactccagcctgggcaacaagagtgaaactctgtctcaaaaacagacaaacaaacaaacaataaaaaacccccaaaaattagctgggcatggtggcgtgtgcctgtaatcccagctactagggaggctgaggcaggagaatcgcttgaacccgggagggggaagttgtagtgagccaagatcatgctactgcactccagcctgggcaacagagccaagactctgtctcaaaacaaacaaacaaacaaacaaaaaaacgcaggaaaagagtgtgtgatggctgaaacttgcaatttctcactctcaacgagccctggccccaactaggttatttgggctccctccctaggtctcagggacctctgttcaaagtcctagcaatctgggccaggtacaatggctcacgcctaaaattccagcactttaggagaccaaggcgggcagatcacttgaggccaggagtttgagactggcctggccaacatggtgaaaccctgtctctactaaaagtacaaaaattagccgggcatggtggtgcacccctgtaatcccagctactcaggaggctgaagcacaagaatcttttgaacctgggaggcagaggttgcaatgagctgagatggcgccacggcactccagcctgggcgacagagcaagaccctgtctcaaacaacaaaaaacaaataaaacaaacaaggtcctagcaaccctactaacctgttatgaagactgatacaggggcatcacctgccccaattttctgactcaggtcagccttatattcctactctaatctcacccctatccccgtcccacacccactattcttaaaacctccatggtcctccgggggcagctgtagacacattaagcccagggctatggggccactggaaccttctccagtgggtctgaaaacatcagcattccaggagttgatgagcccctacctgggcaccactccctcttgggcctgagaaggccggggggaacctgcaaggaatatgtggaattctatatggtgcctctgatactgcggtaatgtcagggagaggtttgttcaactggtcagggccctgaaaccccgatcactttctcatctctgcatcttgaaggctagcagagaggaggaaccctgagctctctaggaggtgggtaggtggtggcagtacagactcctagatgtctaaacggagttgcagagagaaggctttctcggtagaccctggaagggacttttacggtagaactttcattttacaagcagggatagaggcctagatggggacagagacgtgtccaaggtaaaacaatggacggaggcagggcagggagaggccaggtcctagactcggcctcagcacccctcccacacacacatcgacacagaagctggtccagatttataatttaatggctgtgcagatcccagtccctcatttctgtcgctcacgtgcccactggtctggggtcagggttttctgttcaaaggcatggatgtgcgggagctcttctgctaggcacgcgttcaccagcctggggcgagagatggggttaggaaaaggccagcggtgatcgcacaccccgaggctagggtgacccaagagactggtgtccccaaggttgtagtccccaggccgtgggaacacgtacttggagagagggtctacatcgaaatactcgaagcaggggtcacgaaggcgggatcctcaaggtccctgagccacgccagggggagtgcgggagtcaggttgcaggggtagggggagtggctggggttgtggtacaggagctaggcaaggtgctcccagggccttacctgtgtctctgaagcagcggtttcccctcgaacttggccgacaccaccaggactcggaagctacaggagcaacggttgagggtcgtgtcctccacctcctaccgagcggaagaatatgaatggtgccgaacccgccccccgagctcttttccccttgtccggcggctcaactcaccacatgctccgcctccaggtcccgctgcagcttctcgcggaggtattcggcgctgagttccatggcggcagtccagctggaacggcagcccagcagggacacaaccccagctcgggcgccggccacgctaccttgctgccttacaggagccacttccgctggaaaactcacttccgcccttactaaggcgtacgtcaacgcagtacttccgccctcaagcagccgggctttccagcggtccaggcttttcgcgcttgccatgtgtcagccaatcagagcctgaggaaggtgggactcgggcggagccgatgctgaatggtacgcgctcgccgactggacagcagtctggcttccgcggtcggacttctacacccgcctccagacaggagaggggcacgtaccggcgctacggcttcctgcaggctgcctccggatagtccccgagagcttgttccgaagcaagcaccctgcagccctagcgatccagccctcccctggaccctaggtcacggcaatcaaccccctgctgtggttcccgaaccccaaggcccgatgggtcccgcgggggtcgcggcgaggccagggcgctttttcggcgtctacctgctctactgcctgaacccccggtaccggggccgcgtctacgtggggttcactgtcaacactgctcgtcgggtccagcagcacaatgggggccgcaaaaaaggcggggcctggcggaccagcgggcgagggccctggtgagagggggaggccttctgtgccgggaggaaggcgtcccagaggaggcggaccccgcggggcacaggcctgttgagaaggaccggccaggactgtgacagaggcggggcgtctgtggtggggacggggcctgtcgcaggggaggagcgtgacggggaggcggtgcccggggcatctccgcggcggaactcagggaaggagctagctggggcgggggtgatgatccaggctgggttccagcatagggctcttggtgggcacgctggggtcgggtggaatgcaggagagagaggaggtgggacaggtgggtacctgggctggaggcagggcctgaggtgggcaggtgcagagggctgcacttctcggctgaagccgggaatgaggaccccgctctcgggtgggattggaggggacccgcggctgaggcgctgggctgcgacagggacatcaccgttctcctcctcagggagatggtgctcgtcgtgcacggcttcccgtcctccgtggccgcccttcgggtaaggaaggagaccgggcagcggcggccgggtgagggcttgggttccgcccctcgctccgagccgccctgatgcccctgtacgccgcccgcagtttgagtgggcttggcagcacccgcacgcctcgcgccgcctggcgcacgtggggcctcgcctgcgaggagagacagccttcgctttccacctgcgcgtgctggcgcacatgctgcgcgcaccgccctgggctcgcctcccgctcacgctgcgctgggtgcgcccagacctccgccaggacctctgcctcccgccgccgccgcacgtgcctctggccttcgggcctccaccgccccaggccccggccccaaggcgccgcgcaggtccctttgatgacgcggagcctgagccagaccagggggatccaggggcctgctgctccctgtgcgcccagaccatccaggtgaggtccccccgaggaatggatggctctagagtccagacgacttcggatccagctctttcttgagggaaacccactgacacgctttggccaccctatccccatctctaagatgctgatgctataggacttacggccattcctgagcaaagcaggccctgctcagggccttcaccatttccccttcaaagaaaaggttcttccctaggccatcagtactccgctgcactccagtgtggtcgacagagcatgaccctcttttttttttttttttttttgagatggagtctagctctgtcgcccaggctagagtgcagtggcgcgatctctgctcactgcaagctccgcctcctgggttcacgccattctcctgcctcagcctcccgagtagctgggactacaggcgcccgccaccacgcctggttaattttttgtatttttagtagagacggggtttcaccgtgttagccaggatggtctcgatgtcctagcctcgtgatccgcccgcctcagcctcccaaagtgctgggattacaggcatgagccaccgcgcccggccctttttttttttttagacagagtcttgctctgttgcggaggctggagtgcagtgatctcagctcactggaagctccgcctcctgggttcaagcgattctcctatctcaacctcccaagtgtgccaccacacctgccgaatgtttgtgtttttagtagggatggggttcgccatgttgggcaggctggtctcaaactcctgacctcaagtgatctgcccgcctcggcctcccagagtgctgggattataggcgtgagccaccatgcctggacatgaccctgtctctaaaacaatgtaatgaactgcagctcattcttgtgtgcacttttctgcaccccctttcccttaacacttactattgtctggcatgctacgtgttttcttgatctcattagcctctcccaccccaactgccacactgcactatcagagggcagcacttatcactgctgtagaacaaagtcctgcactgagccgatggcccagaaattttcttttta

SEQ ID NO: 2842 - DNA, 6000 bp, Homo sapiens
gtgccaccacgtccggctaacttttgtgttttcagtagaggtggggtctcaccatgttggccagactggtctcaaactcctggcctcaagtcatctgcctgcctcagcctcccaaagtgctgggattacaggcatgagccgctgtgcctggccttatgtctccccttttgaattcagagccttcccccgtgtagtgagtgcttctgcctctctagcccttcctgtgggttctgcctgggcctgacctctgtgagagacctggcaggaacaggtctgtcaggccttgtggggagtgggtgtgggaataggttttgatacccaacttagcaggtgatcctgagatgggaggacacagggctgtttgggatgggcgtcttagccatagtaaggtttggttcatatcaagcagggaccacccatggcgtcatttccaggccccacctcttcagtatgccatagaaaactacttgggcagtagaggtgtgggaagaaaacaaaaaagaaagctgggcataagtggcacacgcctgtaatcccagcacttttggaggccgaggcgggtagatcacctgaggtcgggagttcaagaccagcctgaacaacatggagaaaccctgtctctattaaaaatacaagattagccgggcgtggtagcacatacctgtaatcccagctacttgggaggctgagacaagagaatcgcttgaacccaggaggcggaggttgtggtgagccgagatcgtgccattgcactccagcctgggcaacaagagtgaaactctgtctcaaaaacagacaaacaaacaaacaataaaaaacccccaaaaattagctgggcatggtggcgtgtgcctgtaatcccagctactagggaggctgaggcaggagaatcgcttgaacccgggagggggaagttgtagtgagccaagatcatgctactgcactccagcctgggcaacagagccaagactctgtctcaaaacaaacaaacaaacaaacaaaaaaacgcaggaaaagagtgtgtgatggctgaaacttgcaatttctcactctcaacgagccctggccccaactaggttatttgggctccctccctaggtctcagggacctctgttcaaagtcctagcaatctgggccaggtacaatggctcacgcctaaaattccagcactttaggagaccaaggcgggcagatcacttgaggccaggagtttgagactggcctggccaacatggtgaaaccctgtctctactaaaagtacaaaaattagccgggcatggtggtgcacccctgtaatcccagctactcaggaggctgaagcacaagaatcttttgaacctgggaggcagaggttgcaatgagctgagatggcgccacggcactccagcctgggcgacagagcaagaccctgtctcaaacaacaaaaaacaaataaaacaaacaaggtcctagcaaccctactaacctgttatgaagactgatacaggggcatcacctgccccaattttctgactcaggtcagccttatattcctactctaatctcacccctatccccgtcccacacccactattcttaaaacctccatggtcctccgggggcagctgtagacacattaagcccagggctatggggccactggaaccttctccagtgggtctgaaaacatcagcattccaggagttgatgagcccctacctgggcaccactccctcttgggcctgagaaggccggggggaacctgcaaggaatatgtggaattctatatggtgcctctgatactgcggtaatgtcagggagaggtttgttcaactggtcagggccctgaaaccccgatcactttctcatctctgcatcttgaaggctagcagagaggaggaaccctgagctctctaggaggtgggtaggtggtggcagtacagactcctagatgtctaaacggagttgcagagagaaggctttctcggtagaccctggaagggacttttacggtagaactttcattttacaagcagggatagaggcctagatggggacagagacgtgtccaaggtaaaacaatggacggaggcagggcagggagaggccaggtcctagactcggcctcagcacccctcccacacacacatcgacacagaagctggtccagatttataatttaatggctgtgcagatcccagtccctcatttctgtcgctcacgtgcccactggtctggggtcagggttttctgttcaaaggcatggatgtgcgggagctcttctgctaggcacgcgttcaccagcctggggcgagagatggggttaggaaaaggccagcggtgatcgcacaccccgaggctagggtgacccaagagactggtgtccccaaggttgtagtccccaggccgtgggaacacgtacttggagagagggtctacatcgaaatactcgaagcaggggtcacgaaggcgggatcctcaaggtccctgagccacgccagggggagtgcgggagtcaggttgcaggggtagggggagtggctggggttgtggtacaggagctaggcaaggtgctcccagggccttacctgtgtctctgaagcagcggtttcccctcgaacttggccgacaccaccaggactcggaagctacaggagcaacggttgagggtcgtgtcctccacctcctaccgagcggaagaatatgaatggtgccgaacccgccccccgagctcttttccccttgtccggcggctcaactcaccacatgctccgcctccaggtcccgctgcagcttctcgcggaggtattcggcgctgagttccatggcggcagtccagctggaacggcagcccagcagggacacaaccccagctcgggcgccggccacgctaccttgctgccttacaggagccacttccgctggaaaactcacttccgcccttactaaggcgtacgtcaacgcagtacttccgccctcaagcagccgggctttccagcggtccaggcttttcgcgcttgccatgtgtcagccaatcagagcctgaggaaggtgggactcgggcggagccgatgctgaatggtacgcgctcgccgactggacagcagtctggcttccgcggtcggacttctacacccgcctccagacaggagaggggcacgtaccggcgctacggcttcctgcaggctgcctccggatagtccccgagagcttgttccgaagcaagcaccctgcagccctagcgatccagccctcccctggaccctaggtcacggcaatcaaccccctgctgtggttcccgaaccccaaggcccgatgggtcccgcgggggtcgcggcgaggccagggcgctttttcggcgtctacctgctctactgcctgaacccccggtaccggggccgcgtctacgtggggttcactgtcaacactgctcgtcgggtccagcagcacaatgggggccgcaaaaaaggcggggcctggcggaccagcgggcgagggccctggtgagagggggaggccttctgtgccgggaggaaggcgtcccagaggaggcggaccccgcggggcacaggcctgttgagaaggaccggccaggactgtgacagaggcggggcgtctgtggtggggacggggcctgtcgcaggggaggagcgtgacggggaggcggtgcccggggcatctccgcggcggaactcagggaaggagctagctggggcgggggtgatgatccaggctgggttccagcatagggctcttggtgggcacgctggggtcgggtggaatgcaggagagagaggaggtgggacaggtgggtacctgggctggaggcagggcctgaggtgggcaggtgcagagggctgcacttctcggctgaagccgggaatgaggaccccgctctcgggtgggattggaggggacccgcggctgaggcgctgggctgcgacagggacatcaccgttctcctcctcagggagatggtgctcgtcgtgcacggcttcccgtcctccgtggccgcccttcgggtaaggaaggagaccgggcagcggcggccgggtgagggcttgggttccgcccctcgctccgagccgccctgatgcccctgtacgccgcccgcagtttgagtgggcttggcagcacccgcacgcctcgcgccgcctggcgcacgtggggcctcgcctgcgaggagagacagccttcgctttccacctgcgcgtgctggcgcacatgctgcgcgcaccgccctgggctcgcctcccgctcacgctgcgctgggtgcgcccagacctccgccaggacctctgcctcccgccgccgccgcacgtgcctctggccttcgggcctccaccgccccaggccccggccccaaggcgccgcgcaggtccctttgatgacgcggagcctgagccagaccagggggatccaggggcctgctgctccctgtgcgcccagaccatccaggtgaggtccccccgaggaatggatggctctagagtccagacgacttcggatccagctctttcttgagggaaacccactgacacgctttggccaccctatccccatctctaagatgctgatgctataggacttacggccattcctgagcaaagcaggccctgctcagggccttcaccatttccccttcaaagaaaaggttcttccctaggccatcagtactccgctgcactccagtgtggtcgacagagcatgaccctcttttttttttttttttttttgagatggagtctagctctgtcgcccaggctagagtgcagtggcgcgatctctgctcactgcaagctccgcctcctgggttcacgccattctcctgcctcagcctcccgagtagctgggactacaggcgcccgccaccacgcctggttaattttttgtatttttagtagagacggggtttcaccgtgttagccaggatggtctcgatgtcctagcctcgtgatccgcccgcctcagcctcccaaagtgctgggattacaggcatgagccaccgcgcccggccctttttttttttttagacagagtcttgctctgttgcggaggctggagtgcagtgatctcagctcactggaagctccgcctcctgggttcaagcgattctcctatctcaacctcccaagtgtgccaccacacctgccgaatgtttgtgtttttagtagggatggggttcgccatgttgggcaggctggtctcaaactcctgacctcaagtgatctgcccgcctcggcctcccagagtgctgggattataggcgtgagccaccatgcctggacatgaccctgtctctaaaacaatgtaatgaactgcagctcattcttgtgtgcacttttctgcaccccctttcccttaacacttactattgtctggcatgctacgtgttttcttgatctcattagcctctcccaccccaactgccacactgcactatcagagggcagcacttatcactgctgtagaacaaagtcctgcactgagccgatggcccagaaattttctttttatttatttatttattttttttttgagacagagtcttactctgtcgctcaggctggagtgtagtggcgcgatctcagctcactgcaacctctgcctcctggtttcaagcaattctccttcctcagcctccagagtagctgggattacacgcgcctgccaccgcgcctggctaatttttgtatttttagtagagatggggtttcaaccatgttggccaggctggtctcaaactcctgacctcaggtgatcctgcccacctaagcctcccaaaatgctggtattacaggcatgagccaccgtgcccggcctaaatatttaataaaataatggacgatgggtgccttctactgagctcccggtaattgtgagtgagtagaggacttgccctggggacattcagtgacctgctgggtgttgctgagctgtgaggaagttcaggtctggctgcagtggtgaggctgtgactcaatcaatcactgctgatgctcccaggacctgcaccagct

SEQ ID NO: 2843 - DNA, 6000 bp, Homo sapiens
agagggggaggccttctgtgccgggaggaaggcgtcccagaggaggcggaccccgcggggcacaggcctgttgagaaggaccggccaggactgtgacagaggcggggcgtctgtggtggggacggggcctgtcgcaggggaggagcgtgacggggaggcggtgcccggggcatctccgcggcggaactcagggaaggagctagctggggcgggggtgatgatccaggctgggttccagcatagggctcttggtgggcacgctggggtcgggtggaatgcaggagagagaggaggtgggacaggtgggtacctgggctggaggcagggcctgaggtgggcaggtgcagagggctgcacttctcggctgaagccgggaatgaggaccccgctctcgggtgggattggaggggacccgcggctgaggcgctgggctgcgacagggacatcaccgttctcctcctcagggagatggtgctcgtcgtgcacggcttcccgtcctccgtggccgcccttcgggtaaggaaggagaccgggcagcggcggccgggtgagggcttgggttccgcccctcgctccgagccgccctgatgcccctgtacgccgcccgcagtttgagtgggcttggcagcacccgcacgcctcgcgccgcctggcgcacgtggggcctcgcctgcgaggagagacagccttcgctttccacctgcgcgtgctggcgcacatgctgcgcgcaccgccctgggctcgcctcccgctcacgctgcgctgggtgcgcccagacctccgccaggacctctgcctcccgccgccgccgcacgtgcctctggccttcgggcctccaccgccccaggccccggccccaaggcgccgcgcaggtccctttgatgacgcggagcctgagccagaccagggggatccaggggcctgctgctccctgtgcgcccagaccatccaggtgaggtccccccgaggaatggatggctctagagtccagacgacttcggatccagctctttcttgagggaaacccactgacacgctttggccaccctatccccatctctaagatgctgatgctataggacttacggccattcctgagcaaagcaggccctgctcagggccttcaccatttccccttcaaagaaaaggttcttccctaggccatcagtactccgctgcactccagtgtggtcgacagagcatgaccctcttttttttttttttttttttgagatggagtctagctctgtcgcccaggctagagtgcagtggcgcgatctctgctcactgcaagctccgcctcctgggttcacgccattctcctgcctcagcctcccgagtagctgggactacaggcgcccgccaccacgcctggttaattttttgtatttttagtagagacggggtttcaccgtgttagccaggatggtctcgatgtcctagcctcgtgatccgcccgcctcagcctcccaaagtgctgggattacaggcatgagccaccgcgcccggccctttttttttttttagacagagtcttgctctgttgcggaggctggagtgcagtgatctcagctcactggaagctccgcctcctgggttcaagcgattctcctatctcaacctcccaagtgtgccaccacacctgccgaatgtttgtgtttttagtagggatggggttcgccatgttgggcaggctggtctcaaactcctgacctcaagtgatctgcccgcctcggcctcccagagtgctgggattataggcgtgagccaccatgcctggacatgaccctgtctctaaaacaatgtaatgaactgcagctcattcttgtgtgcacttttctgcaccccctttcccttaacacttactattgtctggcatgctacgtgttttcttgatctcattagcctctcccaccccaactgccacactgcactatcagagggcagcacttatcactgctgtagaacaaagtcctgcactgagccgatggcccagaaattttctttttatttatttatttattttttttttgagacagagtcttactctgtcgctcaggctggagtgtagtggcgcgatctcagctcactgcaacctctgcctcctggtttcaagcaattctccttcctcagcctccagagtagctgggattacacgcgcctgccaccgcgcctggctaatttttgtatttttagtagagatggggtttcaaccatgttggccaggctggtctcaaactcctgacctcaggtgatcctgcccacctaagcctcccaaaatgctggtattacaggcatgagccaccgtgcccggcctaaatatttaataaaataatggacgatgggtgccttctactgagctcccggtaattgtgagtgagtagaggacttgccctggggacattcagtgacctgctgggtgttgctgagctgtgaggaagttcaggtctggctgcagtggtgaggctgtgactcaatcaatcactgctgatgctcccaggacctgcaccagcttagtcctaggggcaaggattttaactgtccacctcagtttcttcatttgtaagatgcaaataacagtcacccctgcctcatgggatggagctgtgtaatgcccgcaacagtgcctgctgcatagaggggttgctgccagctgcctctccctccttgtctcttacctgcctgctgcctgggtcaggatgaagaggggcccttgtgttgcccccaccctggctgcctgctaagggcccatgtgatctgcctggcagaggagtttcttcaggaagaaccagggcagcttctgcccctagagggccaatgcccttggtgagtgcagtcccctggccccagcctggtccacctctgggaagagggtgcccagttgtgcaatccaggcccaggcagctgagccctcatctcagcatgcagggcggatactggagggggcttgtggcatctgactctgtatctcctacctgcccctctccttggtagctgtgagaagtcactgctttggggagacctgatctggctgtgccagatggacactgagaaagaagtagaagactcagaattagaagaggtgagtgggctttggtggcgggctccctaccccactccctgccctgggctgcctgtgaccacactgcttgcctctgcaggcacactggacagacctgctggagacctgatcctcagtgtccttaccccctcctacctcttttctgtgccacctgctgtgggtccagcaggtttttacttgagtacaataaaaagtctgagtcaagggtgccttatggtggatgctgaggggaggggcggagctagtagcccaaggtcctgccagtcacggggcttcctcaggggcacagaggaggcaggaggggcccctggccctagcacgtgaacagcttctactctgcctggaaaccccatgcctcagctttcccctacttgcctctgagctcatgcaattcttggaagcctgggagacttaccttgaaattgaatgcaaataggacaaagaccaaggaggatggggggatgccctccttccacggggccctgtggcttccaagtcttaatctcctctagtctcttgtctacggagcctccttcaaacccagggaaagaaaatcacctgccagggttgtttttcttctaggatcttctattgatgctctgtgaggtcccccaggagccatgaagctagggctggctcctagggcaatgggactacagtgtccttgtcctttcttattctttctgttctttctttctttctttttttttttttttttttttttttgagacagagtctcactctgttgcccaggctggagtgcagtggtgtgatcttggctcactgaaacctccgcctcctgggttcaagtgattctcttgcctcagcctcctgagtagctaggattacagatgcccgccatcatgcccagctaatttttgtatttttagtagagacagggtttcaccatgttggccagcttggtctcgaactcctgacctcaggtgatcctgctgcatcgacctcccaaagtactgggattacaggcgtgagccaccacgctcagcctctttcttgttctatatgtccatgctctgctccacttctgccccttcactctgcccccacacatcactccagactggccttgtggtcagagcctggaatgcctgggctgctgggggcctgtggactgcactgggccagaacccctgccgccttcaagactggcctgtagccagcaggtaggtgacttttcccaggccggcctatcccacctttcccctccactcactcacctcccttgcctgggtcaattagagaaagcttgtcggccaggcatggtggctcatgcctgtaatctcagcactttgggaggccgaggcgggcggatcatctgagctcaggagtttgagaccagcctggccaacatggcaaaaccccgtctctactaaaaatacaaaaattaaccggatgtggtggtgtgcacctgtaatcccagctactcgggaggctgaggcagaagaatcgcttgaacccaggagggggaggttacagtgagcggagatcgtgctactgcattgcagcctgggcgagagagcgagtctccatctcatataaaaaaaagaaaaagaaagaaagaaagcttgtctgttggcctgccctgcagggtggagttcagagggaaggtcaggagcctagtgacagctcaaaaaaaaaaaaacccaaataccaatgttggccccttttgcctttcattcatgtgttttctatacactaaactcacatattgggtttgcagatcactccaagcttggctggagctgtggtggtaaggagggtaatagagaagcttccccaccctcaaccccaccccttccttcctggagttcccagccctgactttagatccctcccacactggaccttcaaaaccctcagggcagagagcagccctacactccctacaccacacccatactcagcccctgcaggcaaggagagaacaggtcaggttcccgagagctcaggtgagtgacacgttggaatggcccagggcaccttcaccctgctcagcttgtggctccaacattctagaagccgaggcctctgccatccctgccctttcccatggatattccatttcaattagacaacccagcctggccggaatccccctgcgttccttcttttcctttgtgtatttttgagacagggtgttgctccgtcacccaggctggagtgtagtgggatcctggcccactgcagcctcaaattcctaggctgaggcaatcctgccgcctcagcctcctgagtagctggggttacaagagcaagccaccacacccagctaattttgaaaaatattttttgtagaggagaggtcttgctttgttgtccaggttggtctcaaactccagggctcaagggatcctttcccgttggcctcccaaggctctgggattacaggcgggagtcaccctgcctgggcccctccttttgatgagtcatcagttttcattcccgcacgaggctctagcccctggtaccagcttagttgctcaatgggctgtgtttgttctggagcccagatggactgtggccaggcaagtggatcacagacctggccggcctgggaggtttccacatgtgaggggcatgaggggggctcaaggaggggagcatcggggagaggagcgcactgggtggaggctgggggtcccagcaggaaatggtgagacaaagggcgctggctggcagggagacagcacaggcaggccctagagcttcctcagcacagctggactctcctggagaccttcacacaccctgatatctgggccccgcgctacgagggtgctttcactggtctgcactatgccccaggccctgggattttgaacagctctgcaggtgactgaaaggtgcggccaggctggggaacgacctggtttcagccccagccccgccactgactg

SEQ ID NO: 2844 - DNA, 6000 bp, Homo sapiens
ctgatgcccctgtacgccgcccgcagtttgagtgggcttggcagcacccgcacgcctcgcgccgcctggcgcacgtggggcctcgcctgcgaggagagacagccttcgctttccacctgcgcgtgctggcgcacatgctgcgcgcaccgccctgggctcgcctcccgctcacgctgcgctgggtgcgcccagacctccgccaggacctctgcctcccgccgccgccgcacgtgcctctggccttcgggcctccaccgccccaggccccggccccaaggcgccgcgcaggtccctttgatgacgcggagcctgagccagaccagggggatccaggggcctgctgctccctgtgcgcccagaccatccaggtgaggtccccccgaggaatggatggctctagagtccagacgacttcggatccagctctttcttgagggaaacccactgacacgctttggccaccctatccccatctctaagatgctgatgctataggacttacggccattcctgagcaaagcaggccctgctcagggccttcaccatttccccttcaaagaaaaggttcttccctaggccatcagtactccgctgcactccagtgtggtcgacagagcatgaccctcttttttttttttttttttttgagatggagtctagctctgtcgcccaggctagagtgcagtggcgcgatctctgctcactgcaagctccgcctcctgggttcacgccattctcctgcctcagcctcccgagtagctgggactacaggcgcccgccaccacgcctggttaattttttgtatttttagtagagacggggtttcaccgtgttagccaggatggtctcgatgtcctagcctcgtgatccgcccgcctcagcctcccaaagtgctgggattacaggcatgagccaccgcgcccggccctttttttttttttagacagagtcttgctctgttgcggaggctggagtgcagtgatctcagctcactggaagctccgcctcctgggttcaagcgattctcctatctcaacctcccaagtgtgccaccacacctgccgaatgtttgtgtttttagtagggatggggttcgccatgttgggcaggctggtctcaaactcctgacctcaagtgatctgcccgcctcggcctcccagagtgctgggattataggcgtgagccaccatgcctggacatgaccctgtctctaaaacaatgtaatgaactgcagctcattcttgtgtgcacttttctgcaccccctttcccttaacacttactattgtctggcatgctacgtgttttcttgatctcattagcctctcccaccccaactgccacactgcactatcagagggcagcacttatcactgctgtagaacaaagtcctgcactgagccgatggcccagaaattttctttttatttatttatttattttttttttgagacagagtcttactctgtcgctcaggctggagtgtagtggcgcgatctcagctcactgcaacctctgcctcctggtttcaagcaattctccttcctcagcctccagagtagctgggattacacgcgcctgccaccgcgcctggctaatttttgtatttttagtagagatggggtttcaaccatgttggccaggctggtctcaaactcctgacctcaggtgatcctgcccacctaagcctcccaaaatgctggtattacaggcatgagccaccgtgcccggcctaaatatttaataaaataatggacgatgggtgccttctactgagctcccggtaattgtgagtgagtagaggacttgccctggggacattcagtgacctgctgggtgttgctgagctgtgaggaagttcaggtctggctgcagtggtgaggctgtgactcaatcaatcactgctgatgctcccaggacctgcaccagcttagtcctaggggcaaggattttaactgtccacctcagtttcttcatttgtaagatgcaaataacagtcacccctgcctcatgggatggagctgtgtaatgcccgcaacagtgcctgctgcatagaggggttgctgccagctgcctctccctccttgtctcttacctgcctgctgcctgggtcaggatgaagaggggcccttgtgttgcccccaccctggctgcctgctaagggcccatgtgatctgcctggcagaggagtttcttcaggaagaaccagggcagcttctgcccctagagggccaatgcccttggtgagtgcagtcccctggccccagcctggtccacctctgggaagagggtgcccagttgtgcaatccaggcccaggcagctgagccctcatctcagcatgcagggcggatactggagggggcttgtggcatctgactctgtatctcctacctgcccctctccttggtagctgtgagaagtcactgctttggggagacctgatctggctgtgccagatggacactgagaaagaagtagaagactcagaattagaagaggtgagtgggctttggtggcgggctccctaccccactccctgccctgggctgcctgtgaccacactgcttgcctctgcaggcacactggacagacctgctggagacctgatcctcagtgtccttaccccctcctacctcttttctgtgccacctgctgtgggtccagcaggtttttacttgagtacaataaaaagtctgagtcaagggtgccttatggtggatgctgaggggaggggcggagctagtagcccaaggtcctgccagtcacggggcttcctcaggggcacagaggaggcaggaggggcccctggccctagcacgtgaacagcttctactctgcctggaaaccccatgcctcagctttcccctacttgcctctgagctcatgcaattcttggaagcctgggagacttaccttgaaattgaatgcaaataggacaaagaccaaggaggatggggggatgccctccttccacggggccctgtggcttccaagtcttaatctcctctagtctcttgtctacggagcctccttcaaacccagggaaagaaaatcacctgccagggttgtttttcttctaggatcttctattgatgctctgtgaggtcccccaggagccatgaagctagggctggctcctagggcaatgggactacagtgtccttgtcctttcttattctttctgttctttctttctttctttttttttttttttttttttttttgagacagagtctcactctgttgcccaggctggagtgcagtggtgtgatcttggctcactgaaacctccgcctcctgggttcaagtgattctcttgcctcagcctcctgagtagctaggattacagatgcccgccatcatgcccagctaatttttgtatttttagtagagacagggtttcaccatgttggccagcttggtctcgaactcctgacctcaggtgatcctgctgcatcgacctcccaaagtactgggattacaggcgtgagccaccacgctcagcctctttcttgttctatatgtccatgctctgctccacttctgccccttcactctgcccccacacatcactccagactggccttgtggtcagagcctggaatgcctgggctgctgggggcctgtggactgcactgggccagaacccctgccgccttcaagactggcctgtagccagcaggtaggtgacttttcccaggccggcctatcccacctttcccctccactcactcacctcccttgcctgggtcaattagagaaagcttgtcggccaggcatggtggctcatgcctgtaatctcagcactttgggaggccgaggcgggcggatcatctgagctcaggagtttgagaccagcctggccaacatggcaaaaccccgtctctactaaaaatacaaaaattaaccggatgtggtggtgtgcacctgtaatcccagctactcgggaggctgaggcagaagaatcgcttgaacccaggagggggaggttacagtgagcggagatcgtgctactgcattgcagcctgggcgagagagcgagtctccatctcatataaaaaaaagaaaaagaaagaaagaaagcttgtctgttggcctgccctgcagggtggagttcagagggaaggtcaggagcctagtgacagctcaaaaaaaaaaaaacccaaataccaatgttggccccttttgcctttcattcatgtgttttctatacactaaactcacatattgggtttgcagatcactccaagcttggctggagctgtggtggtaaggagggtaatagagaagcttccccaccctcaaccccaccccttccttcctggagttcccagccctgactttagatccctcccacactggaccttcaaaaccctcagggcagagagcagccctacactccctacaccacacccatactcagcccctgcaggcaaggagagaacaggtcaggttcccgagagctcaggtgagtgacacgttggaatggcccagggcaccttcaccctgctcagcttgtggctccaacattctagaagccgaggcctctgccatccctgccctttcccatggatattccatttcaattagacaacccagcctggccggaatccccctgcgttccttcttttcctttgtgtatttttgagacagggtgttgctccgtcacccaggctggagtgtagtgggatcctggcccactgcagcctcaaattcctaggctgaggcaatcctgccgcctcagcctcctgagtagctggggttacaagagcaagccaccacacccagctaattttgaaaaatattttttgtagaggagaggtcttgctttgttgtccaggttggtctcaaactccagggctcaagggatcctttcccgttggcctcccaaggctctgggattacaggcgggagtcaccctgcctgggcccctccttttgatgagtcatcagttttcattcccgcacgaggctctagcccctggtaccagcttagttgctcaatgggctgtgtttgttctggagcccagatggactgtggccaggcaagtggatcacagacctggccggcctgggaggtttccacatgtgaggggcatgaggggggctcaaggaggggagcatcggggagaggagcgcactgggtggaggctgggggtcccagcaggaaatggtgagacaaagggcgctggctggcagggagacagcacaggcaggccctagagcttcctcagcacagctggactctcctggagaccttcacacaccctgatatctgggccccgcgctacgagggtgctttcactggtctgcactatgccccaggccctgggattttgaacagctctgcaggtgactgaaaggtgcggccaggctggggaacgacctggtttcagccccagccccgccactgactgactttgtgagtgcgggcaagtcactcagcctccctaggcctcagtgacttccctgaaagcaaaaactctgcaaaggggcagctgggtgctggctcacacctgtaatcccagcactttgggaggctgaggtagacaaatcacttgaggccaggagttctagaccagcctggccaacatggtgaaaccccatctctactaaagaaaaaaaaaaattagctgagcatggttgtacatgcttgtaatcccagctacttgggatgccgaggcgggaggattgcttgaacccaagaggtggagtttgcagtgagctgagattgtgccacactgcactccagcttgggtgagagtgagactccatctcaaaaaaaaaaaaaaaaaagagagaatcccactttcttgctgttgtgatggtggtaagggaacgggcctggctctggcccctgatgcaggaacatggagctgatccaggacacctcccgcccgccactggagtacgtgaagggggtcccgctcatcaagtactttgcagaggcactggggcccctgcagagcttccaagcccgacctgatgacctgctcatcaa

SEQ ID NO: 2845 - DNA, 6000 bp, Homo sapiens
ggctggacgtggcgcctcacacctgtcgtcccagcactttgggaggctgaggtaggaggaccaagagcctgggaggcggaggcggaggttgtagtgagacgagattgcgccactctagccttagtggcagagtgagaccctgtctcaaaaaaaaaaaaggccaggcgcggtggcgcacgcctgtaatcccagcactttgggaggccgaggcgggcggatcacctgaggtcaggagtttgagaccagcctggccaacatggcaaaaccctgtctctactaaaaatacaaaaattagacaggcgtggtggcaggcacctgtaatcccagctactcgggaggctgaggcgggagaatcgcttgaacctggaaggcagtggttgcagtgagccaagatcatgccactgcagtccagcctgggcaacagagtgagactccatcttaaaaaaaaaaaaaaaaaagaatgcagaagttcctcacaactcatgggcataattctccccacactgctcagtgacaaggcagaggcagaacaggccattataaaagatgtgccagatcaaaggacagatgaacttttcttttcttttcttttcttttcgagagggagttttgctcttgtcgcccaggctggagtgcagtgtcatgatctcagttcactgcaaggtttgcctcccaggctgaagcgattctcctgtctcagcctccccagaagctgggattacaggtgcccaccaccacagccggctcattttttgtatttttagtagagaccaggtttctccatgttggggacgctggtctcaaactcctgacttcaggtaatctgcccacctcggcctcccaaagtgctgggattacaggcgcgcgccaccatacgcttttttttttttttttgagacagagtctcaatctgtcgcccaggctgtagttggcatgatctcggctcactgcaacctacatctcctgggttcaagtgattctccagcctcagcctcccaagtagctgcgattacaggcactggtcaccacgcccggctaattttgtatttttagtagagatgtggtttcaccatgttggccaggccaaattcgaactcctgacctcaggtgatctacccacctcagcctcccaaagcgctgggattacagtcatgagccaccccacttgtcctagacagaaaattatcttttttttgagacggagtgtcgctctgtcacccaggctggagtgcagtggcacgatctcagctcactgcaagctccgcctcctgggttcaagcaaatctcccgcctcagcctcctgagtagctggaattacatgcacctgccaccacacccggctaatttttgtagttttggtagagatggggtttcaccatgttgtccaagctggtctcgaactcctgctctcaggtgacccgcctgcctcagcctcccaaagtgctgggattacaggcgtgagccactgcgccgggccaagacaagagttttgctctagttgcccaggctggagtgcagtggcgcaatcttggtttactgcaaccttcgcctcctgggttcaggcgattctcctgcctcagcctcccgagtagctgggattacaggcatgcaccaccacacctggctgattttgtatttttagtagagacggggtttctccatgttcgtcaggctggtcttgaactcctgacctcaggtgatctgcctgccttggcctcccaaagtgctgggattacaggcatgagccaccacacctggccaatttttgtgtttttagtagagatgagatttcaccatgttggccaggctagtctcaaactcctgacctcaggtgatccaccggcctcggccccccaaaatgctgggattacaagtgtgagacaccgtgcccagcacccctgccttttttttttttttgagacagggtgtcactctgtcatccaggctggagtgcagtggcgtgatggtggctccctgcagcctcagcctcctgggctcaagtgatcctctcacctcagcctcccaagtagctgggactatgtagggtccagccctatggggcttagtgggtgttctccccatgtacggagaagagagattgtaataaataaagacacaagaccaagaaataaagagaaaacagctgggccccggggaccactaccatcaagacgcggagactggtagcggccccgaacggctaggctctttgatatctattgcatacatgacaagggggcagcgtaaggaaggtgaatcttctaagtgattgacaaggtgaagcatgtcacgtgattacaggatgggggcccttccctttcaggtaggtgaagcagagaaagaaggcagcatacgtcagcattttcttctctgcacttataagaaagatcaaagactttaagactttcactatttcttctaccgctatctactacgaacttcaaagacgaaccagaagtaagggaggaacatgaaagtggacaaggagcgtgaccagtgaagcaccacagggaggggtttaggcctccggatgactgcgtgcaggcctggataacatccagcctcccacaagaagctggtggagcagagtgttccctgactcctccaagcaaaggagactccctttcatggtctgctaagtaacgggtgccttcccagacactggcgttaccgcttgaccaaggagccctcaagcggcccttatgcgggcatgacagaaggttcacctcttgccttccactcacttctcacaatgtcctttcagcacctgaccctatacccaccggttattcctaggttatattagtaatgcaacaaacagtaatattaaaagctaatgattaatgtttataataattgataattgtccatgatcatctccataatttgtattatgactgttcttattgtaacgattttattatactgaaatagtttgtgccttcggtctcttgcctcggcacctgggtaattctccgcccacaggactacaggctcgtgtcaccacactgggcaatacaaaaaatacaaaaaaaaaattttgtattttttgtagagacgaggtcttgccatattgcccaggctggaattcttacctttgttactgtatttaacgtatctttttcctccggccatcttcatggttttctctctgatttccacagtttgaatacactgcatgtgtcaggcaggggctcatatttatcaagttttgtgtgtgctctgagctcaggtctttcattattttgggaaaattattggtaattttctcttcaaacattttttatgatttgttctttcttcttcttttgggagtcctattacatgcatatgatatcatttgatattttcccacagttcttggatgctttttttaaaaaaaaactttttttcttctttattttccaacgtgggtaattcctatttttctcagctgtgttgatcctactgctgccccatcagaaaaattacctgttatcagcgttcttcctttcttataatttgatgagtttcctcctcatgcatattgttcacctttcgtacaagagacctccacatattaatcacagttaatttaaatttccagcctgtttcaatttctcgatcacctctgagtctagtcctgttaattgcttagtgttattttttgtttttgaaacagggtcttgctctgttgcccaggctggagtgcagcggcgcgatctcaggctgttccctgagttcacaccatccccctcaaccagcagattgcaaagtgtccgagtcgggccgtgcaggagtctttgtgggggtttcatggactccgaattctcatttctgctccatccccatctcatgaatccaaggccccactctgtgcctcggctcttcgtttgtggtgctgaacgtcatctacgtcatctacgccatctacgtaatcaacacaataaagacgcctgccgggaacgcggcccttcggctgaatcccttcggtggttccaaggccactgccagaggatgcggacgggtctccagggcctctacttacccaggactttgaggcacattagcttcgcctaggcactcgcttttacgaattcttatgtttggttttgttttgagacagagtctcgctctgccgcccaggctggttaaaagatagggtctcagccgggtgcggtggctcacgcctgtaatcccagcactttgggaggccgaggcgggcggatcacctgaggtccggagttcgagactagcctgggccaacatggcgaaacgctgtctctactaaaaataacaaaaatcatccaggcgtggtggcgcgcacctgcaatcccagctactcgggaggctgaggcaggagaatcacctgaacccaggaggcagacgttgcagtgagccgagatcgcgccactgcactccagcctgggcgacagagggagactccgtctcaaaaaaaggaaaaaaaaaaaaaagaaaagaaacaaaagtgatggggtctcgctctgttgcccaggctagtctggaattcctgggctcaagcgaccctccagcctcggcctcccaaagcgctgggaatacaggcgcggctaccgcgcggtctccggctgccgaaacaccgccctgcgcgcggaccgttcggccgccgggaggaacagcggctgcccggagctcagaggcgcgcgcggctttgcgctccccgcggcgctctgagcctgcctcggcttggttggccaggtggtctcttcaggaccaaccccagtcattcccggcaggaaccacgcttgaggggcggcagtctgcccgcgcgagacgcccccgcggactacaccgcggcggcaaagccaaacgcaaaaactacctcaccgcgcgcaggcgcctcccccaggaccaacatggccacgacgcaaggcctcgacctgaggggcgtggcctggccgccgccagccaacgggtgtgcgcgcctggccgcagccaataggaaggcagcgcgggctcgggcgcagggagccgccgccggggctgtaggcgccaaggccatgtccgactcgtgggtcccgaactccgcctcgggccaggacccagggggccgccggagggcctgggccgagctgctgggtaggtgggcgcggcaggccgcgggagtgggcggcgtccggcccgggacggtttcgccggttccccgatcccttcccgccagagcctccgccggtcggatccccggacgccgcgcccggggggctgtgcggggtgggcgcccggctggggcggcgcggctgcctcggacccggcccctcctgcgcctgggcggacgcccccagccgccgcccgcggggcgctcccttctttcccgaacgccgcccccgccggccgccctgtcaggcgggcctggggtgcgcggcctggggctcccctcagcgcagaggccgcccctcgccagccgtccccgggctcccctgcctcgggccctcctgggccgtcttccccggcgtccgcggtggggccgtctccgttagtttcccgagacctgcgccctggggaggagccccggcccctcttcgggagggtgtcgctggtgggtttctccgcggcgtccacctgcgcgtcgggccggggaccccgtgtgtgaattgtgctgtgatggtttcgaaccgacttctctccgtagcgggaagggtcaagagggaaaaatataatcctgaaagggcacagaaattaaaggaatcagctgtgcgcctcctgcgaagccatcaggacctgaatgcccttttgcttgaggtaagaggaagctggtgtccgtctgcgggcagatttaggttcggggtttttgagtccagccaccgcacagctttcctaagaaaacacccgaggcggcgggcgcggtggcctggcccgcagaggggagggtcgcctgagcccgggagttctggaccaacctgggcaacggggtgagaccccgcctcttttattaaaaacaaaacaacaacaacaaaaaaacaggccgggcgccgtggctcaggg

SEQ ID NO: 2846 - DNA, 6000 bp, Homo sapiens
ggttcaagcgattctcctgcctcagcctcccaagtagctgggattacaggcacgcgtcactacgcccagttaattttttgtatttttagtagagatggggtttcactatgttggctaggctcgtctccaattcccaacctcattaatccgcccgcctcggcctcccatactgctgggattacaggtgtgagccaccacgtgagccaaaattaattgtttaaagaaaccgggccgggcacggtggctcacgcctgtaatcccagcactttgggaggccgaggcgggcggattacaaggtcaggagatcgagaccatcctggctaacacggtgaaaccctgtctctactaaagacacaaaaacaaaattagccaggtttggtgacgggagcctgtagtcccagctactcaggaggctgaggcgaagaatggcgtgaacccaggaggcggagtttgcagtgagccgagatcacgccactacactgcagtctgggcgacagagccagacttcatctcaaaaaaacaaaacaaaaaaaaactggaggccaggctcagtgggtccctcctgtaatcccagcactttgggaggccgaggcgggtggatcacctgaggtcgggagtttgagaccagcctgaccaacatggtgaaaccctatctctactaaaaatacaaaattagccaggcgtggtggtgcatgcctgtaataccagctactcaggaggctgaggcaggagaatcactttaactagggaggcagaggttgcggtgagtcgagatcacaccattgcactccagcctgggtaacaagagcaatactccgtctcaaaaaaaaaaaaaaaaaaaaaaaactgttaactgcagtacgaacctgttattgtaatgtactggctctaaaaacacattatcaatacataagtaaaaacatttacaggctggttgcggtggctcatgcctgtaatcccaacactgcaggaggccgaggcgggtcgatcacgaggtcaggagtttgagaccagcctggccaagatggtgaaaccccgcctctactaaaaatacaaaaattagctgggtgcggcggcgggcacctataatcccagctattcgggaggctgaggcaggagaattgcttgaacccaggaggcagagtttgtagtgagccgagatggcgccattgcactccagcctgggcgacagagcaacacttcgtctcaaaaaaaaaaaaaaaaaattttacaatagttctagaagcttaaaattatagtacgagaaatcatcagctgctggtgaaattctcggtagaaaagtagacagatggggcacagtggctcatgcctgcaatcccaacaccttgggtggctgaggtaaactgattgcttgagctcaggagtttgagaccagcctgggcaatatggcaaaaccctgtctctatgaaaaaattagccaggcatggtggcgcacacctgtagtcccagctactcaagatgctggggtgggaggatcacttgaggccaggaggtcaagactgcagtgagccgtgattgcaccacggctctccagtccaggcaacagagtgagaccctgtctgttaaaaaaaaaaaaaaaagtagacaatgccattttctgttctgagacagagttttgctcttattgcccaggctggagtgcaatggaggggtctcggctcaatgcaacctctgcctcccacgttcaagcaattctcctgcctcagcctcctgaatagctgggactacaggcacccaccaccacacccggctaatttttgtgttttttagtagagacagggtttcaccatgttggccaggctcgtctcgaatcctgacctcaggtgatccgcacacctcagcctcccaaagtgctgcgattataggcgtgagccactgtgccaggccaacaatgccaatttctagtcatttgtttccaatgtgtctccataggaaagtttttttatctacaagtcttttactgtgtgtgtgtgtgtgtgtgtgtgtgtccgtgtgcacgtgcgtgcatgtactaactatatctttagcagaaaaaaacaaactcaaaaattaatgaattaaaggtttatctgtgtggctgagcttggttccttggaatgataatatgcaatttgtgaaattcaaatacaatcatggcagtgaaaatctgtatcatttgccaatgacattcagtgaccagttgtcaagggagcgctattactgaaggttattttaacagaaacaagtcatcacataaggacgtgaaggatcagaaaataacttactgttgttgacccagaacttaccctatctcccactctcaaactggggggagaaggaggtacctagaaaattgttctcccgtctgctctcctgggcacaccacagcctgtctcactacttccatgagcaaggggcacatccctgctgttgctatgtcccatgtttttccaagggacactctgggtcctactgcttctgagtcgcaggttgaatcagacgctgtttttaaacacagcatcgtaagaagcccaagagcaagtcacacaaacatcccatagaatttgcgactacacacaccagtggaaacccatcgcctgagaaaatttacatttctacttaatttagcaaactatggttactatataaaaacccttctgcaattcaaaatagagaaaatgaagctataacttacctataaatgaactagaatgattagcataggcctcagaactgtcacagtcaatcactttgctgagagacaattttttacacagtggaccttctacctagaatccaaaacacaacaaactccatttaaaaaattcaagctccaggccaggcgtagtggctcacgcctgtaatcccagtactttgggaggccgagatgggcagatcacgaggtcaagagttcgagaccagcctggccaacatagtgaaaccctgtctctactaaaaatacaaaaattaggagggcatggtggcgcgtgcctgtagtcccagccactcgggaggctgagacgggagaatcacttaaacccgggaggtggaggctgcagtgagccgagatcaccccactgcataccagcccaggctacagtgtgagactttgtctcaaaaaaaataaatgaaaataaaaaataaaaataaaaaaaattcaagatctgtgcataaacacaacctgtgtgtaagtaatgcttccctactgggctattttcctttttttcttttttgagagggagtctcactgtcgtccaggctggagtgcaatggcgggatctcactcacggcgacctccacctcccaggttcaagcgattctcctgcctcagcctcctgagcagctgggattacagacacctgctaccatacccggctaatttttgtattttaagtagtgacggggtttcaccatgttggtcaggctggtctcgaactcctaacctcaagtgatctacccacttcggcctcccaaagggctaggattacaggcgtgagccaccacgcccggctttttttttttttttttttttttttttttttgtgagacagtctcactctgtaatccagactggattgcaaggggcgtgatctcggctcactgcaatttctgcctcccgggtccaggttcaagcaattctcctgcctcaggctcccgagtagctgggattaaaggcgtgcgccaccacacccagctaatttttgtattttcagtagagaccgggtttcactatgttggccaggctggtctcgaactcctgaccctgagtgatccacccgccttggcctccccaaaagctgggattacagccctgagccacggcgcccggcctgtttttttgttgttgttgttttgtttttaataaaagaggcggggtctcaccccgttgcccaggttggtccagaactcccgggctcaggcgaccctcccctctgcgggccaggccaccgcgcccgccgcctcgggtgttttcttaggaaagctgtgcggtggctggactcaaaaaccccgaacctaaatctgcccgcagacggacaccagcttcctcttacctcaagcaaaagggcattcaggtcctgatggcttcgcaggaggcgcacagctgattcctttaatttctgtgccctttcaggattatatttttccctcttgacccttcccgctacggagagaagtcggttcgaaaccatcacagcacaattcacacacggggtccccggcccgacgcgcaggtggacgccgcggagaaacccaccagcgacaccctcccgaagaggggccggggctcctccccagggcgcaggtctcgggaaactaacggagacggccccaccgcggacgccggggaagacggcccaggagggcccgaggcaggggagcccggggacggctggcgaggggcggcctctgcgctgaggggagccccaggccgcgcaccccaggcccgcctgacagggcggccggcgggggcggcgttcgggaaagaagggagcgccccgcgggcggcggctgggggcgtccgcccaggcgcaggaggggccgggtccgaggcagccgcgccgccccagccgggcgcccaccccgcacagccccccgggcgcggcgtccggggatccgaccggcggaggctctggcgggaagggatcggggaaccggcgaaaccgtcccgggccggacgccgcccactcccgcggcctgccgcgcccacctacccagcagctcggcccaggccctccggcggccccctgggtcctggcccgaggcggagttcgggacccacgagtcggacatggccttggcgcctacagccccggcggcggctccctgcgcccgagcccgcgctgccttcctattggctgcggccaggcgcgcacacccgttggctggcggcggccaggccacgcccctcaggtcgaggccttgcgtcgtggccatgttggtcctgggggaggcgcctgcgcgcggtgaggtagtttttgcgtttggctttgccgccgcggtgtagtccgcgggggcgtctcgcgcgggcagactgccgcccctcaagcgtggttcctgccgggaatgactggggttggtcctgaagagaccacctggccaaccaagccgaggcaggctcagagcgccgcggggagcgcaaagccgcgcgcgcctctgagctccgggcagccgctgttcctcccggcggccgaacggtccgcgcgcagggcggtgtttcggcagccggagaccgcgcggtagccgcgcctgtattcccagcgctttgggaggccgaggctggagggtcgcttgagcccaggaattccagactagcctgggcaacagagcgagaccccatcacttttgtttcttttcttttttttttttttcctttttttgagacggagtctccctctgtcgcccaggctggagtgcagtggcgcgatctcggctcactgcaacgtctgcctcctgggttcaggtgattctcctgcctcagcctcccgagtagctgggattgcaggtgcgcgccaccacgcctggatgatttttgttatttttagtagagacagcgtttcgccatgttggcccaggctagtctcgaactccggacctcaggtgatccgcccgcctcggcctcccaaagtgctgggattacaggcgtgagccaccgcacccggctgagaccctatcttttaaccagcctgggcggcagagcgagactctgtctcaaaacaaaaccaaacataagaattcgtaaaagcgagtgcctaggcgaagctaatgtgcctcaaagtcctgggtaagtagaggccctggagacccgtccgcatcctctggcagtggccttggaaccaccgaagggattcagccgaagggccgcgttcccggcaggcgtctttattgtgttgattacgtagatggcgtagatgacgtagatgacgttcagcaccacaaacgaagagccgaggcacagagtggggccttggattcatgagatggggatggagcagaaatgag

SEQ ID NO: 2847 - DNA, 6000 bp, Homo sapiens
acctctctgtacttccttcctctgtaaaatgggagtataatagctatcttctagggttacttaagtactgactactaaagcatctgtcacattagaaatagtcaaaaacattagttcccttcccctttcgttatataattaagatacaaatgctatgtattctgttgaccacaagagttctatgcatcatctcttattttatcatgtgactcttgcccaaacgccttcacatgtgtgtggtatttgcgtaccctttgtggcctgtgtcttttgaacgaaaatgatacctgctttagctgataatgaaagtcagcaaaggttctccaactcattccatcaccacaaacacatgtgaaactttcattcttcatttatgaacaaaatacttcacctacgctggaaataggtttataaaattttgaatataaaaacatggccaggtgcagtggctcacatctataatcacagcactttgggaagctgaggcgagaggatcgcttaagcccaggagtttgagactagcatgggcaacagagtgagaccccatctctaaaaaataaaaaaacttatcaaattatttaaatatctccatgatcattctttatttttttttgagacagtctcactctgtcgcccagtctggaatgcactggtgcaatctcggctcactgcaacctctgcctcacgggttcaagcaattatcctgcctcaggctctcaagcagcagggattacaggcacacgccaacacacccagctaattttgtatttttagtagaccagggtttccccatgttggccaggctgatctcgaactcctgacctcaagtgatccacctgccttggcctcctaaagtgcttagattacaggcatgagccactgcgcctggcccatgatcagtctttttaaaagtgaagaaccattcttttctttttttcttttgagatggagttttgctcttgttgctggagtgcaatggtgcgatcttggcttaccggaacctctatctcccgggttcaagagattctcctgcctcagcctcccaagtagctgggattccaggcatgcgcccccacacctggctaattttgtatttctaatagagacagagtttctccatgttggccaagctggtctcaaactcccaatctcaggtgatctgcctgccttggcttcccaaaatgctgggattacaggcgtgagccactgcgcctggcctagaaacattcttaatttgtcttaaagacacaaggtagcagctataaagtaaatgaaagctacaatttaaaatcacttccccggtttcagcattcacacattcctaatttatttaaatattcacttgagtccaacaatagttcttcctgttcctgtttttcccccaagctgcctttcttccccattcacctgtccctttcttcccactgcctcattcattcatgcaactagcaagcatttattcagcacctaaaacttgccagcacttctccaggtattggggatacaatgcagagtaaaataacccagacatgattgcaggcctcatggaatttacacaaagtattaggccaggcacagtggctcaagcctgtgatcccagcatactgggaggccaaggtgggtggatctcgaggccaggagttcaagaccagcctggcctacatggcgaaaccctgtctctactaaaaatacaaaaattagcagggtgtggtggtgggcacctgtaatcccagcttctagggaggctaagacaggagaatcgcttgaacccgggaggcagaggttgcagtgagccgagaatgtgccactgcactccagcatgggcaacagagcaagactctgtctcaaaacaaacaaacaaacaaacacaataattttaaaattttaaaaagaaactgataaatcaacaaacataaaactgcaattattaataggtaacataaacactgagcatttactatgtatcagtgtgctaagcactttaaatttaataactcactccatcctcctacttaccttatgcaatagatatcattgctctcattttacagaaaagaaacagtttagtatcttgcctcaagtcatgcatctaataagtgaatggggtcgtgcgcggtggctcacgcctgtaatcccagcactctgggaggccgaagcaggtggattgcttgaggtcaggagttcgagaccagcctggccaacatggtgaaaccccatctctactaaaaatacaaaaattagccgggcatcatggcagtctcctgtattctcagctacctgggaggctgagggaggagaattgcttgaacccaggaggcggaggttgcagtgagtcaagatcgtgccactgcactccagcctgggcaacagagcaagactccatctcaaaaagaaaaaaaataaataattcaataagtgaatgaacaggaattggggtctcaaagggatttagcctagtaagggaagtcacaaatgagctgagatacgaagatagtgtttgccagtgtggggaagagtgaagaaccacccaggcagtgggcagagggaaaaaaatgttcagggccgggtgcggtggctcacttctgtaatcccagcactttgggaggccgaggagggtggatcacctaaggttgggagttcaagaccagcctgggcaacatggtgaaacccccgtgtctactaaaaatacaaaaaattacgcaggtgtggtggtacatgcctgtaatcccagctactctggaggcagaggcacgagaactgcctgaacccagaaggcagaggttgcagtgagccgagattgcgccaccgcactccagcctggggcggtagtgggggggtatggggagaaagagtgagactctgcctcaaaaaaaaaaaaaaaaaaaaaaaaaaggccgggcacagtggctcacgcctgtaaccccaacactttgggaggccgaggcgggcgaatcacaaggtcaggagatcgagaccatcctggctaacacggtgaaaccccgtctctactaaaaaatacaaaaaattagccgggcgtggtggcgggtacctgtagtcccagctattcgggaggctgagacaggagaatggcgtgaacccaggaggcagagcttgcagtgagccgagatcgcgccactgccctccagcctgggcaacagagcaagattccagctcaaaaaaaaaaaaaaaagttcaaaggccccatggaagaaggtaggagtatggaatataccagaaatctaaatttaaaaaaaaatgtgggggtgactggagaggtaggctgagagtatgctgtggatgggaatggtggcaggaacgtatgctgagtggaagtcagcagctcaggcaaaaaaaaagacggtgccagtatggatggagagaagccagtgggcttgatagatctacgcagaggcaaaatacacttcacttcgtgagggactggatgcccaggtaatggacaatataggaggaatgatttctcaatttctggttagcactgaactgaatagataatggtgccatccgtggagatagggatcaagaggcccagacttagaaagataaagaatttgctttgggatacgtatactgaacttaaaaccctctgaagcatggaataagcagacagatgacggaagtttgtcttttagagtaaaggtggctctgtacaaagaaatttgtgagcaactgacatatattaatagatggcaatggaattgccttggggccaggcgcggtggttcatgcctgtaattccagcattttgggaggccgaggcgggcggataacttgaggtctggtgttcgagatcagcctggccaacatgatgaaacccagtctctaataaaaacacaaaaagtagccgagtgtggtggcgcacacatgtagtcccagctactcgggaggctgagacaggagactcacttgcacccgggagacggaggttgcagtgagccgagatcgcgcctctgcactccagcctgggcgacagtgagtgtcgcccaggctggagaaaaaaaaagaaattgcctcgggagtcaagagggcctagagggagccttgattcaacaaaaatttacaaagagggacttacaaataagacggggatagacctgccaagctgagccactaaaaaccaaggaagagggtgtgacctgaagcaagcagggcttaaacgcaaacgctgctgagaactcaggtaagctgaaaacggaaaagggctggatttagcaacttggaggccactggtaccttcagccagggttttctacagcgatcaaagggatgactggagtgggttaaagagttgatgaaaggcgaggaaaggaagtggctgaaaccagacaagaagtttggctgtgggtggggaaaggagaagagacagaaagtgtccgcaggtggaagatgcagagaaaggcaagcgtttatttagtttgttcttacgtaggaaaaatgtgagcatgttttaaagacgatcgaaagaatgctttgaggagggggcgatgacactagagggacgcccggcgggtccccaccgccccccgccatctcctcccctcgcgttcatcccccgtcgccccgggctcccctccccctctctactccgcgaggctcggggccgcagccaccccggaccgccggcccagcccccggcacctcctcaccgcaatggccccctcgctcagttggccgaccatggctccaccgccaagacttccccgcggaccccgcaacagctccagcttccccacccgggtcccgcgcgctgcgcagttattggcccgagaagttgcgcgcaccgctcccgcccccgacgtgcgcgcggctcaggggcgggcccgggcgctacgcagccgccgcattggccgaggcgcggcccacgtgacccacccatggtcccaagcgaggcctggcgcgggacgccggacgcggtgcggggcggagcggggcgccaaggggcgcgccaggagctgcgcgggcgctgggagggagaccagggcgcagttccgggcgcgtctgagcggttctcgaggcgttctcgcctcggtctctggcgagtgcacgggttggtatcccagaggaggttaaagctgttccttgagacctccgctgctaaatagagtcgcagtagtgacccgattcgtccagcaacgcggggctgacttcccgcctccaagccctgagcttggcaccgtggcggtggggggtgggggtggggggtctccgaaagggaatcagacccggcccccgtccttagagaagaggacagtgtgtgggggcactttatgccgtcagtaaccccacctccaggtagacgtggtacaggccccaagggtgttggaatcacagctgggaaatcagggacgccgtcccggaggaggtgccatttgagccgagtcgaagaacgtgtgggaattttccaggtggactccataagccagggtagggttggtccggaaagcatgagtagcctatgccaaaacattggagagttgaaatagcctggcaagccggggatagcaatgagttgttcagtatgcaagggtgcatgcagaggagtaagtgacacctgagaattagaaagtcagacaagggtcaagtaaggatggttttgtcctgggcttcctggtatgcttggagtagcgttgatgaatttaagggcagagcactgacttctgtctcagtgttggaggctggattgaaagtggggagtggtgccaatggcatggacattaattataacactctaggaagaatgccagacgagatggtgaggacttaatcagaacgctgaactatgtaagagagggaaataccttgttaaatgaatagttgctggggtgggtgagaaagaaaaatctgggatgtgtctcagagaaactagagagggatcaggccgggcgcggtggctcacgcctgtaatcccagcgctttgggaggccaaggctggcggatcatctgaggtcaggagttcgagaccagcctggccaacatggtgaa

SEQ ID NO: 2848 - DNA, 6000 bp, Homo sapiens
gccatgtgtgagtcaattaaacctcttttctttataaattacccagtcttgggtatttcttgatagcaacgtgagaatggagtaacatgagtaggaatttaattttaataactgaggcatttgcaagcactggggaaaggatgcatcatgcattaaatgctacagaaaaattgtccacctggaaaaaaagtgagaatattccttcacatagtacacaaaatcaattggagatgtatacatacatcataacataatgttgtaccccttaaacgtatattttgtcagttatacctcaataaagatggaggaaaaagtgcagaaggattagagagctaaaggtaaaaaaatgttagcagaaaacaatgaacatttttatcaactcccaagtagttggaattacaggcacatgtcatgttgtctggcttcatttttatacagccatatctgtcattttctttcttttttttttttttttttgagaaatagtcttgttctgtcacccaggctggagtgcagtggcacaatcatggctcgctgcagccttgacctcccaggttcaagtgatcctcccacctcagcctcctgagtagctgggacgacaggcacatgccaccatgcttggctaatttttaaaatttgtttatagagatggaatctcactatgttgcccaggctcctgggctcaagcaatcctctcacctttggctcccaaagtgctaggtttacaggtatgagccaccgcacccaacctcatcttcttttataccttctgggttgtgtcttgcttaggatggttcactccaccatcctaaggaagacaggaggatcgcttgagcccaggagcttgaggtcagcctgagcaacatactgagaccttgtgtctaaaaataaattttaaatgaaatttaaaaatttgaaacatatatacacaatttatatacaatgtaaatgtaaaacatttacattgtaaatagggtaaaaaagataaacagattgggaataatttatacaacaaatagtaacttacatagcaaagaactatacagctagatttatgaagatctcctacaaatgaacaagagaataaagacaacctgctagaaaatgggcaagggacacaaataggcaatacacacgagaaataaaaatgcactggggggccgggcgcagtggctcatgcctgcaatcccagcactttgggaggccaaggcgggcggatcacctgaggccaggagttggagaccagcctgcccaacatggcgaaactccatctctattaaaaatacaaaattagccgggtatggtggaatgcgcctgcaatcccagctactcgggaggctgaggcaggagaatcacttgaacttgggaggcggaggttgcagtgagccaagactgtgccactgcactccagcctgggcaacaagagcaaaactctgtccaaaaaaaaaaaaaaaaaaaaaaaaaaagaaaagaaaagaaaagaaatgaagactaacaaaaaaagtataaccctaactgtaccgagtatctgaactggcaaggctcaaaactgaactcattatttcattcaattaatatacgagcgcctactatgtgcctggcacaaagataaagacatcaaccttgaacgtgaaaggtgtgtgtttctggatctgcaaatatataaggttctgctttatacgtcattttaagcactaataacagccagtaactaaactaagaactttatatacattaccaagttgtcattcaattaatgtttactaaccacttattttttgacactgcactatttttgtctatagaaagacaaacaggccgggcacagtggctcatgcctgtaatcccagcactttgggaggctgaggcgggcggatcatttgagggcaggagttcaagaccagcctggccaacatggtgaaaccctgtctctactaaaaatacaaaaatgtgagctgggcatgatggtgtacgcctgtaatcctagctatttgggacgctgaggcatgagaatcgcttgaacccaggaggtggagattgcagtgagctgagattgtgccactgcactccagactgggtgacagagtgagaccctgtgtcaaaaaaaataaaataaaataaaaataaataaataaataaattagccgagcatggtggtgtgcgactgtaatcccaaatactcgggaagctgagatacgagaattgcctgaacccgggaggcggaggcagtgggctgagattgcgccactgcactctagcctgggtgacagagcgagacagtctcaagaaaaagaaaaaaagaaaaaaaaaaaaagaaaaacaaatacaaacacggtcccttccctcatgaagttcacaatctagcggcaaaggcaggcattagtcaaaagagcacacacatatataaaggaaaatcacacagcattgtaaatgtacaaagagtgaagatggcccagctgaggctcagggagagctttcctgaggaaagatctggctaatcctgcaggatgacagaagtgaattagttcacaggacacgctgggatagaaacgaaccaggaaaagtacttcaggcattttccatcaaaaagagatgttaccaggccagacatggtggctcacgcctgtactcccagcaccttgggaggccaaggtgggaggattgcttgagcccagaaatttgagaccagcctgggaaacaagcaagactcaatctttatttaagaaaaagacacattacttcagagcaaatgacaaaatagaacattttttggctcacaattcccttgttaaagcttgatttacttactgaagaagtgaagaggagtgaagaaagatatccctcaaggtctctgctgtagaaattgtgacctgaacagacgtcgggagtgaagcccacttttgaagcagatatgatttccattcatccacaggcagatccatgctgcttttgatctataaaatgagtaagaaaataggaatcttacaaatgcacaattttagaaaatcaagagttcagccaggtacggtggctcacacctgtaatcccagcactttgggaagccgaggtaggtggatcacgaggtcaggagatggagaccatcctggctaacacagtgaaaccccgtctctactaaaactacaaaaaaattagccaggtgtggtggcgcacacttgtagtcccagctactcgggaggctgaggcaagagaactgcgtgaactggggaggcggaggttgcagtgagctgagatcacgccattgcactccagcctgggtgacagagcaagactctgtctcggaaaaaaaaaaaaaaggaaaatcaagatttcattcaaggaagcctgaaacaataaaatcaattcttgtggtcttttcctctagtttatatgctaaggaaggatctatattttctcacagcaattcactcaacatccttccattcagaaatatttactgaaagactactttgtcacaggcaccatgcaggtgatggttatacaaagacgaagcagactagatagctaccatctgtgctcttagatcctcttttttttttttttgtgaggcagagtcttgctctgtcacccaggctggagtgcagtggcaccatctcggctcactgcaccctccgcctcccaggttcaagcaattctcctgcctcagcctccgagtagctgggattacagatgcgcgcaactacgcccggctaatttttgtatttttagtagagacggggtttcaccatgttggccaggctggtctcgaactcctgacctcagatgatccgccagccttggcctcccaaagcgctgggattacaggcgtgagccaccgcgcccggcctgatccctctctagtttctctgagacacatcccagatttttctttctcacccaccccagcaactattcatttaacaaggtatttccctctcttacatagttcagcgttctgattaagtcctcaccatctcgtctggcattcttcctagagtgttataattaatgtccatgccattggcaccactccccactttcaatccagcctccaacactgagacagaagtcagtgctctgcccttaaattcatcaacgctactccaagcataccaggaagcccaggacaaaaccatccttacttgacccttgtctgactttctaattctcaggtgtcacttactcctctgcatgcacccttgcatactgaacaactcattgctatccccggcttgccaggctatttcaactctccaatgttttggcataggctactcatgctttccggaccaaccctaccctggcttatggagtccacctggaaaattcccacacgttcttcgactcggctcaaatggcacctcctccgggacggcgtccctgatttcccagctgtgattccaacacccttggggcctgtaccacgtctacctggaggtggggttactgacggcataaagtgcccccacacactgtcctcttctctaaggacgggggccgggtctgattccctttcggagaccccccacccccaccccccaccgccacggtgccaagctcagggcttggaggcgggaagtcagccccgcgttgctggacgaatcgggtcactactgcgactctatttagcagcggaggtctcaaggaacagctttaacctcctctgggataccaacccgtgcactcgccagagaccgaggcgagaacgcctcgagaaccgctcagacgcgcccggaactgcgccctggtctccctcccagcgcccgcgcagctcctggcgcgccccttggcgccccgctccgccccgcaccgcgtccggcgtcccgcgccaggcctcgcttgggaccatgggtgggtcacgtgggccgcgcctcggccaatgcggcggctgcgtagcgcccgggcccgcccctgagccgcgcgcacgtcgggggcgggagcggtgcgcgcaacttctcgggccaataactgcgcagcgcgcgggacccgggtggggaagctggagctgttgcggggtccgcggggaagtcttggcggtggagccatggtcggccaactgagcgagggggccattgcggtgaggaggtgccgggggctgggccggcggtccggggtggctgcggccccgagcctcgcggagtagagagggggaggggagcccggggcgacgggggatgaacgcgaggggaggagatggcggggggcggtggggacccgccgggcgtccctctagtgtcatcgccccctcctcaaagcattctttcgatcgtctttaaaacatgctcacatttttcctacgtaagaacaaactaaataaacgcttgcctttctctgcatcttccacctgcggacactttctgtctcttctcctttccccacccacagccaaacttcttgtctggtttcagccacttcctttcctcgcctttcatcaactctttaacccactccagtcatccctttgatcgctgtagaaaaccctggctgaaggtaccagtggcctccaagttgctaaatccagcccttttccgttttcagcttacctgagttctcagcagcgtttgcgtttaagccctgcttgcttcaggtcacaccctcttccttggtttttagtggctcagcttggcaggtctatccccgtcttatttgtaagtccctctttgtaaatttttgttgaatcaaggctccctctaggccctcttgactcccgaggcaatttctttttttttctccagcctgggcgacactcactgtcgcccaggctggagtgcagaggcgcgatctcggctcactgcaacctccgtctcccgggtgcaagtgagtctcctgtctcagcctcccgagtagctgggactacatgtgtgcgccaccacactcggctactttttgtgtttttattagagactgggtttcatcatgttggccaggctgatctcgaacaccagacctcaagttatccgcccgcctcggcctcccaaaatgctggaattacaggcatgaacc

SEQ ID NO: 2849 - DNA, 6000 bp, Homo sapiens
ctaatggaaaatccataaaaagctaccaaaactaataaataaatatagcagggttgcaggttacagggcaatatagttatccctctatctgtaggggcttggttctgggactcctcacacaccaaacccacagatgtctaagtcccatatataagacggtatagtatttggatttaacctacacatatcctcccatatagtttaaattatctctagattacttacattacccccatacaatgaaaatgctaatgtacatgcaagtatgtatgtaagtacttgtactatattgtttagggaatcactggacatataggccttcaagactgataccagcagccactgttaagattctggtcaggcctgcccctgtttggggtctcagttgatctcattgccttcccacccagccaagggcacctgcatttctcttggctccctggccatttggaaggcctagttcagcctggcacatttgtatcctggcccactgatgctggtacccctgggaaggtcctgctctgaaaaacacggagattttagttgctactgaagatttgagagataaagacagggagacctgtctgtagacctgtgtccctccaagtgggattgagactttgggccccccatttcaggacagcacctcctggcctgttgactgaatagatccctgaaggaggtgtacttgcattaatggagtgggggtgggagcagtaccacagatccgcactaacaatcacacagttctctctagaataataatatagaacaagtgaaatagaacaattgcagaaagagctaacctttgttgagctcttactgtgtgcccagcactttcctcaactctacatttcccataatacacagagtactaggtaggccaggcttggtggctcacgcctgtaatcccagcactttaggaggccaaggggggtggatcacctgaggtcgggagttcaagaccagcctgaccaacatggtgaaaccccgtctctactagaagtacaaaattagccaggtgtggtggcacatgcttgtagtcctagctactcagcaggctgaggcaggagaatcatttgaatccgggaggaggttgcagtaagcggagatagtgccactgtactccagcctgggcaataagagctgagactccgtctcaaaataaaataaaataaaataaaataaaataaaataaaataaaaaaagaaaagagcctgccattaaaggagctgtttggtaggggatgttttgtcagtgcaaacaacagaaaagtgggctgggcacagtggttcatgcctgtaatcccagcactttgggaggccaaggcgggcggatcacctgaagttgggagttcaagaccagcctgaccaatatggagaaaccccgtctctactaaaaatacaaaattagccgggcgcagtggcgcatgcctgtaatcccagctactcgggaggctgaggcaggagaatcgcttgaacctgggaggcagaggttgcggtgagccgagatcgcaccattgcactccagcctggacgagagcaaaactctgtctcaaaaaaaaaaaaaaacagaaaagtgtaacaaacacttacagtaggcatgtttcttagcaaatctgatgacaaatttggcataaagaaagagagcatccctgaaaaaaaaaaaaagaaaaagaaagagagcatcctgcctgggcaacatagtgaaaccctgcctctacaaaaaaactcaaaaattggccgggtgcagtggctcacacctgtaatcccagcactttgggagtcggaggcgggaggatcacctgaggtcaggagttcgaaaccagcctggccaacatggcaaaaccccatctctactaaaaatacaaaaaattaatcaggcgcattggtgggcgcctgtaatcccagctactcaggaagttgaggcaagaggatcgcttgaatctgggaggtggaggttacagtgagtcgagatcacaccactgcactctagcctgggtgacagggcgagactccgtctccaaaaaaaaaaagaaaaagaaaaagactaaaaaattagccaggcaggcctctgtggtcccagctacttgggaggctgaggcaggagaatcactgagcccaggagtccgaggctgtagtgagccatgattgcaccactgtaccctagcttgggcaacaaagcaagaccctgcctcaaaagaaaaaagaaagaaagaaagaacatggcgggccaggcacagtggctcacacctgtaatcccagcgctttgagaggccgaggcaggtggatcacaaggtcaggagttccacaccagcctggccaacatggtgaaaccctgtctctactaaaaatacaaaaaatcagccaggcatggtggcaggggcctgtaatcccagctactcgggaggctgaggcaggagaattgcttgaaaccagaaggcagaggttgcagtgagcctagactgcaccactgcactccagcctgggcgaaaagagccaaactccatctcaaaaaacaaacaaaaaaacaaaacaaaagaaaacatggcaaagcctttgaaagcttgtctgggagaaggtgcgatgatagttgcataacttcgtgcaagatgctggtccacacaggggctgccccttgctctttctcgctctcttaacctctcatataacaggcttgtgtgttattcacatttattgagcccaagcaggtgcaaggcattgtgatctaatactttggtcagcaagacaacaagatagatcactgccctgcccttaggaagtgtatatgctattagaggaaacagataaaataaacaaggaaaagtatcagacaatgtaagtgctatgagaatgcaaatgaggtgatgtgaattaaaataggatgacttaaagtctgcacgggaaggagcctacccccatgttcctggctagccaaggaaccaccagttgattagcagagaagggcagccagtctagctagagcttttggggaagagggagtggttgttaagagatgagattaaagaagccgagacgggccattcgtgaggggtttgtaatgcagggctgaggagtgtccgaagagaatgggcaggtgagcggtgagacagttgttcttccagaagctttgcagtgaaaggaatcaaagaaatggagccgtgtatcaggtggggaagggtgggggccaagggggtgtccttccccatacagagattgcaggctgagaatgactatatccttgttaacaggaggtgggagcagggcacggtagctcacacctgtaatcttggcactttaggaggctgaggcgggccgatcacctgaagtaaggagttcgagaccagcctggccaacatgcaaagccctgtctctactaaaaatacaaaaattagctgggtgtggtggtactcgcctgtaatcccagctactcgggagactgaggcaggagaatggcttgaacccggaaggtagaggttgcagtgagctgagatcatgccactgtgctccagcctaggtgacagagagagactccatctcaaaaaaaaaaaaaaaatacaggaagggagttgggaatagggtgcacatttaggaagtcttggggatttagtggtgggaaggttggaagtccctctctgattgtcttttcctcaaagaagtgcatggctggtgaggggtggggcaggagtgcttgggttgtggtgaaacattggaagagagaatgtgaagcagccattcttttcctgctccacaggaagccgagctgtctcagacactggcatggtgttgggggagggggttccttctctgcaggcccaggtgacccagggttggaagtgtctcatgctggatccccacttttcctcttgcagcagccagactgccttccgggtcactgccatggaggagccgcagtcagatcctagcgtcgagccccctctgagtcaggaaacattttcagacctatggaaactgtgagtggatccattggaagggcaggcccaccacccccaccccaaccccagccccctagcagagacctgtgggaagcgaaaattccatgggactgactttctgctcttgtctttcagacttcctgaaaacaacgttctggtaaggacaagggttgggctggggacctggagggctggggacctggagggctggggggctggggggctgaggacctggtcctctgactgctcttttcacccatctacagtcccccttgccgtcccaagcaatggatgatttgatgctgtccccggacgatattgaacaatggttcactgaagacccaggtccagatgaagctcccagaatgccagaggctgctccccccgtggcccctgcaccagcagctcctacaccggcggcccctgcaccagccccctcctggcccctgtcatcttctgtcccttcccagaaaacctaccagggcagctacggtttccgtctgggcttcttgcattctgggacagccaagtctgtgacttgcacggtcagttgccctgaggggctggcttccatgagacttcaatgcctggccgtatccccctgcatttcttttgtttggaactttgggattcctcttcaccctttggcttcctgtcagtgtttttttatagtttacccacttaatgtgtgatctctgactcctgtcccaaagttgaatattccccccttgaatttgggcttttatccatcccatcacaccctcagcatctctcctggggatgcagaacttttctttttcttcatccacgtgtattccttggcttttgaaaataagctcctgaccaggcttggtggctcacacctgcaatcccagcactctcaaagaggccaaggcaggcagatcacctgagcccaggagttcaagaccagcctgggtaacatgatgaaacctcgtctctacaaaaaaatacaaaaaattagccaggcatggtggtgcacacctatagtcccagccacttaggaggctgaggtgggaagatcacttgaggccaggagatggaggctgcagtgagctgtgatcacaccactgtgctccagcctgagtgacagagcaagaccctatctcaaaaaaaaaaaaaaaaaagaaaagctcctgaggtgtagacgccaactctctctagctcgctagtgggttgcaggaggtgcttacgcatgtttgtttctttgctgccgtcttccagttgctttatctgttcacttgtgccctgactttcaactctgtctccttcctcttcctacagtactcccctgccctcaacaagatgttttgccaactggccaagacctgccctgtgcagctgtgggttgattccacacccccgcccggcacccgcgtccgcgccatggccatctacaagcagtcacagcacatgacggaggttgtgaggcgctgcccccaccatgagcgctgctcagatagcgatggtgagcagctggggctggagagacgacagggctggttgcccagggtccccaggcctctgattcctcactgattgctcttaggtctggcccctcctcagcatcttatccgagtggaaggaaatttgcgtgtggagtatttggatgacagaaacacttttcgacatagtgtggtggtgccctatgagccgcctgaggtctggtttgcaactggggtctctgggaggaggggttaagggtggttgtcagtggccctccaggtgagcagtaggggggctttctcctgctgcttatttgacctccctataaccccatgagatgtgcaaagtaaatgggtttaactattgcacagttgaaaaaactgaagcttacagaggctaagggcctcccctgcttggctgggcgcagtggctcatgcctgtaatcccagcactttgggaggccaaggcaggcggatcacgaggttgggagatcgagaccatcctggctaacggtgaaaccccgtctctactgaaaaatacaaaaaaaaattagccgggcgtggtgctgggcacctgtagtc

SEQ ID NO: 2850 - DNA, 6000 bp, Homo sapiens
ggaggccgaggtgggtggatcacctgaggtcaggagttcaacaccagcctggccaacatggtgaaaccccatctctactaaaaatacaaaaattagccgggcgtagtggcgggcgcctgtaatcccagctacttgggaggcttaggcaggagaatcgcttgaacctgggaggcggaggttgtagtgagccgagattgcaccattgcactccagcctgggtgacaaaagcaaaaactccgtctcaaaaaaaaaagaattagccaggggtagtggtgaacgcctgtagtcccagctactcaggaggcagaggcaggagaatcacttgaacccaggaggcagaggttgcagtgagccgagattgtcccattgcactccagcctaggcgacaagagcaaaattccatgtcaaaaaaaaaaaaaaaaaaggaaagaaaaaaaataacgattagaaaggaagaaataaaacacattcacagccagtatgattctatacatacatgtcctaatggggccaggcgtggtggctcatgcctgtaatcctagcacttttaggaggctgaggcaggtggcttccctgggaccagcctggccaacatggtgaaaccccaactctaataaaaatacaaaaaatcagccaggcgtggtgacgggcacctctaatcccagctactcaggaggctgaggcaggagaattgcttggacctgggaggcagaggttgcagtgagccgagatcgcgctattgcactccagcctgggcaacaagagtgaaactccggcagggtgtggtggcttacgcctgtaatcccagcacttcgggaggctgaggcaggccgatcacctgaggtcaggagtttgagaccaacctaacatggtgaaaccccgtctctactaaaaatacaagaattagctgggtgtagtggtgggcgcctgtaatcccagctacttgggaggctgagacagaagaattgcttgaacccaggaggtggaggttgcagtgagctgagatcatgccattgcacaccacgccgggcaacagagcgagattccgtctcaaaaaaaaaaaaaaagagtgaaactctatctcaaaaaaaaaaaaaagtcctaatggaaaatccataaaaagctaccaaaactaataaataaatatagcagggttgcaggttacagggcaatatagttatccctctatctgtaggggcttggttctgggactcctcacacaccaaacccacagatgtctaagtcccatatataagacggtatagtatttggatttaacctacacatatcctcccatatagtttaaattatctctagattacttacattacccccatacaatgaaaatgctaatgtacatgcaagtatgtatgtaagtacttgtactatattgtttagggaatcactggacatataggccttcaagactgataccagcagccactgttaagattctggtcaggcctgcccctgtttggggtctcagttgatctcattgccttcccacccagccaagggcacctgcatttctcttggctccctggccatttggaaggcctagttcagcctggcacatttgtatcctggcccactgatgctggtacccctgggaaggtcctgctctgaaaaacacggagattttagttgctactgaagatttgagagataaagacagggagacctgtctgtagacctgtgtccctccaagtgggattgagactttgggccccccatttcaggacagcacctcctggcctgttgactgaatagatccctgaaggaggtgtacttgcattaatggagtgggggtgggagcagtaccacagatccgcactaacaatcacacagttctctctagaataataatatagaacaagtgaaatagaacaattgcagaaagagctaacctttgttgagctcttactgtgtgcccagcactttcctcaactctacatttcccataatacacagagtactaggtaggccaggcttggtggctcacgcctgtaatcccagcactttaggaggccaaggggggtggatcacctgaggtcgggagttcaagaccagcctgaccaacatggtgaaaccccgtctctactagaagtacaaaattagccaggtgtggtggcacatgcttgtagtcctagctactcagcaggctgaggcaggagaatcatttgaatccgggaggaggttgcagtaagcggagatagtgccactgtactccagcctgggcaataagagctgagactccgtctcaaaataaaataaaataaaataaaataaaataaaataaaataaaaaaagaaaagagcctgccattaaaggagctgtttggtaggggatgttttgtcagtgcaaacaacagaaaagtgggctgggcacagtggttcatgcctgtaatcccagcactttgggaggccaaggcgggcggatcacctgaagttgggagttcaagaccagcctgaccaatatggagaaaccccgtctctactaaaaatacaaaattagccgggcgcagtggcgcatgcctgtaatcccagctactcgggaggctgaggcaggagaatcgcttgaacctgggaggcagaggttgcggtgagccgagatcgcaccattgcactccagcctggacgagagcaaaactctgtctcaaaaaaaaaaaaaaacagaaaagtgtaacaaacacttacagtaggcatgtttcttagcaaatctgatgacaaatttggcataaagaaagagagcatccctgaaaaaaaaaaaaagaaaaagaaagagagcatcctgcctgggcaacatagtgaaaccctgcctctacaaaaaaactcaaaaattggccgggtgcagtggctcacacctgtaatcccagcactttgggagtcggaggcgggaggatcacctgaggtcaggagttcgaaaccagcctggccaacatggcaaaaccccatctctactaaaaatacaaaaaattaatcaggcgcattggtgggcgcctgtaatcccagctactcaggaagttgaggcaagaggatcgcttgaatctgggaggtggaggttacagtgagtcgagatcacaccactgcactctagcctgggtgacagggcgagactccgtctccaaaaaaaaaaagaaaaagaaaaagactaaaaaattagccaggcaggcctctgtggtcccagctacttgggaggctgaggcaggagaatcactgagcccaggagtccgaggctgtagtgagccatgattgcaccactgtaccctagcttgggcaacaaagcaagaccctgcctcaaaagaaaaaagaaagaaagaaagaacatggcgggccaggcacagtggctcacacctgtaatcccagcgctttgagaggccgaggcaggtggatcacaaggtcaggagttccacaccagcctggccaacatggtgaaaccctgtctctactaaaaatacaaaaaatcagccaggcatggtggcaggggcctgtaatcccagctactcgggaggctgaggcaggagaattgcttgaaaccagaaggcagaggttgcagtgagcctagactgcaccactgcactccagcctgggcgaaaagagccaaactccatctcaaaaaacaaacaaaaaaacaaaacaaaagaaaacatggcaaagcctttgaaagcttgtctgggagaaggtgcgatgatagttgcataacttcgtgcaagatgctggtccacacaggggctgccccttgctctttctcgctctcttaacctctcatataacaggcttgtgtgttattcacatttattgagcccaagcaggtgcaaggcattgtgatctaatactttggtcagcaagacaacaagatagatcactgccctgcccttaggaagtgtatatgctattagaggaaacagataaaataaacaaggaaaagtatcagacaatgtaagtgctatgagaatgcaaatgaggtgatgtgaattaaaataggatgacttaaagtctgcacgggaaggagcctacccccatgttcctggctagccaaggaaccaccagttgattagcagagaagggcagccagtctagctagagcttttggggaagagggagtggttgttaagagatgagattaaagaagccgagacgggccattcgtgaggggtttgtaatgcagggctgaggagtgtccgaagagaatgggcaggtgagcggtgagacagttgttcttccagaagctttgcagtgaaaggaatcaaagaaatggagccgtgtatcaggtggggaagggtgggggccaagggggtgtccttccccatacagagattgcaggctgagaatgactatatccttgttaacaggaggtgggagcagggcacggtagctcacacctgtaatcttggcactttaggaggctgaggcgggccgatcacctgaagtaaggagttcgagaccagcctggccaacatgcaaagccctgtctctactaaaaatacaaaaattagctgggtgtggtggtactcgcctgtaatcccagctactcgggagactgaggcaggagaatggcttgaacccggaaggtagaggttgcagtgagctgagatcatgccactgtgctccagcctaggtgacagagagagactccatctcaaaaaaaaaaaaaaaatacaggaagggagttgggaatagggtgcacatttaggaagtcttggggatttagtggtgggaaggttggaagtccctctctgattgtcttttcctcaaagaagtgcatggctggtgaggggtggggcaggagtgcttgggttgtggtgaaacattggaagagagaatgtgaagcagccattcttttcctgctccacaggaagccgagctgtctcagacactggcatggtgttgggggagggggttccttctctgcaggcccaggtgacccagggttggaagtgtctcatgctggatccccacttttcctcttgcagcagccagactgccttccgggtcactgccatggaggagccgcagtcagatcctagcgtcgagccccctctgagtcaggaaacattttcagacctatggaaactgtgagtggatccattggaagggcaggcccaccacccccaccccaaccccagccccctagcagagacctgtgggaagcgaaaattccatgggactgactttctgctcttgtctttcagacttcctgaaaacaacgttctggtaaggacaagggttgggctggggacctggagggctggggacctggagggctggggggctggggggctgaggacctggtcctctgactgctcttttcacccatctacagtcccccttgccgtcccaagcaatggatgatttgatgctgtccccggacgatattgaacaatggttcactgaagacccaggtccagatgaagctcccagaatgccagaggctgctccccccgtggcccctgcaccagcagctcctacaccggcggcccctgcaccagccccctcctggcccctgtcatcttctgtcccttcccagaaaacctaccagggcagctacggtttccgtctgggcttcttgcattctgggacagccaagtctgtgacttgcacggtcagttgccctgaggggctggcttccatgagacttcaatgcctggccgtatccccctgcatttcttttgtttggaactttgggattcctcttcaccctttggcttcctgtcagtgtttttttatagtttacccacttaatgtgtgatctctgactcctgtcccaaagttgaatattccccccttgaatttgggcttttatccatcccatcacaccctcagcatctctcctggggatgcagaacttttctttttcttcatccacgtgtattccttggcttttgaaaataagctcctgaccaggcttggtggctcacacctgcaatcccagcactctcaaagaggccaaggcaggcagatcacctgagcccaggagttcaagaccagcctgggtaacatg

SEQ ID NO: 2851 - DNA, 6000 bp, Homo sapiens
accatctttgtcaggctggtctccaactccagacctcaggtgatctgcccacctcggcctcccaaagtgctgggattataggcgtgagacatcgggccactaatcattatttctttttctttttttttttttgagacacagtcttgctctgtcgcccaggctggagtgcagtggctcgatctcagctcactgcaagctccgccccctgagttcacgccattctcctgcctcagcctcccgagtagctgggactacaggcgcccgccactacgcccggctaattttttgtatatttagtagagacagggtttcaccgtgttagccaggatggtctcgatctcctgacctcgtgatccacccgtctcggcttcccaaagtgctgggattacaggcctgagccaccgcacccggccctcattatttctttttcttgcctggttaaaacctccagtatggtatcaacgttgtgagagtcaaatccttttctagttcctgatcttagaggaaaaagcgttgagttttcttttcttttttttttttttttttttttgagacgaagtctcactctgtcacccaggctggagtgcagtggcacgatctaggctctgcaagctccgcctcccgggttcacgccattctctcgcctcagcctcccgagtagctgggactataggcgcccgccaccatgcccggctaattttttgtttttgtatttttagtagagacggggtttcagcatgctagtcaggacagtctcgatctcctgacctcgtgatccgcccgcctaggcctcccaaagtgctggcattacaggcgtgagccaccgcgcccggcagcactgagttttctaccattatgtatgctgctagtggaactccgactgtggacgccctgttatcaaactaggttaagtttcctttccctagtttgctaggaggttggttggtttgtaatcatgcatatgtgttgaatatcattaactgcttttgctacatctgttgaaatgatcatagggtttttatgtttccctttgttaatgtggtgaattacacagactgatttttttccccccagtaaagaccagtctgactatgttgcccaggctggtcttgaaatcctgggctcaagagatcttcctgcctcagcctcctaaaatgttgggattacaggcctgagctactgcaccaggccaatttttgaatgttgaatcagctacaatcatgagataaacattatttggttagaatgtatttatcctttttctttttctttttttgagatggagtctcactctgttgcccaggctggagtgcaatggtgtgatcccagctcagtgcaacttctgcctcctgggttcaagcgattctcctgcctcagactcccgagtagctgggatttcaggtgcccaccaccatgcccagctaatttttttttttttttgagatgaagtcttgctctgtcgcccaggctggagtgcagtggcacgatcttggctcactgcaacctctgcctcccgggttcaagcaattctgcctcagcctcctgagtagctgggattacaggcaggtgccaccacaccggctgatttttgtatttttagtagagatggcgtttcaccacattggtcaggctggtcttgaactcctgacctcgtgatctgcccacctcggcctcccaaagtgctgggattacaggcgtgagccaccgtgcccagcctgatttttgtatttttattagaaacggggtttcaccatgttggtcaggctggtctcaaactcctgacctcaagtgatctgcctgcctcagcctcccaaagtgctgggattacaggcgtgagccaccgcgactggcctatttatccttttttctatattaccaggtttggtttgctaaaattggttagctgttgcatgtctatgctaacaggaatattggtctatattttcttttcttataatgtccttgtttggttttggtaccaggattatgctggcttcgaaaacaagttgggaaatattcctctattttttctttctttctttttttttctgagacagggtctcactctgttgcccaggctggagtgcagtggcgcaatctcggctcactgcaacctccgcttcccaggttcaagggattcttgtgcctcagcctcctgagtaactggcattacaggtatgtgtcaccacgcctagctactttttgtatttttagtagagatggggtttcgccgtgttggccaggctggtctcgaactcccgacctcaaatgatcccctgcctcagcgtaccaaagtgctgagattacaggtatgagccaccgcgcccagtctgttcctctgttttctgaagagtttgtgtaagatgggtactgtttcttcctccaacgtttaaagagagcagagaacagaggagataaatagaaaatagcactaagaggtcaggcatggtggctcacacctgtaatcccagcactttgggaggccgagatgggatgaaagcttgaggccagcagtttgagaccagcctgggcaacatagtgagatcctgtcaatacaaaaaaataaaatagttagctgggtgtggtggagtaatcccagctactcgtgaggctgctagaggactgcttgagcccaggggttcgaggctgcagtaagccttgattgtgccattgtactctagcctgggcaacagtgtgagtccctgtctcaaaaattaacaaagaaaaaaagaaaatagcactaaaatggtagccctatactccaactgtaaaataattaaaattaaaagcattcagtagagaaaggaagcctatttcaacaagtggagacagaataactggatttccatacaggaaagataccagagactgactcctacacctcacaccataaacaattaattttaagaattaattaatggctcaaggaccttactgtaaaacttacaaccataaaggtcctaaaagaaaatgtaagataatatcttcatgaccctggggttaaaaaaaaaaaaaaagatgtcctaaacaggacaaggcaaatactgaacataaaaaagataaatccactcctcttaagatactgtaaactctgtaaagcaaacaaataggcaagcaacagatcagaagaaaacattcacgacacatggatctgataaaggacttgtatccagaatgtataaagcagtcccacaactgaacaataaaaacaaacaaaaaaccaaaataacaggtaaaagactcgaagagctactttacaaacaaaatacgaatggccaataggcacatgaaaaaatgctgaacatccttagtcaatagagaactgtaaattacaaccacaaggatataccacattagaaagactgacaatacctaatgtccggaaggctgtggcacaaccataataactcccataccttgctagttggagtgtaaaatggtacaaccgctctggaaaactcagagcttctgaaaaagttcaaaatacagctactttttacttccaaactcgcaattcccctcctaagtatttctccaagaaacacgaaaacatatgatcacaaaaagaattgtacaagaatgtttatagcagctttatttcataaccgcaaatgggaaacaactcaaaaggccatcaaaaggacggatatacaatcgatggactatactaaatgaaaaggagcaaaatactgatatatacaacatgaacgaatgtcagacagtacattgaaggacagaagcccgacaaaaatgagcacataatgtatgattccccccttttttttgagacggagtttcgttcttgtcgcccaggctggagtgtagtggcacgatcttggctcactgcaacctctgcctcccgggttcaagcgattctcctgcctcaccctcccgaatagctgggattacaggcacccaccacgcccagctaatttttgtattttttagtagagacggggattcaccacgttggccacgctggtctggaactcctatcctcaagtaatccgcccgcctcggcctcccaaagtgcaggcgtgagccacagcgcccagcctgattccattctatatgaagttctccaacaggcaaaatggttatggagatcaaaataaaggtggggtcgggaatcgactgggaagagacgtgatgaaacgtttctgggacgatgaaaagggtctgtgacttggtaggcatcacggagcggttaggggccaaaactcatcttcctgtgcacttgctgtgtgcactggcgctgtgtgtaaatgccacctcgatttaggaaaaagatgacgtaagtacggcacaaagtggccggtacgcggcaggtgcatgggaagaaactgcggaatgaaacaaccgcgagctaagagatggggcagcgggagaaatgaattcgagttccgcctcctaccaggaagaaccggctcgggccggagggctgcacggaggaccacacggacgcctgcgggcccgccccttccgcttcacgacgttcagcctgcgtctggaactggaatggcctagcccaaagctagataacaggtagattgtttttccgacaaattatcaaacgacccatcattgcactctttcaaaatttgattctcagacgtacccattctttttttttttcctccgggaagatgagatatactcattcttgaaaatacctccgggcttgccttctgcacacttctttccctccctgtctcacgccatggtagcgtccgcctaggttgcaggcgacccgcggggtggggcacaccattcaaagaaggggagggattgaggtttgcatcaaaacaaatacccctgcctttgcaaaggccataactaagtaatccagaaaaagaaatgcaggcggagaatagcagcctccctctgccaagtaagaggaaccggcctaaaggacattttctctctctctcctcccctctcatcgggtgaatagtgagctgctccggcaaaaagaaaccggaaatgctgctgcaagaggcagaaatgtaaatgtggagccaaacaataacagggctgccgggcctctcagattgcgacggtcctcctcggcctggcgggcaaacccctggtttagcacttctcacttccacgactgacagccttcaattggattttctccatctagcggagccgggggctgcctggaaagatcgctccaggaaggacaaaggtccggaagttgtgggaccttagcagcttgggctccccggatcacccccaaatgatcatttcggaatggagccccagttttcactaggatgccatgggctctaaaatatacagctatgagttctcaatgtttcgagatccaaaagtctcagacctcaatgctttgtgcatcttttatttcagggattccctacgcccagcaccgggtggatgtgcaaagaagtacgctttaggccggctcaaggttccccaaagctccactcctctgcctaggcgttcaactttgagttcggatggtcctaacatccccatcatctacacccaggtctcccaacaatgcaactcctatgatgatccctctagccaagcttccatcccactcacccccaaactcgctaagtccccactgccccacccccagccccagcgattttcccgagctgaaaatacacggagccgagagcccgtgactcagagaggactcatcaagttcagtcaggagcttacccaatccagggaagcgtgtcaccgtcgtggaaagcacgctcccagcccgaacgcaaagtgtccccggagcccagcagctacctgctccctggacggtggctctagacttttgagaagctcaaaacttttagcgccagtcttgagcacatgggaggggaaaaccccaatcccatcaacccctgcgaggctcctggcacaaagctggacagtcgccatgacaagtaagggcaagtaatccgcctgccggaggaagcaaaggaaatggagttggggaggagggtgcagagtcaggattctcgccga

SEQ ID NO: 2852 - DNA, 6000 bp, Homo sapiens
agatggggtttcatcatgttggccaggctggtctcgaactcctgacctcaggtgatccacctgcctcagcctcccaaagtgctgggattacaggagtcagccaccgcacccagccccaactaatttttgtatttgagtagagacagggttttaccatgttggccaggctggtctaaaactcttcacctcaggtgatccacccatctcagcctcccaaagtgttgggattacaggcgtgagccaccgtgcctggccctggatttcactcttgcccacccataaaccattcactcttctgttttaaaactctcttggccgggcgcagtggctcatgcctgtaatcccagcactttgggaggccaaggtgggcagatcacaaggtcaggagttcgagaccagcctggccaatatgatgaaccccccatctctactaaaaaaatacaaaaaaattagccgggtgtggtggcacatgcctgtaatcccagctactcggaaggttgaggcaggagaatcacttaaacctgggaggcggaggttgcggtgagctgagatggtgccactgcactccagcctggacaacagagcaagactctgtctcaaacaaacaaacaaaaaaaacctctctcatggcctggcatggtggctcacgcctgtaatcctagcactttggaaggctgaggcaggtggatcacctgaggtcaggagtttgagaccagccaggccaacgtggcaaaacctgtctctactaaaaatacaaaaattaagccaggcgcggtggctcatgcctataatcccagcactttgggaggccgagaccggcggatcaaatgtcaggagtacgagaccatcctggccaatatggtaaaaccccgtctctatttaaaaaaatacaaaaattagctgggcatggtggcgggtgcctgtaatcccagctactcgggaggctgaggcaggagaatcgcttgaatccaggaggcagaggttgcagtgagccgagatcacgccattgcactccagcctgggcgacagagcaagactcgtctcaaaaaaaaaaaaaaaacacctctctcatgacttcccaaataaactccaaatgccttacccataagaaccaacacgacgtggctgctcttctctgtcctcacccctctgtccccctcacttgcctcagtctggctataccagcattctgggttttttgttttgtgtttgtttgtttgtttgtttgtttgtttgtttgttttgggatggagtctcactctgtcacccaggctggagtgcagtgacatgatcttggctcactgcaacctccatctcctgggttcaaatgattcttctgcttcagcctctcaagtagctgggattacaggcacccaccatcacacccagctaatttttgtatttttgtagagatgaggttttgccatgttggccaggctggtctcaaactcttgacctcaggtgatctgcccacctcagcctcccaaagtgctgggattacaggtgtgagccactgagcccagtctgttttgttgttttttgagatggagtctcactctgtcgcccaggctggagtgcagtggtacaattttgtctgactgcagcctccacctcctgagtttaagagattctcctgcctcagccacacaagtagctgggattacaggcgcgtgccaccacatgcgtctaattttggtatttttagtagcgatggggttttgccatattggccaggctggtctcgaactcctggcctcaagtgatctgcacacctcggcctcctgagtagctgggattacaggcgtgagccaccatgcagggcctttctggtcttttaacgcacaaagctatttcccagttctgggtgtttatagtatcattgccagttcctggaaagctctttccagaagccttcacatgactgatcccttatcctccttcaggtcttagctcaaatgcctccttttcagagagctccttcctgaccattttatgcaatgtgctttcctctagttagtctctcttcattctgtgtatttccttcagagcatttatcatcatcttggtcctgatgcttgctggtttacatgtttgttgtctgtctcccacacagaaagcaaaccagcccttcatctgtcttgtccaccactttatcccagcacagtgactaacatatatcagtagtcaatcaataaatagctataagccaggcacggtgactcacacctgtgatccccgcactttgggaggccaaggtgggcggatcctctgaggtcaggaatttgatatcagcctgcccaacatggcgaaaccccgtctctactaaaactataaaaattagtcgagtgtgatggcgtgcgcctgtaataccagctacttgtgaggctgaggcaggagaatcgcttgaacccgggaggcagaggttgcagtgagccgagatcacaccacagcactccagcctgggtgacagagcaagaccttgtctcaaaaaaataagaaatagaaatatatatatgctgccacaagaaattcactactttttagcaaaaaacacagattcctaattaaagaaaggggaaacctctctctaaataacttcagaattcggggcagaaaacgctacatgtggaaactcgtcttgaaaaacagtcccgtttgtgaacaggaaacacttggactacactttttccatctccacgaaggacttaaatgtgcagcattgatgaagaggcagttagccccagtccttaccatttctgcatattccacctgctccccctcatggtacagctctgggggcaggttataaattcgcaagatgttatcagcactattggtcaagatgcaggaaccgtcaggagccctagaaacaggggagagttagaaagctggccagacctatgcttttcaagtgtagggctagggctgagcctgcctctggggtaggtaagcccccctgaatccttgagggaagtagaagacacaaactgctagataaaatgtaagctcagtctaaaagggctacgtgccgcttctcccagctctggggcatccctctcctagaaaactggactgttttacagtgaaaatctcgggggtggtcagctccctgccccgttgttatccttaccacttacagcctttcaagaagttctcaggttgggtgctgaactctgaccaggaaccactgagaaatcgaggcagctgggagaagctgtagttccaagcgctgaaaggaagatgggggacaataaacctgggtcgccaagcaaagggggcagaggcctggagaagtgggtctcaggaccagaggacagatcgacctcacacttcatctccccagactccacactccactgccatcaccacttacgtgtctccctcgtcctctgcagcgggttccccagaggtatcttccatggcttttccagaccccaactctggcccgttcgcttcttcttcagaaaggctcccgtttgcttcttctgcaggaaggcttgtattttcagaaagttcttgctcctcgattcgaggactcaactcactaggggaaccaaactctgtttccaggggagtggagagagaaactgggtccccctcccgtagctcctgggacacagctgagccagccacaggatctggggacaaccggggcggatcccccctttcgggaggcggtggcatcagttcagagtccgcatttttattcatcggggaagcgtggggagaaggatgggctggagctgggtcctggtctgaaggacagcagtccggagctaacggttgagtctccaaagtcttcatactgcagaggaagcacagcggagattagcctcagccaggatggcttcgaagttctcagggatccgacgcagagctaaagaaacccacctgtgcttccctcctcttctgggagtaggcagaagactcccgggaggagaggcgaacagcggacgccaattcttttgaaagcactgtgttccttagcaccgcgggtcgctacgggcctcttgctgtcgcgggatttcggtccaccttccgattgggccgccgcatcccggatcagatttcgcgggcgacccacggaacccgcggagccgggacgtgaaaggttagaaggtttcccgttcccatcaagccctagggctcctcgtggctgctgggagttgtagtctgaacgcttctatcttggcgagaagcgcctacgctccccctaccgagtcccgcggtaattcttaaagcacctgcaccgcccccccgccgcctgcagagggcgcagcaggtcttgcacctcttctgcatctcattctccaggcttcagacctgtctccctcattcaaaaaatatttattatcgagctcttacttgctacccagcactgatataggcactcaggaatacaacaatgaataagatagtagaaaaattctatatcctcataaggcttacgtttccatgtactgaaagcaatgaacaaataaatcttatcagagtgataagggttgtgaaggagattaaataagatggtgtgatataaagtatctgggagaaaacgttagggtgtgatattacggaaagccttcctaaaaaatgacattttaactgatgagaagaaaggatccagctgagagcaaacgcaaaagctttcttccttccacccttcatatttgacacaatgcaggattcctccaaaatgatttccaccaattctgccctcacagctctggcttgcagaattttccaccccaaaatgttagtatctacggcaccaggtcggcgagaatcctgactctgcaccctcctccccaactccatttcctttgcttcctccggcaggcggattacttgcccttacttgtcatggcgactgtccagctttgtgccaggagcctcgcaggggttgatgggattggggttttcccctcccatgtgctcaagactggcgctaaaagttttgagcttctcaaaagtctagagccaccgtccagggagcaggtagctgctgggctccggggacactttgcgttcgggctgggagcgtgctttccacgacggtgacacgcttccctggattgggtaagctcctgactgaacttgatgagtcctctctgagtcacgggctctcggctccgtgtattttcagctcgggaaaatcgctggggctgggggtggggcagtggggacttagcgagtttgggggtgagtgggatggaagcttggctagagggatcatcataggagttgcattgttgggagacctgggtgtagatgatggggatgttaggaccatccgaactcaaagttgaacgcctaggcagaggagtggagctttggggaaccttgagccggcctaaagcgtacttctttgcacatccacccggtgctgggcgtagggaatccctgaaataaaagatgcacaaagcattgaggtctgagacttttggatctcgaaacattgagaactcatagctgtatattttagagcccatggcatcctagtgaaaactggggctccattccgaaatgatcatttgggggtgatccggggagcccaagctgctaaggtcccacaacttccggacctttgtccttcctggagcgatctttccaggcagcccccggctccgctagatggagaaaatccaattgaaggctgtcagtcgtggaagtgagaagtgctaaaccaggggtttgcccgccaggccgaggaggaccgtcgcaatctgagaggcccggcagccctgttattgtttggctccacatttacatttctgcctcttgcagcagcatttccggtttctttttgccggagcagctcactattcacccgatgagaggggaggagagagagagaaaatgtcctttaggccggttcctcttacttggcagagggaggctgctattctccgcctgcatttctttttctggattacttagttatggcctttgcaaaggcaggggtatttgttttgatgcaaacctcaatccctccccttcttt

SEQ ID NO: 2853 - DNA, 6000 bp, Homo sapiens
ccctagtttgctaggaggttggttggtttgtaatcatgcatatgtgttgaatatcattaactgcttttgctacatctgttgaaatgatcatagggtttttatgtttccctttgttaatgtggtgaattacacagactgatttttttccccccagtaaagaccagtctgactatgttgcccaggctggtcttgaaatcctgggctcaagagatcttcctgcctcagcctcctaaaatgttgggattacaggcctgagctactgcaccaggccaatttttgaatgttgaatcagctacaatcatgagataaacattatttggttagaatgtatttatcctttttctttttctttttttgagatggagtctcactctgttgcccaggctggagtgcaatggtgtgatcccagctcagtgcaacttctgcctcctgggttcaagcgattctcctgcctcagactcccgagtagctgggatttcaggtgcccaccaccatgcccagctaatttttttttttttttgagatgaagtcttgctctgtcgcccaggctggagtgcagtggcacgatcttggctcactgcaacctctgcctcccgggttcaagcaattctgcctcagcctcctgagtagctgggattacaggcaggtgccaccacaccggctgatttttgtatttttagtagagatggcgtttcaccacattggtcaggctggtcttgaactcctgacctcgtgatctgcccacctcggcctcccaaagtgctgggattacaggcgtgagccaccgtgcccagcctgatttttgtatttttattagaaacggggtttcaccatgttggtcaggctggtctcaaactcctgacctcaagtgatctgcctgcctcagcctcccaaagtgctgggattacaggcgtgagccaccgcgactggcctatttatccttttttctatattaccaggtttggtttgctaaaattggttagctgttgcatgtctatgctaacaggaatattggtctatattttcttttcttataatgtccttgtttggttttggtaccaggattatgctggcttcgaaaacaagttgggaaatattcctctattttttctttctttctttttttttctgagacagggtctcactctgttgcccaggctggagtgcagtggcgcaatctcggctcactgcaacctccgcttcccaggttcaagggattcttgtgcctcagcctcctgagtaactggcattacaggtatgtgtcaccacgcctagctactttttgtatttttagtagagatggggtttcgccgtgttggccaggctggtctcgaactcccgacctcaaatgatcccctgcctcagcgtaccaaagtgctgagattacaggtatgagccaccgcgcccagtctgttcctctgttttctgaagagtttgtgtaagatgggtactgtttcttcctccaacgtttaaagagagcagagaacagaggagataaatagaaaatagcactaagaggtcaggcatggtggctcacacctgtaatcccagcactttgggaggccgagatgggatgaaagcttgaggccagcagtttgagaccagcctgggcaacatagtgagatcctgtcaatacaaaaaaataaaatagttagctgggtgtggtggagtaatcccagctactcgtgaggctgctagaggactgcttgagcccaggggttcgaggctgcagtaagccttgattgtgccattgtactctagcctgggcaacagtgtgagtccctgtctcaaaaattaacaaagaaaaaaagaaaatagcactaaaatggtagccctatactccaactgtaaaataattaaaattaaaagcattcagtagagaaaggaagcctatttcaacaagtggagacagaataactggatttccatacaggaaagataccagagactgactcctacacctcacaccataaacaattaattttaagaattaattaatggctcaaggaccttactgtaaaacttacaaccataaaggtcctaaaagaaaatgtaagataatatcttcatgaccctggggttaaaaaaaaaaaaaaagatgtcctaaacaggacaaggcaaatactgaacataaaaaagataaatccactcctcttaagatactgtaaactctgtaaagcaaacaaataggcaagcaacagatcagaagaaaacattcacgacacatggatctgataaaggacttgtatccagaatgtataaagcagtcccacaactgaacaataaaaacaaacaaaaaaccaaaataacaggtaaaagactcgaagagctactttacaaacaaaatacgaatggccaataggcacatgaaaaaatgctgaacatccttagtcaatagagaactgtaaattacaaccacaaggatataccacattagaaagactgacaatacctaatgtccggaaggctgtggcacaaccataataactcccataccttgctagttggagtgtaaaatggtacaaccgctctggaaaactcagagcttctgaaaaagttcaaaatacagctactttttacttccaaactcgcaattcccctcctaagtatttctccaagaaacacgaaaacatatgatcacaaaaagaattgtacaagaatgtttatagcagctttatttcataaccgcaaatgggaaacaactcaaaaggccatcaaaaggacggatatacaatcgatggactatactaaatgaaaaggagcaaaatactgatatatacaacatgaacgaatgtcagacagtacattgaaggacagaagcccgacaaaaatgagcacataatgtatgattccccccttttttttgagacggagtttcgttcttgtcgcccaggctggagtgtagtggcacgatcttggctcactgcaacctctgcctcccgggttcaagcgattctcctgcctcaccctcccgaatagctgggattacaggcacccaccacgcccagctaatttttgtattttttagtagagacggggattcaccacgttggccacgctggtctggaactcctatcctcaagtaatccgcccgcctcggcctcccaaagtgcaggcgtgagccacagcgcccagcctgattccattctatatgaagttctccaacaggcaaaatggttatggagatcaaaataaaggtggggtcgggaatcgactgggaagagacgtgatgaaacgtttctgggacgatgaaaagggtctgtgacttggtaggcatcacggagcggttaggggccaaaactcatcttcctgtgcacttgctgtgtgcactggcgctgtgtgtaaatgccacctcgatttaggaaaaagatgacgtaagtacggcacaaagtggccggtacgcggcaggtgcatgggaagaaactgcggaatgaaacaaccgcgagctaagagatggggcagcgggagaaatgaattcgagttccgcctcctaccaggaagaaccggctcgggccggagggctgcacggaggaccacacggacgcctgcgggcccgccccttccgcttcacgacgttcagcctgcgtctggaactggaatggcctagcccaaagctagataacaggtagattgtttttccgacaaattatcaaacgacccatcattgcactctttcaaaatttgattctcagacgtacccattctttttttttttcctccgggaagatgagatatactcattcttgaaaatacctccgggcttgccttctgcacacttctttccctccctgtctcacgccatggtagcgtccgcctaggttgcaggcgacccgcggggtggggcacaccattcaaagaaggggagggattgaggtttgcatcaaaacaaatacccctgcctttgcaaaggccataactaagtaatccagaaaaagaaatgcaggcggagaatagcagcctccctctgccaagtaagaggaaccggcctaaaggacattttctctctctctcctcccctctcatcgggtgaatagtgagctgctccggcaaaaagaaaccggaaatgctgctgcaagaggcagaaatgtaaatgtggagccaaacaataacagggctgccgggcctctcagattgcgacggtcctcctcggcctggcgggcaaacccctggtttagcacttctcacttccacgactgacagccttcaattggattttctccatctagcggagccgggggctgcctggaaagatcgctccaggaaggacaaaggtccggaagttgtgggaccttagcagcttgggctccccggatcacccccaaatgatcatttcggaatggagccccagttttcactaggatgccatgggctctaaaatatacagctatgagttctcaatgtttcgagatccaaaagtctcagacctcaatgctttgtgcatcttttatttcagggattccctacgcccagcaccgggtggatgtgcaaagaagtacgctttaggccggctcaaggttccccaaagctccactcctctgcctaggcgttcaactttgagttcggatggtcctaacatccccatcatctacacccaggtctcccaacaatgcaactcctatgatgatccctctagccaagcttccatcccactcacccccaaactcgctaagtccccactgccccacccccagccccagcgattttcccgagctgaaaatacacggagccgagagcccgtgactcagagaggactcatcaagttcagtcaggagcttacccaatccagggaagcgtgtcaccgtcgtggaaagcacgctcccagcccgaacgcaaagtgtccccggagcccagcagctacctgctccctggacggtggctctagacttttgagaagctcaaaacttttagcgccagtcttgagcacatgggaggggaaaaccccaatcccatcaacccctgcgaggctcctggcacaaagctggacagtcgccatgacaagtaagggcaagtaatccgcctgccggaggaagcaaaggaaatggagttggggaggagggtgcagagtcaggattctcgccgacctggtgccgtagatactaacattttggggtggaaaattctgcaagccagagctgtgagggcagaattggtggaaatcattttggaggaatcctgcattgtgtcaaatatgaagggtggaaggaagaaagcttttgcgtttgctctcagctggatcctttcttctcatcagttaaaatgtcattttttaggaaggctttccgtaatatcacaccctaacgttttctcccagatactttatatcacaccatcttatttaatctccttcacaacccttatcactctgataagatttatttgttcattgctttcagtacatggaaacgtaagccttatgaggatatagaatttttctactatcttattcattgttgtattcctgagtgcctatatcagtgctgggtagcaagtaagagctcgataataaatattttttgaatgagggagacaggtctgaagcctggagaatgagatgcagaagaggtgcaagacctgctgcgccctctgcaggcggcgggggggcggtgcaggtgctttaagaattaccgcgggactcggtagggggagcgtaggcgcttctcgccaagatagaagcgttcagactacaactcccagcagccacgaggagccctagggcttgatgggaacgggaaaccttctaacctttcacgtcccggctccgcgggttccgtgggtcgcccgcgaaatctgatccgggatgcggcggcccaatcggaaggtggaccgaaatcccgcgacagcaagaggcccgtagcgacccgcggtgctaaggaacacagtgctttcaaaagaattggcgtccgctgttcgcctctcctcccgggagtcttctgcctactcccagaagaggagggaagcacaggtgggtttctttagctctgcgtcggatccctgagaact

SEQ ID NO: 2854 - DNA, 6000 bp, Homo sapiens
ccaagagttatttttatcctcatttcaccaccaacccaaaaatgaaatacttaagcataaatctaatacaatatgtacaagaggtgtatgaggaaaactacaaaactctaataaaagaaatcaaagacaaactaatcaataaatattccatcttcatggatacaaatactcaatattgtcaagatgtcagttctttccaatgtaatctgtatattcaatacaatcccaatcaaaattccagtaacttagtttgtggatattggctttagaaactgattctaaagtttatgtgaaaaagcaaaagattcagaatagccaacacaatattggaggaagagaacaaagttggaggactgacattatctaagttgagacttgctataaagctacaggaatcaagacagtgtggtactggtcaaagaacacacaaatagaccaatggaccagaatacacagcccacagacagattcacataaatatagtcaatgatctttgacaaatgaccaaaagcaatacaaatgagaaaacagtcttttcagaaatggtgttagatcaacaagggatccatatggcaaaaattgaatctagatagatcttacacccttcacagaaataaactcaaaattgatccgggacctaaatgtaaaactatccccatttcacggtgaaaactgagacccggaaagttaagaaaatagatgaaagttacagacagctggtagtggaacataattcaaacctgtctgtgcaaatccaaagccctgctcttcctaccacactttgcctcattctccttggtagagtagttcccacttttcttttttttttttgagacagagtctcgctctgtctcccaggctggagtgcagtggcgcgatctcggctcattgcaacctctgcctcccaggtacaagcgattcttctgcctcagcctcctgagtagctaggattacaggtgcacgccaccacctggctgatttttgtatttttagtagagatgggctttcaccatgttggtcagactggtctcaaactcctgaccttgtgatccgcccatctcggcctcccaaagtgctgggattacaggcgtgagccaccacacccagccagttcccacttttctaaagaagtgcaactgccggctttcgtacctagttccatttcttgtgtacctagttctatttcacagcaggggacctgaatcagagagaatcagggggttcagggagctctcatcaagcaaaaatcatttacagcctaagtctttgcaagtttatatcaaatattgttatgatataataaacatccttctaagggatcttatcacttccagagttttattcattcattccattcactcatgagtttcattcattattcacagatatttgttgagtatctactatgtgcccagcactgttctaggcactgagcatatagcacagatgccaccctctacatgtaggtttgaaatctaaggcagtgtactctaacagaaatgtagtgtaagccaaacgtgcagttttatattttctagtcaccacattttcaaaaaagtaaaaataaacaggtgagatgaactttactatattttatttgacataacatatccaaaaaaatcatttcaataaataattaacataaagataggatagtcgtgagttgtttaacaacaggataccttctgagaaatgcatcgtaaagtgattttgtgatgggaatatcatagtgtacttacaaaacctaaatgatatggctgactatatacctaagctatatggtataggctattgctcctaggctataaacccatacagcatgtactatactgaatactgtaggaaactataacacaatggtaagtatttgtgtctctaaacataggcaaagcacagcacacacacacacacacacacacacacacacacacacacacacacacacaaaggtataaaagaaaatggtccaaggtgggtggatcacctgaggttgggagtttgagaccagcctgaccaacatggagaaaccccgtctctactaacaatataaaaaaattatccaggcgtggtggtgggcacctgtcatcccagctacttgtgaggctgaggcaggaggatcacttgaacctgggaggcagaggatgcagtggactgagattgtgccattgcactccagcctgggtgacaagagcgaaactccatctcaaaaaaataaattaataaaaccacacacataaacagcacagttgtataaaaatatttttctttttttaaataaatatttttatttcttataaatatgttgcctaggctggttttgaactccttctgcctcagcctcccaaagtgctaggattagagatgtgagccactgtgcccagccaatatttttgctttatatccttattctataagctttttcctattaaaaaaaattccttttacttttaaaacttttttgttaacaagacagaaacacacacattagcctagtaagcctacagagggtcaggatcatcaatatcaccatcctccacctctacatcttgtcctactggaaggccttcaggggcaatgtcacacgtggagctgtcatctcctctgataacaatgccttcttctggaatacctcctaaaggacctacctgatgctgttttacagttagctttttttttttcaataagtagtagtatactctaaaataacaataaggctgggcatagtgtttcatgcctgtcatctcagcactttgggaggccgaggcaggcggatcacttgaggtcaagagtttgagaccagcctggccaacatcgtgaaaccccgtctctactaaaaatacaaaaattagccaggcgtggtggcgggtgcctgtaattccagctactcaggaggctgagggaggagaattgcttgaacctaggaggcagaggttgcagtgagccaaaatcctgccactgcactccagcctgggcgacaagaacaaaactctgtcgcaaaaaaaaaaaaaaaaaattattagcccattgtggtggcaagggcctgtaatcccagctacttgggaggctgaggcaggagaatcacttgaacctgggaggcagaggttgcagtgagccaagatcgtggcactgcactccagcctgggcgacacagcgagactctgtctcaaaaataactaaattaattaatttaatttaatgacaataaaaggtatagtatactaaatatataaaccagcaacatcgtcctttattatcattataaagttttatatactgtacataatagtgtgtgctatgcttttatacaactggcaatggagtaggttcgtttccaccagcatctccacaaacacatgagtaatgtgctgtcactatatgatagggatttttcagctccattataatcttatgggaccaccctcatatatttggtccattgttggcctaaatgtcattatgtggtacatattattaatgagatattttactttttttagtatgaattttttggtgtgtattttcttcacttatagcacatctcaattccatgcaacattcaagtgctcaatagtcacgtgtggctagtgattacagcattggaaaaagacagatacggttgaggaaacttaaaaaaatgtagcaaatgtagttgtagagacgtgctcaagatcactcaattatcatagctaggacgtgagtctccagcgaccttccaattgcctggttgaaccaaagccctggttcattctgctgcgcattaaaagcaggctttactcccctccaaacagtagaatcgcagttaaacttagtcaaacaaacttaatgtatccaatacaaaactcatctttctaaccctaacacctcctcttcctctctattttctatttcagttgatggtaccattatgtttctgctcactcaaattattattattttatccataaacgagcactttatctagaagatcatttaaattctaaatgatcttcaaaaacgcactttactctccaccctaactagctgaatcatctcccacatgggtcactatgagagccttctgatttgttcccttgcctcagtctctccccacccagcttcagcagtattccctaagactcttcatggctctccgtcctctacagagtaaagacgacactcttcatcacacagcacagaattctctcgggaacctgttctttgcttacctaacaaggcccagttgtttgctcttcctagactctgaagaggtcacttaccctcaggctgctacatttgtaaaaatcgccatcccaactctcaaagagctggcttcagatttgagataatacactttgaatgatatacaatcaaggagtttctcctccatcactcctttacattttatatctatctgctgtttagtgcctcgtctcaattccatgaaagctactgaatacaaactatttactagggagtctgcgggacacaaacagagggattatatttaaaaaatagattgacgcgatctttgccttccccgacctcattacaatatagtttctccaccaatatctttaaaaacagatcctctctaacagtatgagaaaatcaaggggagcctcggaagttcaggccaggctgcgttccgaggagccgccacgtccccccacctccgcttcccgggccgcgattgcaggttgaaaactactcccaaacatcacagggcaggcagaatgcaactacgacccacgtggcagacgggggcggggaccggtcgcgtggccgcggccttggctcttgcgcctgcgcgctgcctcccgctctaggacccggatttaaagagacaggcgctccaaccgtcgtgggctgcccgcggcctgtaatgagcaagttccgaggcctacggtgagcgccggagccggagaggcaggtgaggggctacgcggcgcggcacggcgcggcggggcccggcgtggggaaggcagcgggcccggggcgaggagctcggcgcggccggggagccagccccccggctcctcccccgcccgcctgcggagccccggggcacaccctccgtgacgtggcggccctcccgggagcccagggggaggctcgcggctccccgggacccccacggggccgcgtgaggcggggaggccggcgcccgggctgtgttccctgtggaacccacggggccttctcgtaccctggcccggcgtgcgtcctcctgcgctgaaccgggagcgctcgggtgggactcagggagccttgatcacttcccgcctgcgtcccggacccggtggaggagcgctcctttctgcctcgccgggggtcgcggcctacgccgccgaccccactgtccccgccactctccgacagcggcgcgggaagcccttcgagaaaagcggcggcggccaggcctcagcgatttccttctcgggcccctgggctgcggcagttgtgagggtgcggaacgagggacagacgggtttcctcaaagctgcattgtgcctcctcgtggcccagcgcctcccgagcctccctcaagtccactcctttcattattggggccctagaggttgctctgtaaattgatcttctaggaaaagtgttgaaactcacttgttctgacctccttttatgggtctgccgtacttccacttacctcacctctgtggttcttaaactttgggagttatatagccctttgtgaatatcacgaaagtgatagacctcctccaaaaaaccgtgcatttttatcgaatgtacattttgtatacatttttagagagctcagaacagcctccctcccccacaaccagcgcattcatggattccttgtaattttcccaactaccctgtgaggtaggtattatttaccctgctttagaaataagaaaacagatgcagataaattaagagttttctccgaggtaacagtcagtaaactgtacagtcagacttgcactcccatcccttattccaggtccaccagctttccttcacatcatgttgcactac

SEQ ID NO: 2855 - DNA, 6000 bp, Homo sapiens
tttgcagagtggggcagggtgggtggataatgaggatagctcaccctatgaagagcaggaggaggtactcccattatccccattttagattgttaaaaattataggccgggcgccgtggctcacgcctataatcccagcactttgggaggccgaggcgggtggatcacgaggtcaggggttcgagaatagcctgaccaacatggtgaaaccccatctctactaaaaatacaaaaattagctgggcgtggtggtggacacctgtaatcccagctactcagcaggctgaggcaggagaattgcttgaacctgggaggtggaggttgcagtgagccaagatcacaccactgcactccagcctgggcgaaagagcgagactccgtctcaaaaaaaaaaaaaaaaaattatgggaggttggctgggagcgggggctcactcctgtaatctcagtgctttgggaggccaaggcaggcagatcacttgaggtcaggagttcaagaccagcctggccaacatggcgaaacccgcctctacaaaaattagctgggtgtggtggtgcacgccagtaatctcagctgctgcagaggctgaagcaggagaattgcttgagctcgggagaccgaggttgcagtgagccgagatcgcacccctgcactccagcctgggcaatagagtgagactccgtctaaaaaaaaaaattatggaggccattgttttcaactgagctcctacactaggccccaaaagactagaccaaaccaagatggagtaattcgtgctaaatgccatgtaatccaactgaaactttaaagaagcagatagattccaaaacagaccactttttcctgaaaacaggagagtccaatctacctaagtcagtttaataaggaagtcccctctgctttaactccacaaaaaagtaacctgaagtacctgatgttaaccaatcaggttttttcctattgctgtttcctggttcccaccttacaaaacccaccattctgctattgcccaatggaagctttcattctattttgtagaatgggggctgccccaattcatgaatcacaaataaaagtcaatttgatctacaactgaacttgtaagggagactgagtgacttgcccaaagtcatatacccagcaaataccctagtcagggatctgccttaagtactcaaccacatattcaagtacaggttgggggagggagggggtaatgtccaggtagctactttgggcccctgcagagtgggggcagggtgggtggataatgaggatggtatctttcccctccccccaccacagccccctggaactacccccaaccccttcttgcctcccaggactggcaggcacctgcagttccctcttttttttttttttttttttttttttgagacggagtctcgctctgtcgcccaggccggactgcggactgcagtggcgcaatctcggctcactgcaagctctgcttcccgggttcacgccattctcctgcctcagcctcccgagtagctgggactacaggcgcctgccaccgcgcccggctaattttttgtatttttagtagagacggggtttcaccttgttagccagggtggtctcgatctcctgacctcgtgatccacccgcctcggcctcccaaagtgctgggattacaggcgtgagccaccgtgcccggccctgcagttccctctttgtgtgcaatgccttccaggcccacccatcccagacccccaccactattctttcttcaatagtccccacaagtcctgcaggaccccctgcaataggctctgggaagagggagggactggcagagaaatagcttgtacccagaagagaaggggggtgggccagagcaagaccaccttgtgctacagagctggaaaaggattgtccccgacacttgcatatctcattttgccctctgtgtctttgataaaggataatggcatggggaaaccaagagacccaggaagaattctaacttaggtgtgtgtggccccaaagtccttttgtgttttttgttgttgttgttgtttgtttttttgagacggggtcttgctctgtcgcccaggctggagtgcaatggcacgatctcggctcactgcaacctccgcctcctggattcaagctattctcccacctcagcctcccgagcagctgggattacaggcacccgccatcaggcatggctaatttttttttttgtatttttgtagagatggggtttcaccaagttgtccaggctggtctcaaacccctgaactcaggtgatccacccacctcagcctcccaaagtgctgggattacaggcgtgagccaccacacccggtccccaaagtccttttgactccacagtacttcttctgggtttttggaacaaagacacacaggatccagctaaactgcaggacagatttaaagctgggcccctaaaaaatagggctggagctgcttgttaaattcctgttgcctcattgcccagtgggtcactgcaggctgggatgagctacagggtagaggccgggagctgcagaaactgagctgccatccttggggaagcatgcccaccatccccactaccttggaggtagtgcgttctaggaggtagaagccagcatggctggtttctgtcagggccctcgggtgtcctgcagagagtggcatgcaggccctggatcccagggcctggtcagtcttctggctgagcagaggctactggccaagcttccctaccactgctctgagcccctggtggtcctgtgctctctaacacatgtggtgagcagagcagagctgggaacacgcagagactgctggaggccagggagccaaaggtcaagagagcagaacaatgccgaagcaccatgcctatggtttccgagtgcccctagcccatgggcaacttccatccttggcttcctgccacatcatacggctccccattggccctcccttgacacactgtggttatgtaacaatggttgacctctggtttcttttagaagaagaaaaaaaaaattacatccacaattgtcacaccagcctaaggaaaattcctgctacctaatactgtcagcccactgtttaccttacacttctctcatgtaaccctcacactactctgagatcatagttaattattctttttaggagaggaaacggaagcaccgagaggcttcctccatcgaaatgacacgaatggcaaattgctgagttgggactgaaacccaggtagaggaaggaagcaatgaatggaaagaggtggctcagctggaattagtaggcactcaaattgtgcagtttttttttttctggcttcttgtaagggtaataactttgtttaatccactcaaacatttatatgtaagagtaattttaaaacttcagtcttcgccgggcacagtgactcacacctgtaatcccagcactttgagaggctgaggcgggcagatcacttgaggtcagaagtttgaaaccaacctggtcaacatggcaaaaccctgtctctactaaaaaaatacaaaaattagccaggcgtggtggcaggcgcctgtaattctagctacacgggaggctgaggcaggagaatcgcttgaacccgcgaggtgaaggttgcagtgagcctagatcgcgccattgcactccagcctgggcgacagagtgagattccatctcaaaaaaaaaaaaagcaacaaaaaaacaagcaaacaaaaaagcttcagtcttggcatttccttgtcaaattggaacagctgttctggactgcagggttcacggaggtgagcaaaagtagccagtcggagggtatctggccagctggctgcggaaaaggtttcagccccggacggctgagcccaccctcagctcaagaggctaccaccacaagttatccctttcgatttaccagttgcagtccagcgctgctctactggggacctgaatgctgccctccattttgcaaagcctttctacatccttccactatatggaacccccaaaccacaactgtggcacttttattttaattatttttattatttatttatttatgtatttatctcttgaggtggcctcgctctgtcactcaggctggagtgcagtggagcaatcacggttcaaggcgcctcgatctccgatccccggggctcaagcgatcctccctcctcagcctccggagctggagttacaggtgtgcgatgcctcgcctggctattttttttcctttttgggtagagacggggtctcgctatgttgcccaggctggtctccaactcctaggctccagcgatcctcccgcctcggcctcccaatgtgctgcgaatacagactccagccaccgcacacagcctacttttatttctttgaaaaatgaattcgagggtaaagggggcggggttgaggcagatgccagaatctgttcgcttcaaccaagcagccaggctgcctgtccagaaagccggcactcagtttcctcaggaaaacgaagctaaggctcccattcccctcgctaacaacgtcagaacagaggacagtttttagatttcagggatcttaaatagattggcagttcctggagaataaacatcctttgcttttctcctgcacacttttgcctcaggccaccccttcccgcttccaaagcccatctcttccaagctttccgcacgagaaaacaagtgagcccttctcattggccagattccctgtcaatctctccgctatgacgccgagtggtgccttttgaagcctctctagtcccgcctccctaacctgattggtttattcaaacaaaccccggccaactcagccgttcataggtggatataaaaggcaagctacgattggttcttctggacggagacggtgagagcgagtcagggattggctggtctgcttcgggcgggctaaaggaaggttcaagtggagctctcctaaccgacgcgcgtctgtggagaagcggcttggtcgggggtggtctcgtggggtcctgcctgtttagtcgctttcagggttcttgagccccttcacgaccgtcaccatggaagtgtcaccattgcaggtacggctcgcgggggggactggcggtggagcctccgcgcggcccgggcatctctctggccgcccgtgacgggtgaagctctggggctgcggtcaggccggcgaccggcttgggagcccatattctccattcccggttccggggtgatcgtggagaggcggaagccccttctggtgctagtagtgaagtatgacccggcttccagggtgtcgtgcgttgttgccctgtttctaggggcaggagtccgttggtcccgtagtggatccatgttacagcggcccgggtgcgacgttattgagtcgcgcgtacagatgctttcccctcctgcccgctgcttgaaaacggtcttgaatgtccccgatcttggaaagggcagagcctagcacagtgtttctctggagcagctggccagcttacaaaagcgcccccttcctgagttcacaacgctcaggtggccaagggattgaacggatagccgcccaaactgctgctgccgaactagaattatttacggtgtcgtgtgctcgggacaccgtaaataatttataataataggcactcggtaaataatgtatgcaggaactgaaagaagtgggtgtattttattgatgacatctaccatgttgctcaagaaaagaggtttccagacagacccacttggtgagataatatgtgtctgtttaacctgacacctggggacctggccgcagcgaatttaaattgtcctatttgtacaaaactggcaactccaccactgcctactaacagattgcaatgcatgttgacatctcactatggtaggcattttgttcctagtttagggtaaacttatgattaaaaattcccttctttctctctttttttttaattgctagcctgtaaatgaaaatatgcaagtcaacaaaataaagaaaaatgaagatgctaagaaa

SEQ ID NO: 2856 - DNA, 6000 bp, Homo sapiens
ttgaagaccagcctgggcaacaaagccggaccctgtctccttaaaaaaattaagttcaattaaacatttttaaaaataataaaccagtcattagaaccataaacctgtactgtttttgacaatgtaatgcactgccctgtaaaacactacaattaagactgttattttaaggaccctgaagtctgtgaagatcaggcacttttttgaaaccctaagataattatcccccagttttctccattctttgtttctacctagaaccaagttcaccaccaaaacgcagtcctgctgacgtcaagtattcattcatatgacatgtaattactggggtcgttaaaatttgggcagaatctttgtcaattcaccaggaccttaggcaaaaaatcaggaaaatgaagtgactgactcagtctgccaaaagcggatattctgaaataccactttccaactttaagaaacacttcctgccaggtgcggtggctcacgcctataatcccagcactttgggaggccgaggaaggcagatcacgaggtcaggagatcgaggtcatcctggctaacgcggtgaaacccccatctctactaaaaacacaaaaaattagctgggcgtgatggcgggtgcctgtagtcccagctactcgggaggctgaggcaggagaatggcgtgaacccgggagacagagttcgcagtgcactagccgcgatcgtgccactgcacttcaggctgggcgacagagcgagactcagtctcaaaaaaaaaagaaaaaaaagaaacacacttccctactcgttagggaaattaatcttcgtctctttttctcaaattacacaattggaaattaatttagatattctggagctcctccagctggtgggccaactaagagaaaacaggaagtgggagattctagcttagctggaccatatccaggtctccataaggaactctctttggctggcatgtaaaaaaattctttcagcaagagcattaatcttgaacgtgtgtaaacacgaaagctatggttaaccctacctgctccttaggtctacagccagtagagtcagatagctgggtcctaggccttcagctttcataattgacattattgttaagtccatgtgactgactcaccttgtcttggcacaagttagcttttcctccacatcgatttttttttctttcagcctcaacaaaatccctttaatgaaacaaacctggcaacccgaactttggttactgtctccaccagaggcctgtacaagccaagttatccaagctgaggccgggagtggtggctcatgcctgtaatcccagcactttgggaggccaaggcaggaggatcgcttgagctcaggagttcaagaccagcctgggctggtctttgagaaagcgagactttgtctcgaaaaaaaaaaaaaaagtgtggcctgaaagttgagtgtttgacaaaaaggagaaacagtgcctttccaaaaccaaaggtccctaaccaagatctctttaacggggtctcgaaaaaaggagaatgggatgagaaggatatatgggtagtgtcattttttaacttgcagatttcatcctagtcttccagttatcgtttcctagcactccatgttcccaagatagtgtcaccaccccaaggactctctctcattttctttgcctgggccctctttctactgaggagtcgtggccttccatcagtagaagccggatgttcttgtgtccgaaattggtgggttcttggtctcactgacttcaagaatgaagttgcggaccctcacggtgagtggtacagttcttaaagatgatgtgtccagagtttgttccttctgatgttcggacgtgttcagagttacctccttctggtggattcgtggtctcgctggcttcaggagtgaagctgcagacctttgcggtgagtgttacagctcttaaggcggcatgtctggagtttgttcgttcctcccgtctggagttgttcattcctcctggtgggttcgtggtctcgctggcttcaggagtgaagctgcagacctctgcggtcggtgttaccagcagataaatgctatgcggacccaaagagtgagcagcagcaagatttattgcaaagagcacaagaacaaagcttccacagcgtggaaggagaccagagcgggttgctgctgctggctcaggcagcctgcatttttttttttttttttttttttttttgagatggagtctccctctgtcacccaggctggaatgcagtggtgcaatctgggctcactgcaagctccgcctcccgggttcacgccattctcctgcctcaacctccccagtagaggggattacaggcacccaccaccgcacccagctaatattttgtctttttagtagagtcggggtttcactgtgttagccaggatggtctcgatctcttgacctcgtgatccacccctctaggcctcccaaattgctgggattacaggtgtgagccactggcacccagcggggcagcctgcttttattcccttatctgaccccacccacatcctgttgattggtccattttacagagagctaattggtccgttttgacagggtgctgattggtgcatttacaatccctgagctagatatacacagagtgctgattggtgcatttacaatcctctagctagacataaaaattctccaagtccccactacatttgctagacacagagcactgattggtgcgtttacaaacctttagctagacacagagtgctgattggtgcatttgcaaaccttgagctagacacagagcactgattggtgcatttacaatcctttagctagacacagaagttctccaagtgcccaccagattagctagatacagagtgctgattggtgcatccccaaaccccaagctagacacagagtgctgactggtgcatataaaatcctcaggctagacataaaagttttccaagtccccatctgactcaggagcccagctggcttcacctagtggatcctgcgcagggctgtgccgggcgcctgcactcctctcagcccttgggcagtcgatgggaccgggcgctgaggagcagggggcggtgcccgtcggggaggctcaggccacgctggagctcacaggggttgggagggggctcgggcatggcgggctgcaggtcctgagccttgccctgtgcagggcggctggggcccggtgagaattcaagcggggtgcaggcgggccggcagtgctgggggacccggcgcaccctctgcagctgctggcccgggtgctaggcccctgactgcccggggccgggggtgcggggcccgctgagcccgcgcccacctggaactcgcgctggctggcgagcgctgcgcgcagccccagttcccacacccgcctctccctccacacttccccgcaagcagagggagccggctctggcttcggccagcccagagaggggcccccacagcgcagtggcgggctgaagggctcctccagcacggccagaatggacgccaaggccgaggaggcgccgagagcgagcgagggctgctagcacgttgtcacctcgcattctgaaccacagactctccaactctccggcgcttttcgcccactcggtccctcagaacacgaagggctctctcatcctgtcactaaaacgattagctgtccggagacacggaaaaagtcgcccctcttctttgcaggattcctcccttgaacttctccaaaccctcttagtgtgacgtgaccccacccctagctaacccaggctgcttccttaccagcttcccgccccctggggaggcggcaatgcaaagaccgtccgctgccagctctgccgctatctctgtggggtgaatctaacatggcggacaaagacagtaactagtcccgtttctccgcgttttcgccaagaagattggctcttaccacttgtccctcaaaacgaccaccccattgactggtggcgattgcgtcgacggagacggggcaaaagcaagctgaacccgaaaaataacaaacactggggctgaggggtggaactacgagtgcgcagacatgggccagagcgcatttcccctgccccaggcaaattcggcgctcactgcgtccccgcaggccactgaccttacaagactacttgccccagactcctggggctggatgggaattgtagtctccctaaagagttgtacgtatctttttaaggcctagtttctgctttcaaaatacgaaaacataacactccagtccataactgttgacaagtacaagcgcgcacaggtctccaatctatccactggatttccgtgagaattgtgcccgctctggtattggatgttcctctccataagactacagtttctaaggaacactgtggcgaagacctttcattccgcaacgcatgctggaaataattatttccctccacccccccaacaatccttattacttatatttaccgaaactggagacctccattagggcggaaagagtgggggattgggacctcttcttacgactgctttggacaataggtagcgattctgaccttcgtacagcaattactgtgatgcaataagccgcaactggaagagtagaggctagagggcaggcactttatggcaaactcaggtagaattcttcctcttccgtctctttccttttacgtcatccgggggcagactgggtggccaatccagagccccgagagacgcttggctctttctgtccctcccatcctctgattgtaccttgatttcgtattctgagaggctgctgcttagcggtagccccttggtttccgtggcaacggaaaagcgcgggaattacagataaattaaaactgcgactgcgcggcgtgagctcgctgagacttcctggacgggggacaggctgtggggtttctcagataactgggcccctgcgctcaggaggccttcaccctctgctctgggtaaaggtagtagagtcccgggaaagggacagggggcccaagtgatgctctggggtactggcgtgggagagtggatttccgaagctgacagatgggtattctttgacggggggtaggggcggaacctgagaggcgtaaggcgttgtgaaccctggggaggggggcagtttgtaggtcgcgagggaagcgctgaggatcaggaagggggcactgagtgtccgtgggggaatcctcgtgataggaactggaatatgccttgagggggacactatgtctttaaaaacgtcggctggtcatgaggtcaggagttccagaccagcctgaccaacgtggtgaaactccgtctctactaaaaatacaaaaattagccgggcgtggtgccgctccagctactcaggaggctgaggcaggagaatcgctagaacccgggaggcggaggttgcagtgagccgagatcgcgccattgcactccagcctgggcgacagagcgagactgtctcaaaacaaaacaaaacaaaacaaaacaaaaaacaccggctggtatgtatgagaggatgggaccttgtggaagaagaggtgccaggaatatgtctgggaaggggaggagacaggattttgtgggagggagaacttaagaactggatccatttgcgccattgagaaagcgcaagagggaagtagaggagcgtcagtagtaacagatgctgccggcagggatgtgcttgaggaggatccagagatgagagcaggtcactgggaaaggttaggggcggggaggccttgattggtgttggtttggtcgttgttgattttggttttatgcaagaaaaagaaaacaaccagaaacattggagaaagctaaggctaccaccacctacccggtcagtcactcctctgtagctttctctttcttggagaaaggaaaagacccaaggggttggcagcaatatgtgaaaaaattcagaatttatgttgtctaattacaaaaagcaacttctagaatctttaaaaataaaggacgttgtcattagttctttg

SEQ ID NO: 2857 - DNA, 6000 bp, Homo sapiens
gcttgcagtgagccgagatggcgccactgcactccggcctgggtgaaagagcgagactccgtctcaaaaacaaaacaaacaaaaattaatcttaagccaggcgcagtggctcacgccagcactttggaaggccgaggcgggtggatcacgagatcaggacttcaagaccagcctgaccaacgtgatgaaaccctatctctactaaaaatacaaaattagccggccacggtggcgtgcgcctataatcccagctactcaggaggctgaggcaggagaagcgcttgaacttgaacctggcaggcggaggttgcagtgagccaagatggcgccactgcactccagcctgggcgacagagccagactccaaccccccaccccgaaaaaaaaaggtccaggccgggcgcagtggctcaggactgtaatcccagcactttggaaggctgaggcgggtggatcacaaggtcaggagatcgagaccatcttggctaacatggtgaaaccccgtctctactaaaaatacaaaaaattagccgggcatagtggtgggcgcctgtagtcccagctactcgggaggctgaggcaggagaatggcctgaacccgggaggcggagctggcagtgagccaagatcgtgccactgcactccagcctaggcagcagagcgagaccgtgtctcaaaaaaacaaaacaaaacaaaacaaaaagtctgggagcggtggctcacgcctgtaatcccagcactttcggaggccaaggcaggaggatcacctgaggtcaggagttcgagaccaacctgaccaatatggagaaaccctgtctctactaaaaatacaaaattagctggtgtgatggcacatgcctgcaatcccaggtactccggaggctgaggcagcagaattgcttgaacccgggaggtggaggttgtagtgagccgagattgtgccactgcactccagcctgggcaacaagagccaaagtctgtctcaaaaaaaaaaaaaaaaaaaaaaaaagaaattaatcttaacaggaaacagaaaaaagcaatgaaaagctagaaaacataatagttgattgaaaataacaatttagcattttcattcttacatctttaatttttatgtatctgagtttttaattgatggtttaatttgccagaatgagaaagaacatcctatttttatgactctctcccatggaaatgaaacataaatgtatccaaatgccacactattgaggattttcctgatcactgattgtcatgagtaagttttgtgctttttcaaaagcagttttttcctacaatgtcatttcctgcttctctggctctgattttcaataaattgataaattgtgaatcctgttttcctcttatttttgtttagctataatgttgaagggcaagggagaggatggttatttataaatcttgtatcgctctgaaaacacaacatacattttccttaatctgattaacttgacttcaaatatgaaaaacaactttcataaagcagaaaagaatttacccttttttattgtgggtaagaggcaatggtacaacttttcaacttattttttgaatgttactcactactaaccatcaccatatttaaaaaaattaaagaactaatttagtttagtttattatttatttgacaaatgtttattgagtggcaactaggtcccaagtaccgttctaactactgaacatacagatgtatgtaaacaaaacaaaaatcccatcctggagtttacattctgtgggactagagataaaaaatggatacattacatagaatgtcagctagtaatcagtgttatggagaagcagcaggaatagaagataaagtgtgtgctgggggtgtggtaattttaaataggggtgtctggaaatgaaaaggtggtatttcaatcaagatttttagaccatggctgggtgcaatggctcaggcctgtaatcccagcaccttgagaggccaagggagggtagatcacttgaggtcaggagtttgagaccagcatggccaacatagcaaaaccctatctctacaacagaaaaatacaagaatggctggacgcagtggcttatgcctgtaatcctagcactttgggaggcccaggcgggtggatcacaaggtcaggagatcaagactatcctggctaacacggtgaaatcccgcctctactaaaaaagaaaaaaaaatacaaaaaattagccgggcgtggtagtgggtgcttgtagtcccagctattcaggaggctcaggcagaagaatggcatgaacccgggaggcagagtttgcagtgagctgagatcgcgccactgcactccagcctgggcaacagagcaagactccatctcaaaaaaagaaaaaaaaatacaaaaattagctgggcatggtggtgcacacctatcgtccctgctactctggaggctgaggtgggaggattgcttgagcctgacgaggttgaggctgcagtgagctgtgatagcaccactgcactccagcctctcgacagagatcctatataaaaaaaaaacctctgcatttcattgtatgtaaataagtatgtaatttcattgtatgtacagagccagtttcaaacaaaggttcttccaaatacctatcctctcaacgacaccgatcatccatgtttttttttttttttttttttttttgagatggagtttagctctgtcgctggagttcagtggtgccatattggctcacagcaacatctgcctcctggttcaagtgattctcctgcctcagcctcctgagtagctgggattacaggcacatgccactacgcccagctaatttttgtatttttagtggagagggggtttcaccatgttggccaggatggtctcgatctcctgacctcgtgatcctaccaccttggcctcccaaagtgctgggattacaggcataagccaccgccctcggcctcatccatgattttattttgccatttcaagtgatggagcttgttttagagctggaagaaaagccaaaatgccagttaatctaaactagattcctgccccagtgcagaaccaatcaagacagagtccctgtctttcccggaccacaggatttgtgttgaaaaggagaggagtgggagaggcagagtggatggagaacaaggaatcattttctatatttttaaagttcttcagttaagaaaatcagcaattacaatagcctaatcttactagacatgtcttttcttccctagtatgtaaggtcaattctgttcatttgcataggagataatcataggaatcccaaattaatacactcttgtgctgacttaccagatgggacactctaagattttctgcatagcattaatgacattttgtacttcttcaacgcgaagagcagataaatccatttctttctgttccaatgaactttaacacattagaaaaacatatatatatatctttttaaaaggtttataaaatgacaacttcattttatcattttaaaataaagtaaatttaagatttggaaggttttagaataatacaaaccaaagaactaatgacaacgtcctttatttttaaagattctagaagttgctttttgtaattagacaacataaattctgaattttttcacatattgctgccaaccccttgggtcttttcctttctccaagaaagagaaagctacagaggagtgactgaccgggtaggtggtggtagccttagctttctccaatgtttctggttgttttctttttcttgcataaaaccaaaatcaacaacgaccaaaccaacaccaatcaaggcctccccgcccctaacctttcccagtgacctgctctcatctctggatcctcctcaagcacatccctgccggcagcatctgttactactgacgctcctctacttccctcttgcgctttctcaatggcgcaaatggatccagttcttaagttctccctcccacaaaatcctgtctcctccccttcccagacatattcctggcacctcttcttccacaaggtcccatcctctcatacataccagccggtgttttttgttttgttttgttttgttttgttttgagacagtctcgctctgtcgcccaggctggagtgcaatggcgcgatctcggctcactgcaacctccgcctcccgggttctagcgattctcctgcctcagcctcctgagtagctggagcggcaccacgcccggctaatttttgtatttttagtagagacggagtttcaccacgttggtcaggctggtctggaactcctgacctcatgaccagccgacgtttttaaagacatagtgtccccctcaaggcatattccagttcctatcacgaggattcccccacggacactcagtgcccccttcctgatcctcagcgcttccctcgcgacctacaaactgcccccctccccagggttcacaacgccttacgcctctcaggttccgcccctaccccccgtcaaagaatacccatctgtcagcttcggaaatccactctcccacgccagtaccccagagcatcacttgggccccctgtccctttcccgggactctactacctttacccagagcagagggtgaaggcctcctgagcgcaggggcccagttatctgagaaaccccacagcctgtcccccgtccaggaagtctcagcgagctcacgccgcgcagtcgcagttttaatttatctgtaattcccgcgcttttccgttgccacggaaaccaaggggctaccgctaagcagcagcctctcagaatacgaaatcaaggtacaatcagaggatgggagggacagaaagagccaagcgtctctcggggctctggattggccacccagtctgcccccggatgacgtaaaaggaaagagacggaagaggaagaattctacctgagtttgccataaagtgcctgccctctagcctctactcttccagttgcggcttattgcatcacagtaattgctgtacgaaggtcagaatcgctacctattgtccaaagcagtcgtaagaagaggtcccaatcccccactctttccgccctaatggaggtctccagtttcggtaaatataagtaataaggattgttgggggggtggagggaaataattatttccagcatgcgttgcggaatgaaaggtcttcgccacagtgttccttagaaactgtagtcttatggagaggaacatccaataccagagcgggcacaattctcacggaaatccagtggatagattggagacctgtgcgcgcttgtacttgtcaacagttatggactggagtgttatgttttcgtattttgaaagcagaaactaggccttaaaaagatacgtacaactctttagggagactacaattcccatccagccccaggagtctggggcaagtagtcttgtaaggtcagtggcctgcggggacgcagtgagcgccgaatttgcctggggcaggggaaatgcgctctggcccatgtctgcgcactcgtagttccacccctcagccccagtgtttgttatttttcgggttcagcttgcttttgccccgtctccgtcgacgcaatcgccaccagtcaatggggtggtcgttttgagggacaagtggtaagagccaatcttcttggcgaaaacgcggagaaacgggactagttactgtctttgtccgccatgttagattcaccccacagagatagcggcagagctggcagcggacggtctttgcattgccgcctccccagggggcgggaagctggtaaggaagcagcctgggttagctaggggtggggtcacgtcacactaagagggtttggagaagttcaagggaggaatcctgcaaagaagaggggcgactttttccgtgtctccggacagctaatcgttttagtgacaggatgagagagcccttcgtgttctgagggaccgagtgggcgaaaagcgccggagagttggagagtctgtggttcagaatgcgaggtgacaacgtgctagcagccctcgctc

SEQ ID NO: 2858 - DNA, 6000 bp, Homo sapiens
cggggctagactccatcaaaaaaaaaaaaaggaacatagcaggccaggcacggtggctcacacctgtaatcccaatcccagcactttgggaggcctaggcgggcggatcacctgaggtcaggagttcgagaccagcctggccaacatggtgaaaccccgtctctactaaaaatacaaaaatattagctgggcgtggtggtacacgcctgtaatcccagctacttgggaggctgaggcagaagaatcacttgaacccagaaggcagaagctgcagtgagccgagaccatgccattgcattctagcctgggcagcagggtgaaactctgtctcaaaaaaaaaaaaagagagaaaaaaggaacatagcaagttgaaaggggctggggccattttgaatacgggaatggagggaagggaaactcttccaaaggttagtacaagtaaatgactctggctttgaaggcagatgctgtgagccgagtggtccttacaaacagataggtttttttgtgacaaagacaagaatcacaagggaaacttcagtctatgagagtacctcctgtttatcacaggtagggcataatcaaagtcaaggatgcctcaaggccaacaatcctccagcagtacagtattatggagtaattggggaacaggactttgatagaaagttttctgattgggtccctataagcaaagcaagacctatattacagcaaagtgtaggtttggggagctctgggttctcattcccgttgtgatcctcaacaaggcttttaacttttctgagccccagtttccccacctgtgatgtggggagaagtcctaccccataggatgactgatggaaacacaagagagaatgtgggagtgccttgagagggtaagctgctctatgaatataaaggcttgctaatacccccagagtaaaaagtgtggggaactgtcctgtgttactgagaaagttatcagatccaaaaaagaaatcaaagagaggaaaaaaaaatcttttttcttattttatacaagatgcttctggtgagataaaaaagaatcttagtgctaggcaaggtgcctcacacctgtaatcgcagcattttgagaggctgaggcaggtggattgcttgagctcaggagttgaagaccagcctgggcaacatggcaaaaccccgtctctaccaaaaatacaagctacactctgcaatctctacaaaaaacacagggcccacatgtcttctggctcccagctgggtgtcaccagcagggacccgaggagaggactagtgggaaggagaaaagtgaagtcagggtatttttcccctggctccctcccagtggggtcacctagggtttgctgtccccctctgtggcagctcatagcttcgctcaaggtggtcctctctccatttctctctcctgaattctgttaaccactccttcccctcatcccttcaggcatagggatggtaacagctatgccaatggttctcaaccgggggtgatttttccccacaaatgacatctggcagtgtctgcagacattttttattgtcatgactgagaggggtacattagtagatagtggccaggaatgctgctaaacattgtgcacatcataggacagcacccaaaacaaagaattctccaatctaaaatgtcaacaatactgaggtcgaaaaacctaagttgtgctgttattactgtgaggtaccatgctgtcactggtagtttcctcataccctgcccatgccttggcaaacagtccctttattcaatcttcttttaattaccctgagttgaatgtgccatctgtcttcctgctggggccctgataagtatcctttaaaataaaagcatatttatcctgtaattgtaaggggaggagagggaggaaatgtcagccagaaaactcctacctcagacggcccagcccttctcctccaagtgacactgcaaggcacagcctgcgcctcaatcacacagcggcactccatggtctgcagtgctcctaggagctggcccccaccttccatctgtaagagcactgcaacagatggaaaagggactgtcagtggggggtccagaacgcagataactcagcacaggacaaagacacatgtgaggacctggatccagcactacaatgatgtgttttaagcattcctctggcctctgggctttcatcctggtaaccagtgctgcattctttctttcctgtcttctcagggtgctttccttctgccttgcttgtctctgctgccggcatccgtgtgagcctcttccctggaccttctgactcggcttggttttcttctggggtggaaggatgtcagaatttgttttggttactgccaagctgctgctctggccagggcaggtagacaggtaggctggaagctgacagcatggatctaagatcaggtccttgttatctgctgcactcctctctggggtatcatggaggggaacttcagggatctttggaaagggctttttccagtcacatgatgcaccttcattattttgatgatccaaaacacttttaactggggagctagagtcctcagggctcagttgcttgtgggtcagaaacttacatgtaagcctttgagccagaggaataaattcttcttcatcttcactttcactgcttagcaacctgactggctgtgtttgtgtgacagtttcagctatttctgggacaggtggtgaaaataactctggtgctggaggacaggaggcttcacaatctgagatgtcaaccactacaatcttctcttccctttcaggctgtctcctctttgttgaagatggttccttcttcagaaaggcaaatgttggcaactcctcagagtcactatcaccagaatccagtgagggtgatgacttctttagagccatcagtatgtgctatcaaataattccctaaaaggaaaagagacatatgacacagactggagcattcaattcagtccactagctgtgttccatagccaggctttatgacataaatataagatatagagaatacagaaacagagaaatatgacatggccccaacacattcaatctggaactctaactcctggtaatctaacaggaatcctcctcaaattctttccaggtcaagctgaagtataaacaaagtagagttaccattacaaaattttaatggggggaggtggtaacaagatttaacacctccaaccccttgtttatcttcacgtttgaaatggagatgtcaaaagttcttcttttttttttttgagatggagtctcactctggcacccacgttggagtgcagtggcacaatcttggctcactgcaacctcactcccaggttcaagtgattctcctgcctcagcctagctgggattacaggcgccccaccaccacacctggctaatttttgtatttttagtagagatgcgttttcatcatgttcgccaggctagtcttgaactcctgacctcaagtgatccgcccgccttggcctcccaaagtgctgagattacaggtgtgaaccactgcacctggccaaaaactgttctttttaaaaattgagatataggctgggcatggtagctcatgcgtataatcccagcactttgggaggccaaagcagaaggatcacttgagcccaggagttcgagaacagcctgggcaacatagtgagaactcgtctctacaaaaaaatacaaaaattagctgggtatggtggctcacacctgtagtcccagatactcaggaggctgaggtgggaggattgcttgagcctgggaggtcaaggctgcagtgagctgtgattgtacgactgcactccagcccgggtgacagagtgagaccctgcttcaaaagaaaaataaaataaaaataaaaatagagatataatttgcacagcataatatccttttaaaagtgtacattcagtagattttagtatattcacaatgttgtgcaaccatcatcactattttatcacctcaaaaagaattcctgcagccattaagccgtcactgtcctttccctccctccccagctcctggcaaccataaatctgtctctatgcatttgcctattctggatatttcatataaatagaatcatacactatgtggccttttgtgattgacttttttcactcagcttgttttcaaggtttatctatgatgtagcctgtatcagtagttaattgcttttcatgactgaataatattccactgtatggatatgctacattttgtttatccattcatcacttggacatttaatttgtttcctttttttgcctgttatgaataatgctgctatgaacactgacatacaagtttttgtgggggtatgttttcaaatccctttcgtgtatatacctaggagtagaattgctgggtcatatgcaaagctaatcatttcttgaacatttactaacactgtaggtatgacccagaaggagacatgtaacctgcctaggcctcagtttcttccttagtaaaacagggatggtaacagcacccattttataaggtagtgagaattaaataaaataatgcatccaccgcgcttagtacagcatctggcacacagctggctaagtagagtaagttgaatgactagggagggggcctcatctctgacccttcgctgggcctccgttgacatctgcaaatcaggggagtgggacaagcgggcccctgcccgacaagctctgcgcctctcaggctggcggtccgctgcagaggctcctggacaccttagccaccaagattctgcagagcggtgttcaggagggaagccctgcccaatccgcaggcctgcgaccggggacgctcacctgcaacttctcccgccactctttcaactgccacgcagggcccggaagtagatctcctgatagcggaagtagaaacttttcgagaccggaagtgagtgatcgaaagcatggcgtcggtggtgttggcgctgaggacccggacagccggtaatgggacgcagtagtcagagcggggtgaggcggggaggcagagtggagctccagcagggagggaaggaggtgacactgatccccgcggaggaccttggatgcgaggggaagtgtgtggggtactccaggtttgagggacggtgtcgctggtcacgtgacacatcctgggtggagccgtgagtgagggcgtttgaagagcacttgtctttctcctgcctcagcagcacggacgggttccttggcggttggggatttgggtgggtcctttctctgtagaagtattagtaacattggcatattggggttgaaaaaattaatctattgattcagcagattgaggtcttactttgtgctagacacggcggtaggtgttcggaaaatcagcagaaaacgtgaagacttggcttctagcccccgaacggttctctctggtgcataaggcaataaatgaacatataaagtagatgtagactggcaagtgctgtgaagaaggataatgtgtgtctgtgtgtgtgtctttttttagattggacggtgaaggaaggcttctgaggagataacatttaaaacctaaagaatgacaggcggggcgtgatggctcacgcctgtagtcccaacactttgggaggcctaggtgggcggatcgcttgagcccaggagttcaagaccgactgggcaacatggcaaaaccccatctctacaaaaaatacaaaaattagctgggtgtagtggcgcttgcctgtggtctcagatactcaggaggctgaggtgggaggatcacctgagctcgggaggtcgaggttgcagtgagctatgttcataccactgcactccagcctgggtgacagaatggggccctatcccccccccccaaaaaaaaaagaatgacaggagacctagacctgtgtagagtgagggacaggagagtgacttgagccagttttacattttgagaagcaaactattgctcttatgtaaatttaaaggggataggagtggaaatgaggaaatcaaatggaaagt

SEQ ID NO: 2859 - DNA, 6000 bp, Homo sapiens
ctatcccctcttccagggcatacagacatttattcttcccaacacccacctgcaacacacagacctggtcagctggtcagctggtcagcgaggtggtccgtcccagaattttgggacagacttctcacacagagccgggccctggggctgaaagggtgatcagagagctccatctcaggttccctttcccactggctagcacgtccaaaccttctgcttctttattgactcataacaaatgagggaaaagaaagctccaacagccaacatgggccactgctcagtcccagggactgttacctggagccatgtctatgcagctggtcagaagccacactgcacaaatcccaaaacccaggaagatgccctaaatcttcacttagacttaaacaacactagaactgtcatattaaaacactagtttgatgtaaattttcatttagatagtgatctataaagtttaggctctatggaaaatataaaccaaagctatatggataatgcatatgctaataaaacaatcatactactgcattagctaatacccatgtaagccctttaatacacattaagtcatttaattctcacctagtgaaagaggtattatttccaacgccacttttcagatgtgaaatatgaagcagagagattaaactgtgttgtatatacagtttttaaccatattttttagctttttcttttagaacttcaggctgggtgtgtggcaaattttacccaggtagtccagcattattctctgtctctctgattaaaagaatgggctctggagccaggatgcctggttcaaataccagcactgctacttactcctgtgtggtcttaggcaagttacttcactgtgcctctattttttcgtctgtcaaatggggataatattaactattttacagggtcattttgaggattaatgctcaacaatcataaagggcctagaatactgtctagctcaaaatgtgttagctttgattattattgttgacatagccacacatctaatgtcttaagttctaaaaggtaaaaagctactacatacataatcaattcacatacaaattagcatctttgaaataaatacaggttactatcaacctttttgtacctactaaaattatcgaaaaaggggtgggggaggggaaactgtttacaaaggcaactaatatttaaaataatgtggagagtacagtatcgttatgtctctgtaacaaagaactgtcctaccctataaaaatgatgccaacttgctgaaactgaaatccccacctggtatgaacctaactcctggcacactgaattctatttcattaaattcaagctatctttcaaccatctgcaagtaagtttatacaaaggaagaagtcttagaataatgaaaaactaataaattgaaattagtttcccaagactaaaataatattttaaatcaccaggtatcttgtcctccaagaactgagggttagaaaggagaaccaagaataccaggccaatgcaacaccagggcaaatcatagtgatctgggagttaggcagacctggtgcaaatcccagcagtcacttgctccttccaccccgtctaggtctctggcatttcaccttacttacagggatgtggtaaggaagaaatgagatcgtgtaggcatgggaatcagcacaatgcttgccatttggtaagcactcaatacatgcaactgttattaccatgcttaggggcaaggagaggtcaacctagaaaaggaaaaaggggggcagcaacggagcaactcacatgggcacctgggtgccagcggaaatggcgctgtgttgcaatgatgttcccagcatgaacatagtgacctagaagagaagtccacagtgactggggcagcatagcaaactaccaagaaaacatgatggcccaaatgctgcacaccaacctccaagcctgcccctggccaaaaacaactcccagacagtccaacacaagcagcgcaggatctgccacccagcagctcttgtctctaattgcatggttatggctcacacccacccactcgatgacccttcctcaggtcttatccgttcctttaaactggagccaattatgatggtaaggaagaacagggccaggcacacgcagggttcttctgctctcctaaggaacatgaggacagggtgcagctaggaaggggaagccaaggcacatcctcaccttccattttcttaatgccttggcgtctgcctgatgactttccaccgaggtttttggagctaccacccgacttcttggatgcgtatctgacagcaagagctgtagccggagtggggcttagcaaggatgtaactgcagagaaaacagaaacattgttcagacagacaggctcaaactatttctgcctcaatgggccacatgctgatacgtgagaggcggtggggagatgagaaagctgtgtcaggggagcagaagtgccactgagtgtattagttctcagggaatacctctaagtccttggctttctccttttgggggagggggcgggggagcagtgaaacacaaatggaaaaaaataaacatcatgtgttctgggttctgacacattcagtctaaatgtgctgaggagaaatggacaccagagagctgcctgcttcagaggctcactcaccctcatgcaccacggaggggccagaacagacttggggagcccagtacatccagaaaggcttcggtttcaggctcacccacgactttctttcttttttttttttaaagacggagcttcactcttgttgcccaagctggagtgcaatggcatagtcctggctccctgcaacctccgcgtcccggattcaagcgattctcctgcctcagcctcccaagtagctgggattacaggtgtacgccaccacgcccagctaatttttcgtatttttagtagaaacggggtttcaccatgttagccaggctggtctcgaactcctgacctcaggtgatcccaaagtgttgggattacaggcctcacccatgactttctcagctgtccactcatccactgctcaccaaatactagtaaaccaaaaggatggctggcctaaaagtggctcccacagggtcctggccatttcagaaggctgggccctttcttctcaaagcacatcaagcagaggtccaaccatgacccacacactgcccttgttaatctgacctctccatactcattccaaagtgctcaatagcattcatttgcagaagtaaaatgaactaaaattcatactaagatggtagtcccttgctgtatgacaagcctaggggtgcaactccttgcctgcaggtctccagacacagccatgatttaaggtccatgccagtgtctttagagaagccttgtgggtctctggagcctataagttcagagttcctgaagcctgggtttctgacatttccatgacaccagagactagctggggcaaaggaccagagataaggactcagaaagacaacatgttaaaacatgcccggcgccaggatctacctacctttaaacatctattcattcatttacatacttactaagctcaggagctgggcttttactttacttacattatctcactcacaaatctttgctcttcaccctactccccatcctcctcctcaaagtaaatggtaccaccattcatccagttgcttaggcagaaaccagagtcattgcagattccttctctttgctgtcctcacatattgttcaccagcaagctctgtggatgctaactccaaaacagatctcaaattcatccgttttcctccaagttcactgccaccacaaacatcttggctaaatcatctctcctcagggctattacgactttccatttgatttcctcatttccactcctatcccctttaaatttacataagagcaatagtttgcttctcaaaatgtaaaactggctcaagtcactctcctgtccctcactctacacaggtctaggtctcctgtcattcttttttttttgggggggggggatagggccccattctgtcacccaggctggagtgcagtggtatgaacatagctcactgcaacctcgacctcccgagctcaggtgatcctcccacctcagcctcctgagtatctgagaccacaggcaagcgccactacacccagctaatttttgtattttttgtagagatggggttttgccatgttgcccagtcggtcttgaactcctgggctcaagcgatccgcccacctaggcctcccaaagtgttgggactacaggcgtgagccatcacgccccgcctgtcattctttaggttttaaatgttatctcctcagaagccttccttcaccgtccaatctaaaaaaagacacacacacagacacacattatccttcttcacagcacttgccagtctacatctactttatatgttcatttattgccttatgcaccagagagaaccgttcgggggctagaagccaagtcttcacgttttctgctgattttccgaacacctaccgccgtgtctagcacaaagtaagacctcaatctgctgaatcaatagattaattttttcaaccccaatatgccaatgttactaatacttctacagagaaaggacccacccaaatccccaaccgccaaggaacccgtccgtgctgctgaggcaggagaaagacaagtgctcttcaaacgccctcactcacggctccacccaggatgtgtcacgtgaccagcgacaccgtccctcaaacctggagtaccccacacacttcccctcgcatccaaggtcctccgcggggatcagtgtcacctccttccctccctgctggagctccactctgcctccccgcctcaccccgctctgactactgcgtcccattaccggctgtccgggtcctcagcgccaacaccaccgacgccatgctttcgatcactcacttccggtctcgaaaagtttctacttccgctatcaggagatctacttccgggccctgcgtggcagttgaaagagtggcgggagaagttgcaggtgagcgtccccggtcgcaggcctgcggattgggcagggcttccctcctgaacaccgctctgcagaatcttggtggctaaggtgtccaggagcctctgcagcggaccgccagcctgagaggcgcagagcttgtcgggcaggggcccgcttgtcccactcccctgatttgcagatgtcaacggaggcccagcgaagggtcagagatgaggccccctccctagtcattcaacttactctacttagccagctgtgtgccagatgctgtactaagcgcggtggatgcattattttatttaattctcactaccttataaaatgggtgctgttaccatccctgttttactaaggaagaaactgaggcctaggcaggttacatgtctccttctgggtcatacctacagtgttagtaaatgttcaagaaatgattagctttgcatatgacccagcaattctactcctaggtatatacacgaaagggatttgaaaacatacccccacaaaaacttgtatgtcagtgttcatagcagcattattcataacaggcaaaaaaaggaaacaaattaaatgtccaagtgatgaatggataaacaaaatgtagcatatccatacagtggaatattattcagtcatgaaaagcaattaactactgatacaggctacatcatagataaaccttgaaaacaagctgagtgaaaaaagtcaatcacaaaaggccacatagtgtatgattctatttatatgaaatatccagaataggcaaatgcatagagacagatttatggttgccaggagctggggagggagggaaaggacagtgacggcttaatggctgcaggaattctttttgaggtgataaaatagtgatgatggttgcacaacattgtgaatatactaaaatctactgaatgtacacttttaaaaggatattatgctgtgcaaattatatctctatttttatttttattttatttt

SEQ ID NO: 2860 - DNA, 6000 bp, Homo sapiens
tggcatttctcattttgtaacagtagtaaaagagtttaacactagttaactgtccagtaattaggcttcacattccaaatggagtgttgctgaggtctcagatgggcacaaatgcaaattacttttattaatacagaaaaaaagaagatcatttactaacttaccctctcccttgtgtttttctgctataagctgaaggtgctgaatgcaggcagtagcaaggtctaccactctatcaaccataaaacttccctctgtatcaataaaaactgcttcacctgccactcctccaaaacattctggtatctgcacatctactgccaactgcatactgtcaacagaaagatgacaaacaaccaaatcatgatgatgatctaaggtagtgtttttgaactccagataatgacaagttaggtatcactaaagttttataaatgtaaatatactccccaaggcaacagaaatgtctaactcttcatgactccagatataatgtgaaccaatcgactatatgtaaatcaactggattcggggagggcatgcctataaaaccaagattaaggatattttattttattttatttatgttttgagacggagtctcgctctgtcgcccaggctggagtgcagtgacgtgatccaggctcactgcaagctccgcctcccaggtttacgccattctcctgcctcagctgcccgagtagctaggactacaagcacccgccaccacgcccggctaattctttgtattttttagtagaaacggggtttcaccgtgttagccaggatggtctcgatctcctgacctcatgatctgcctgccttggcctcccaaagtgctgggattacaagcgtcagccactgcgcccagccaattaagaatattttaatcatttccaggcctctcaaaatggagccccttattatacataaatctaccttttttttttttcttttgagacagagtcttgctctgtcacccaagctggagtgcagtggcatgatctcggctcactgcaacctccacctcccaagtacaagcgattctcctgcctcagcctcccgaggagctgagactataggcgtgaaccaccatgcctggctaatttttttatttttagtagagatggggtttcgccatgttgactaggctggtcttgaactcctgatctcaggtgatccacccgcctcagcctcccaaagtgctgggattacaggtgtgagccaccatccccggcctcttttttttttgagatagggtctcactctgctgcccagtgatgtgattaaggctcactgcagttttgacctccccggctcaagctatcctcctgcctcagcctcccaagtagctaggaccacaggcatgtgccaccacactcagctaattttccatttttagtagagacgaggtctcactatgttgcccaggcaggcctcaaactcctgggctcaagcaatcctcctgcctcggcctcccaaagtgctgggattataggcatgagccactacccctagccataaatctactttcaaacatctgactttcaaatatagtctcaggaatgaataacgcagaaacttcctgtttaaccttatgactgcagtacaatttgcaaaagaaacactttttcacatcagaataattgcatacatttatcaagaagggataatgaagtaacacaaatagtaagctaatttttgtttaatgcacatacacacttaaaattaagagcacatatatatcttatttggtttcctgacgatagtacaaaatactactttcataatatgttattaaacccacccttaaaaggagaacactttattttaccataattgtgtttttccaacacctggtgcaccacaaatttctgttgttttcattaagggcactccacccccaagaatatcatctagtgctgaacagaaggtgattatgaagccctgggtatgctcctgctcaagaagttccagtgctgtacacttcttgtgtgactcagatgtaccagcatatcttggtttatttgtgagacattctcttctgataatttgcagagtttctaaggcttctgctttagatatcccaacttctgaaagtaaaataagaaaaaaagaaccctaattttagagatttaaaagtgtaacatgataatcgattgtctttattaatttgtagacaacagtgatgctaggagtggagaaacataaaaatgcaacattctatcaaccatttaatttttcagtttggccggacacagtggctcatgcctaaaatcccagtactttgggaggctgaggcagccagatcacctgaggtcaggagttgaagaccagcctggccaacatggtgaaactccgtctctactaaaaatacaaaaattagccgggcatggtggcacgcgttataattccagctacttgggaggctgaggcaggacaatcacttgaacctgcaccactgcactccagcctggatcgcaccactgcattccagcctggatgacagtgcgagactccgtctcaaaaaaaaaaaaaaaaaaattcagcttaataaaggtattcgttttcttagtcatcacataaagaattacctattacctcagaaacaattcaactaaagcatttctgagtacctacaagtgtctcaggaagcagaaataaaaatgtactcactattaccatatttttactatcccttttggtcttatgaagccataattatctcgctctcataaggtatacaaattatttttcagatgagaatgaaaatagatgttttaactgcctaaaacaaggtacaactttaagaagcacatatgcatgtattatttataataaaaacttttcatggaaataactgatgtaaaaaattcatgtatcactccaaactaatgagaacaattattcaaggcacaagcattttaaagaatacatttatgcttcctcgactacacaatttcacccatctgacagtgtggcctgagaaaagaaaatggcaattacaaaacaagctggtgaagaaataatggtgaggatgacatcacttatcagtttgatatatcagtgcttgatctgataagaatatgagccataaatatggggctaataaaagacaatggtgatgacagcatttaggaaatgaaaatcctatcaagagcctgaatgctggaattagattgcctgggtttgtaaatcctggcaccacttactgcatgactttgggcaagttacttcactttttcttttttgctcagatttttttcgtctataaaatgggaatgagacgatacatgtaaaaagcttggtagaatatcaagaccatctaaagtagtcaatagttgttagtgatcattattattcagggtctcacatttcttctttgaaaagccaacttgttgaagaaaaaagagcccatcaaatcttgggggacacagtctgcgcgcggtatgacttaaacagttaaggctgggtccacgagacttattctttagaggcgaattgaaacctctgtattttccatcagtaagggcagtaacttaaaattctgttccatcttcttcagtgaatagcacaggtccagacatgtcatagagagatgtgcacaacaagtgaccaccgccagcctcatatttgtatgtctcaggatgcagtggttcccatctgcaatgctctggaatatgaggttttgggtgtttcagttaattacgtaagagaatattctttctatgcttcctcaagattccggggattctactctctttctcattcttagtgtctctagtcctacacaaaatcctgcatttctgaaatttaacccttaccccttggatcttggaacagcaaaaattagacaaccaattctgactccagtatttcctaacccagttagcatgaaaagttacctaagctccccaagatatcagttctctcatccatatactgaatataataatctacgtaagcgggttgagggttaaatgagacaatcctcaaagcattcagcaggcattgccagaggaaaagcaattagtaaatgttttcacgaccacagttctcctaaccattcagacaacttgtaagtggagtcgaggagctctttcacgctgtaaacatggacgtgggaggaagcagaatctaacggagactgggctgaaggccgaggcgagagaacgaagactgaggcggcgctgacggcggccggtgtgcctcagcttgccatcaggagtcgttacctttgctaagctcggagggtttcacctctaggagttcctcagcagtctggaaccccgcagacaccagcttcacccgcaccgctggagacagcgggaaactcaccaaatcccgctgcatttcaaagcggaacgtcttcccgcgcatcgcaggctcacctgctaaccccggagcagccaaactccgcacgccctcgctggggcgtgcggcgtgacgtcagacgtaaagcggaaggggccggctctgcggcctggccgcacggggctccgggccttgcagctttgcgcagtcttgtaaattttcacacttatgcaccattccgttttgattccccaaaatcccatttagagattcctcatcaaatgtacaccctgactgtaaaacgatggacggagaccataggacggagagccaggcccagtgggttctccacgccacatttccttgcctccaccgtggcctgttaggtgaagcctcagagtcattaataggaatgatctcgagtgggagtagtgagcgtaacgggcacacactagccagttaccattattttggtgtgaaaagctcagggaacaatcattagaattaatctgcgtgctctttgtagagttgcagtctcttggctcttcccgctgaccgtcccccttttctgaccccccccccccgcaacgaccacattgcttttcccgccctcgcgagggattgtgggccagcccccaacggccgctgggagggatcagtccgcattccccgcacccacccacgtcttcccgggagtcgtatcccgagcatggaggttactgagaccgttatttcttcatggcctgcctagcttaagcagtagctggaaaagtaagcaactaatgtccccattagtgtgtctgggctcctggggtcctgagaaggaggggctgggctacacaagagctccttttgtggtacagacttgggaaggggtgttcaagcagtggtagtgaccgcctctaaattacagaacttcggggaggaaggcaagcagtttagaaggtggtttatgagttccttccttgcctaggtgagtgtaacttatttagcagggggtaacttattccctacctattggcgatttttttttttttttttttgagacagagtctcactgtgttgcccatgatggagtgcagtggcacgatgtcggctcactgcaaccttcgcctcccgggttcaagtgagtctcctgcctcagcctcttgagtacctgggattacaggcgcacgccaccatgcccggctaatttttgtattattattagagaaggggtttcaccatattggccaggctggtctcgaactcctgacctcgtgatccgcctgcctcggcctcccaaaatgctgggagtacaggcgtgagccaccgcgcccggccctgttggcaatgattcttagtcttgacttttcttcccagcttagaagaactttctaaatattgcaaatcagagccctctacatacttagatctaaaaaaggaaacaacgtatgttgagcactttagcaaatcccacacatttcaaatggccatagccatgccaaaaggaagataaggacatggaagctcagcatatagtttaatatcaattctgataaaagaaaaaaagctggccgggcgcagtggctcgtgcctgtaatcccagcactttgggaggtcgaggcaggtggatctctttgagctcatgagtttgagaccagcctcgacaacatggcgaaacactgtctgtaccaaaagtacaaa

SEQ ID NO: 2861 - DNA, 6000 bp, Homo sapiens
aaaaaataaacttctccccagctataacaaaaatttcatattattcctctcctatgtctccagaaacagcctagtcaacctgaaaatgtctcgttattggaatactctgacaggttaactatagacattaacagcaataggtccttcctacccttagaattacatcaagatagctacacaagtcagaaatgcaacatgtcagaaatactcaataaagatcctgatagattataagctccatgagggcagagaatctatcttgtttaccctgtcatctggcacataactagcatttaatcaatatttaatcttgttttagtgatctagtcttcagagtgctaatcctgaatgtagaccccagtcataggattactgtggatcaagtcaaagaaaataaaatatataaaagtactctacttcggcacttttacaattatagactttttttgttttgttttgtttttgagactgagttttcctcttgtcgcccaggctggagtacagtgtcataatatcggctcactgcaatctctgcctcccatgttccagcaattctcctgcctcagccttccaaatagctgggactataggtaccctccaccacccccagttaattttgtatttttagtagagacggggttttaccacatcgcccaggctggtcttgaactcctgacctcaagtgatctgccagcctcagcctcctaaagtgatgggattacaggtgtgagccacagtgtctggcctaattgtaaacatttttaaaaaacgtctcagcattagcattctgctgagctaggtattctataaggatttattccaactgaatatgcgcattagaatgctgtaaaaactgagaaacagactcagatttattatgtacttttttgtgtgataagtactgtatatgtgttaatttaatcttgaccaaaaccccaggagatattatcttctacttgcaggtgaggagactgagtaacttgctgaaggtcacatagttggtaacttccagacatgtgatacaaatccaaatctgtgtgactccgcagcccatgctggtttgcccatagcaatgtctctcaaattttttcatgaagtaacctcaagttgcaagaaaaaccaaaacatattcccggggggggtttgggagattactgaagtatccagtttaagcctgatgtgtctctgacctcatacttttctcttaaattttatttttatatttgcattttacccccacattttgtttttatttctatacatatatttttttttgagatggagtctcgctctgtcacagaggctggagtgcagtggcatgatcttggctcactgcaagctctgcctcccgggttcacaccattctcctgcctcagcctcccaagtagctgggactacaggtgcctgccaccacacccggctaattttttgtatttttagtagagatggggtttcaccgtgttagccaggatagtctatctcctgatctcgtgatccgcccacctcggcctcccaaagtgctgtgaaacaggcgtgagacatcacgctcagctaatttatttatttttagagggagtctctctctgtttccaggctagagtgcagtggcctgatctcactcactgcaacctctgcctcctgggttcaagctattctcctgcctcagcctcctaagtagctgggactataggcacacatcaacatgcccagctaatttttgtgtttttagtagagacagggtttcgtcatgttggccaggatggtcttgatctcttgacctcatgatccacccgccttggcctcccaaagtgctaggattacaggagtgagccaccgtgcccggcctaccccatgttttattaaagtttattttctttttcaaaaattttaatgatttatccacactacacagatgtaatgtctgcttaatataaaccatttcaaatgacttaggtaaatcatttaactcttccctccctgaaagattttttttgagaaaagtgattacacaagaaggtgcaccttccatatttatcccatagctttgtttagttcctagtgcgtggtttcaaaaacctggatcccagtttgaaagcatgactacagagcaaattgcattaaagacatcttaagaatgatgatgaaaataattattataggcaagggccagaagattttttttttttttttttctgagatggagtctcgctctgtcgcccaggctggaatgtggtggcgtgatctaggctcactgcaagctccgcctcctgggttcatgcaattctcctgcctcagcctcccgagtagctgggactacaggcgcccaccaccgcacccagctaattttttgtatttttagtagagacggggtttcatcatgttagccaggatggtctcgatctcctgaccttgtgatctgcagaagatattaatagcacttaaattatacagctatagatagagttgagtgggggtttttttgttttttttattttgctttgttttgtttttgagatggagtctcgctctgtcgcccagattggagtggagttacgcaatctcagctcactgcaacctcaacctcccgggctcaattggttctcccacctcagcctcccaagtagctgggactagaggcatgtaccaccatgctggctaatttttgtattttttgtagagatggggttttgccctgttgcccaggctggtctcaaactcctgagatcaagcgatgtgccctctttggcctcccaaagtgcttggattccaggcttaagccactgtgccaggccaaagtagttttgaactttccactgtcaacgaaagaaattctaaacacgactgattccactgagtttgaccaaactaactgaagacttattgttgaatgtggtaataccatgttttttcttcacccaagaatctgggtgctttataagcataagcatgaaatctccctgaagatagtatttatgcatccactgagcgctcaaatatagaccatattagaagttaagcaatgggttgagtggccaaccacattttggccagtcctacaagactttctttgacctaccaaatggggtataaatgcttctcgtattctccccgccagtagggactcaaaatcttaatagctcggggtagtaaaaaggatgctaggtttgaatcttggctttaagaaaactgtgctgaggtgttttgtttgtttgagacagggtttcactctatcacccaagctggagtgcagtggcgtgatcatagctcactcccaggctgaagggatcctcccaccacagacttctgagtagctgggacgaccggtgcatgccaccatgcccggctaattttttgtacttttggtacagacagtgtttcgccatgttgtcgaggctggtctcaaactcatgagctcaaagagatccacctgcctcgacctcccaaagtgctgggattacaggcacgagccactgcgcccggccagctttttttcttttatcagaattgatattaaactatatgctgagcttccatgtccttatcttccttttggcatggctatggccatttgaaatgtgtgggatttgctaaagtgctcaacatacgttgtttccttttttagatctaagtatgtagagggctctgatttgcaatatttagaaagttcttctaagctgggaagaaaagtcaagactaagaatcattgccaacagggccgggcgcggtggctcacgcctgtactcccagcattttgggaggccgaggcaggcggatcacgaggtcaggagttcgagaccagcctggccaatatggtgaaaccccttctctaataataatacaaaaattagccgggcatggtggcgtgcgcctgtaatcccaggtactcaagaggctgaggcaggagactcacttgaacccgggaggcgaaggttgcagtgagccgacatcgtgccactgcactccatcatgggcaacacagtgagactctgtctcaaaaaaaaaaaaaaaaaaatcgccaataggtagggaataagttaccccctgctaaataagttacactcacctaggcaaggaaggaactcataaaccaccttctaaactgcttgccttcctccccgaagttctgtaatttagaggcggtcactaccactgcttgaacaccccttcccaagtctgtaccacaaaaggagctcttgtgtagcccagcccctccttctcaggaccccaggagcccagacacactaatggggacattagttgcttacttttccagctactgcttaagctaggcaggccatgaagaaataacggtctcagtaacctccatgctcgggatacgactcccgggaagacgtgggtgggtgcggggaatgcggactgatccctcccagcggccgttgggggctggcccacaatccctcgcgagggcgggaaaagcaatgtggtcgttgcggggggggggggtcagaaaagggggacggtcagcgggaagagccaagagactgcaactctacaaagagcacgcagattaattctaatgattgttccctgagcttttcacaccaaaataatggtaactggctagtgtgtgcccgttacgctcactactcccactcgagatcattcctattaatgactctgaggcttcacctaacaggccacggtggaggcaaggaaatgtggcgtggagaacccactgggcctggctctccgtcctatggtctccgtccatcgttttacagtcagggtgtacatttgatgaggaatctctaaatgggattttggggaatcaaaacggaatggtgcataagtgtgaaaatttacaagactgcgcaaagctgcaaggcccggagccccgtgcggccaggccgcagagccggccccttccgctttacgtctgacgtcacgccgcacgccccagcgagggcgtgcggagtttggctgctccggggttagcaggtgagcctgcgatgcgcgggaagacgttccgctttgaaatgcagcgggatttggtgagtttcccgctgtctccagcggtgcgggtgaagctggtgtctgcggggttccagactgctgaggaactcctagaggtgaaaccctccgagcttagcaaaggtaacgactcctgatggcaagctgaggcacaccggccgccgtcagcgccgcctcagtcttcgttctctcgcctcggccttcagcccagtctccgttagattctgcttcctcccacgtccatgtttacagcgtgaaagagctcctcgactccacttacaagttgtctgaatggttaggagaactgtggtcgtgaaaacatttactaattgcttttcctctggcaatgcctgctgaatgctttgaggattgtctcatttaaccctcaacccgcttacgtagattattatattcagtatatggatgagagaactgatatcttggggagcttaggtaacttttcatgctaactgggttaggaaatactggagtcagaattggttgtctaatttttgctgttccaagatccaaggggtaagggttaaatttcagaaatgcaggattttgtgtaggactagagacactaagaatgagaaagagagtagaatccccggaatcttgaggaagcatagaaagaatattctcttacgtaattaactgaaacacccaaaacctcatattccagagcattgcagatgggaaccactgcatcctgagacatacaaatatgaggctggcggtggtcacttgttgtgcacatctctctatgacatgtctggacctgtgctattcactgaagaagatggaacagaattttaagttactgcccttactgatggaaaatacagaggtttcaattcgcctctaaagaataagtctcgtggacccagccttaactgtttaagtcataccgcgcgcagactgtgtcccccaagatttgatgggctcttttttcttcaacaagttggcttttcaaagaagaaatgtgagaccctgaataataatgat

SEQ ID NO: 2862 - DNA, 6000 bp, Homo sapiens
ttttttaagagttttctcatatataaaatgagtgtcataatagtactttggtcattcataagattgtaggaattcaatgaaataatgcatgtaatgtacttattgcaaaacttgtgcataataatttgtatcttggataaagactgagactactagattgtgagctttctgaagacgggttggctgtgtttagagaacttcatatctccagcacagagcatagttccccttagtatgttgtgtaagctgtgttgaatttatatttgtaaactaaaatattgtttcatttttttccaacagttttaacacaggctaagcggtatgctttttttatgccaactctgccaagtttggtctctttttgtcgagcatttcctccattgtatgaggatattatgtctttgctgatccaaatagggcaagtttgtgcctctgatgttgccactcagacaagagacattgatccaattattacacgtaagtggtaacttattttcaagggttatcttaatatctcaaacaaaaaggccaaattcctttccaaatttcttggccttaatgttttttttcccttatgttgtaggtcttcaacaaataaaggagaaaccaagtggatggtctcaaatctgtaaagattcatcttataaaaatggatccagggacactggaagcatggatcctgatgtacagctctgtcactgtattgaaagaacagtaattgaaataataaatatgagtgttagtggaatttaaaacaaaatttaaaacaacaaaaagttgtttgctgcatatacccaacatgaatctgcatattagtaacaactctaaactgaatgggaacagtaaagtattgtcttggaatcactaaaacaattcaattcaacatgagtatagtttagaactttatgagaattatgcttgcttgtttctgattggcacatctttggatctactttgctgatatgtttctattgtagcagctgagctttttttttttccactgggaacacatgtaagaaactcattattggaaagggaatttggccttgtatttagcttttgaagtgaagactgccatgcctttaatttcttataaaaatgagtctgtgggtagccctagtgtttattttaactgtgagcttgtaacagaatgtgacaaagatgcaaagatgggagaggaaaaaagggtaaagggaaaggagaattaaggaaataataggagttaaaaacacaagtagaaatctcaaagatttgcagtgcaagtaatagtaatgcaagttggaattctagttctcaagaaagagtattgagaagacttttaaaaaggcaagtagcttttgtaaatgatttctgtggaaatacagatgaggatttaaagatttcacatatttgcttcaatttttattaatatatgaagccatatgtttaaagagatacttgaataatttggaattttaagatactggtgtaaaagtgtttacagaaacatctttgttcaaagaagaacctgagagatctcatttagttttatgttttaaatttatttttataatgctttattaacttacctaatgctcagaggggggaaatatgtatcaaattaaatgaaggtagagcaataaaacccactggattaaagagctcttggtttgtcatcaggattataattcatatcttactttgagaagatctttgagtaagaaaatgcagtgtttgaacctgaggaaaagttaaagtgtagaaaatattgtcttgccgaaggattttgcagtcctctgtcagtaacttccattgattaggcagacatattcaggtaaaccctaatcattaaaaaaaaattatcaatgtagaaagtaattcccttttttctctctgagatatacctcaatcacacacttccccacccccacttgaaacagacctcttcacttgtgttttttttttttttttcctgaggtggagtcttcccctgttgcccaggctggagtgcagtgggatgatcttggctcactgcaacttctgccacctgggttcaagggattctcgtgcctcaacctcctgagtagctgggactgcaggcacgcgccacctgtatttttgtatttttagtaaagacgggggtttgccatgttgcccagactggttttgaactcctggcctcaggtgatctgcccaccttggcctcccaaagtgctgggattacaggtgtgagccaccgcacctggccagaccgcttcacttgtaaaagaaattaggctaataagaaggtgtagtttttgagaaatgaaatttaactttagccttttcactagtaaatagtcacatctcattttcttcctttgtaaaatggggttactactggccctacctcatattctatgagaatgagtttgtagctgtttcaaatcatgaagtgcatagtatcacatgtgatagaatatttataactttttattagatgcttaatgttcaattaagtaattttgatgtgaaaaataaaagtaataaaagtatcttaaaaatagcataagaattttcatatttttaaacaaggcagttttgtagtcccttaagattaaatacaactgctccttttttttttaaactgaggccttgcgatattttgtgtgaatagatatgccctaggagttcagaaaaagttaaaagtatgttttctaattaaatgcagtgcacattcctggatcaatattcaaagactggtcataacctgctgtgttaaaataatcacatatgctctttttcatcagatttgttgatgatgtaaataaaatgtgtaaatatattagtaaatgttaatattcatgtattttaagttaaggttataaaatttgtcacaatgtgtttttttattcaagtgaaaacagatgtgtgcagctattttgaatattggtttataaacattcatattctttatcaaacgaacctgtagtttttgtgtttcattccactagagttaacctgaagggaacggttcaagggactgtattcgaggtctgtatggctccagggcctacgtgtatccctttctgttatgccacatacattaaatggcaatgcaaggtgagagccagttgaaactcttagtaatttaggagaggaaaatgagagtagttatactagagcagttactcaaaagagttgattttttttttttttgagacggagtctcgctctgtctcccaggctggagtgcagtggcgccatctcggctcactgcaagctccgcctcctgggttcacgccattctcctgcctcagtctcccgagtagctgggactacaggcgcccgccaccacgcccggctaattttttgtatttttagtagagacggggtttcaccgtgttagccaggatggtcttggtctcctgacctggtgatccgcctgcctcggcctcccaaagtgctgggattacaggcgtgagccactgcgcccggccaagagttgatgttttaaaaattataaaagagaaatgacaatttgaaggtatttttaaggatttatttttaaacattatccttcctttcattgtcttaacagtaaattacttcatctttgctcattcatatgtattttcacattactgaatccctaacacccagtttggggtttgctttgccttttttcacttaaccttatatgggattttttcttgcaagtttaatttttataagtttattggcttcataatgtattgaattcatctgtcataaccacctccatattactagactgggaagttcataatttttttcagtattaccaatagatattattgtcaattgcggtatcacattttctttcgtttagattacgtctttaggataaatatctggagctcagattactaggtcaaagggtagagtttatttttatgactacaagttttgtcatttttggtaagatatatcacaattgacaatgaggcaaacaaatcaactagccccctcctgctctttcttcccagcaaactccttccccaaactagttacttgaatttgagaaacagtatgaggttttgccttttggagacattattatttgagccaagtttaggttatacagattttttaaaaaaataacatgatttggcaagatcatgatgaacctccttttctttgagtaaattaaagtactactggcaaataataaactggtcttaggagggatggaaggcggataagccttaatggaagtagaagtgatctgatactggagaccctgagagcttgtctctggcttattttagcatccgggaaagccttgaatattatgaaagatagattgtagcccgatgtcacagagccttcttacttaagtttggctcagcagtctggcaattcccgcctgagtcttcgctatcctggctactgcaaagctgggtaatttaaattgagtggcactgataaatgctcaaagaacttggcaaagcttaaagatacttcctttccgctggtctacggacgtgaagaatgagacttccagtttccaaggaatttgctgcatagactctatcgccggtttcaaaagtcaaactgagacgactttctactttaaacaaacactagggatttgctggagtggcgacaaccttccgccgcgtaccttgagcccttgtttttttttttttttttcggagacttccattggatgccgaagttctcgccccctcacctcgcaccgggactggttgattcctggccttggcgggtgattggtcgagctcgctgggctattgggcgctgggagtcgagggggcgggaggcgggaattcgtctcgggttgtgtggttgaggggtctggtgggtcgaggaaaggtaacggcggccccagtcctgcacacaaggccggggaagtagcagcacccccaggaagagggaggaggaagggctcgtgccctttcttctcttccagggctccgctttatttgctctcagaagtcggtttcctttccttttcttcagtgaatcggagctcagagcgttgcttcggtttccctccagacaggcaagtcggagggaagtccacggaaagggcttgagttcttctgcacagcctgcgggcccatgggtggtgactggatcaccagggtctcggggatctcaactggctgggggaggagggagatacggggcagaaaacctgaggagggagcctatccttacctcctttgagcgcaggcctgttcttagcccgggcgctgcgttaattcttggcgggaggcagaggggtgtgtttatcctttatgcaatgtttgggggaagctaccccattttgacactattgttgccacagccggggtacaggacgggctgatttctagattatatctgagtaactaggccagcgttgagttgttgattcatattaagaggttagattccaccatacctcattctcagagctttacagatagaatcgcaaaatgttagagctggaaaataccctagaataatggttcttcttttggagcacacaagcagtggtgaatgttattattggcttcataatctattgaattgctattttaaccatctcttcgtccccaggttgaatttacaattttttcccacgactgcaaataattccttatttaataacagtgcatgtaatttcccccgctattttgatttccttgagatatatttacgggaagagaaatctatggactttttcttcagaaaaatgcaatcatgtacagaaacttatgcttgcaatttcaagaggtcattgtctctgaattacatccgtggatcctaggttaagaaaagtggtttagaagaggtgaggattaaagtgatcctcatctgtatcagatcctgggttaggtacattctgccctggctaattttcataaaaaccctgtcaggtaagtagtagtatttcaattccatatatggagaaacaagctctgagaagttaagtgattcacacagtggaattcaaacttaggattgccttactccaaagcccatcctgtt

SEQ ID NO: 2863 - DNA, 6000 bp, Homo sapiens
gagattgcagtgagcagagattgcacaccagcctgggtgacagagcaagactccatctcaaaaaaaaaaaaaaaaagaaaggtgctatgcggggctggaaggtggctccaggtgtgaagctgctcaggaagttgtgtggtttcagtgtgaatctaacagaagtgtttctgaaactgatttacctttctaagtcgtgttaattagggtgagagataaattcaatgttgtttgaaaaatgagagacagtttgagacagatgcactggagctattggagtgaaaccatgttcctgagggcagcgatcaccctgaaagtgggttttgcactgtgaaagggattcatctcctggtcttgcaggattcatgcagagcctggcctctgttaatgctatcaaacctatgtacaatgggtcagccacctcttttcatataagttcatattctcttgggctctggtaggaaaattaggacttggaaacttagtgagaaagggaaaatctaacgtgctaagacatcctacttggatgtaattgattcctatctttgcttaaagacatactttagtaggagtaaggagttctctctgtggcttaaaagatgagctcaggacaagcagtttctttcagtctgttcacaaaggcctgttctttggtttgtggctgcagctgctattttcagagcctggctgcgttgatgcgttgcagatttgtgtgtgcttcctactttggtctacaggttgtgatttgggaaccctggttaagaggtagaagaagtgctcatggtgaatttcccaggtgaaaacactgaaacattgcatcatgactgcctcattttatttaaataagtgtcttggctcaaggttggacattgtctctgtagccagtgaaacacactccatgaccaggtttcaggacaaatcaccacagtccgatttaataccccactggggaccctgagacatggtagccttgactccagcctcaagcttggcatctttacccacagatgagcctcacactgccttcattcattcattctctacttccattctctgaatttggattttgccattaaaatttaatgttatagccaggtgtggtggctcacacctgtaatcccagcactttgggaggccaagatgggaggatcgcttgagtccaggagttcaagaccagcctgggtaacatagcagcatcctgttcatacaaaaaaataaaaaattagccaggcgtggcggtgcctgcgtgtagtcctagctactcaggtggctgaggtgagaggatcgcttgagcccagaagttcaaggcttcagtgagctgtgatcacaccactgctgggtgacacagcaagactccgtctcaaaaaagaaaagaaaagagagagagatagaaaggaaagaaggaaggagagagggagagagaacgaaggaaaggtaagaaagaaaaagaaaagtagccgggtgtggtgacccatgcctgtaatcccagctaccgggggagccgaggcaggagaatagcttgaacccaggaggctgaggtttcagtgagccgagatcacgccactgcacttcagcctgggtgacagagtgagactccttcaaaaaaaaaaaaaaaaaaaaaaagagagagagaaagggaagaaggaaagaagggagggagggaggaacatttatcagcagtggcacgcttgagaaaccctctaagggtgagcagaatggcgagggccctgaagagccctgctactgacaagcccccgtcaccctcttcagccttgcttctcattacccctcaatattttgtggacgattaaggccaacattcaatcgagctcattaaattatgagtttctgacagggtgcagtggctcatgcctgtaatccctttggaggccaagacaggtggatcccttgaggtcaggaattcaagaccagcctggccaacatggtgaaaccctgtctctactgaaaattacccaggcatggtggtgagtgcctgtaatcccagctacttgggaagctggggcaagagaatcacttgaacccgggaggcggaggttgcaatgagctgagatcctgctattgcactccagcctgagtgacaagagcaaaactctgcctcaaaaaataaaaaataaaaaaggccaggcacggtgggtcacgcctgtaatcccagtactttgggggtccaaagcaggcagatcacctgaggtcaggagttcaagaccagcctggacaacatggtgaaaccccgtctctaccgaaaatacaaaaattagctgggcgtagtggtgcacatctgtaatgccagctactcgggagactgaggcaggagaatagcttcaacctggaaggtggaggttacagtgagccgagatcaagccattgcattccagcctgagtgacaagagtgagactccatctcaaatacatacatacataaataaataaataatgagtttattgggggaccattgtattctaaacacagcagactaccaaagcccgcggcccatggtcagtgcccagtaagtggggactgaatgcccgaatagcttcttcctaccctgcccgctgccccccaccactgcacagacaccccggatacacagcttgtatttaacttaaaaaaaatcatacaaggttgcaaatatcaacagctcaaggtggcttaaacaaaaaacaacagtagaagggcacagggcgcctcctggaccccaccctgggaggtgtgtggttgctctcactcctgcagcctctttaaggaccacttctctgctccttagtgcacttgtgggaggcagctgtaaccaagctcctgaggtttgatgtctctgtaaaatgggtgtgcagcatgtgcatgtgtgtgtgtctaggcaggcagttcccacaatggcaggcagaatccccaaaaaggcatccgtaagagcatgatttcctagacttcagctggtttatttcatcttcccaaatattgatatccgagtagaccattattgaatctttttacattatgtatatttttgaccaggcgcagtggctcacacctgtaatcccagcactttggaggccaaagcaggcatatcacctgagcccagaccagcttggccaacatagtgaaaccccatctctactacagaaaaaaaaaaaatacaaaaatcagctgggggggggtggtgcttgcctgtagtcccagctactgaggaggctgaggcaggagaatcgcttgaacccaggaggcggaggttgcagtgagattgtgccactgcactccagcctgagtgacagacagagtgagactctatctcaaaaaacaaaaaaattttttaaaaatttatatttttacttaaatgtgtttatttgtttttattattattttttgagatggagtctttctctgtcacccaggctggagtgcagtagcacgatctcagctcactgcaacctccgcctcccagttcaagtgattctcctgcctcggcctcctgggtagctgggactacaggtgcgtgccaccacgcctggctaattttttgtatttttagtagagacggggtttcaccatgttggccaggatggtctcaatctcttgatctcgtgatctgcccacctcagcctcccaaagtgctgggattacaagcgtgagccactgtgcccggccttaaatttatttttaagggatttttttaaaatcactgctataaaagtaaaacaagtactggttgccatgaattgaaagtatttgtgggccatgtgcagtggctaacccctgtaatcctaacactttggggggccaaggtgtgaggatcacttgaacccaggatggcttaaaccctttgaggagtttgaggcaagcctgggcaacatagtgaggccccatctctatttaagaataaataaataaaaataaaaatgtattttaaagataaatacaatgaaaacaaaacaatatcttaagttccagctggatgcctttggggccaaagacttggagcactaggtctggaaacaggagtgaacgcatcagtcacacctttcctggagctgtcaaatttggacggggagattccaacaataaacccataaatcctctaacacgtgggcatgtgccaggaagaaccaagcaagctagggaaaatagagaggtggcagggatcagggaaaaggcacactctgaggttgggagtggggacaaggaaggcctcctggagaaggtcacgtctctcatggaacatcttctctgtgggagaaacagccagtgcaaaggcctgaggctcatggtggattctccacccacccagtgtggggaacgctgcatcatcaatcttaagcttggtaccattgctcactctcgtaatgaatgtatctgcctcaagcacattttttttttttcagacagagtctcgctctgtcacccaggctggagtgcagtggtgcaatctcggctcactgcagcctcaacctcctgggttcaagcaattctcgtgcctcagcctccctagtagctgggattacaggcatgcgctaccacacttggctaatttttttgtattttttgtagagacagggtttggccatgctggccatgctggtctcaaacccctggcctcaagtgatcctcctgccttggcctcccaaagtgcttggattacaggcctgagccaccacacccagccctagcacactttaatgagtactacccaagtgcattaggtactgagaaatgagtgagaatgattgccggcttccaatcaaccctcgtgtgcagggtctgggttcttctcagttcatttaggaactgttaaagctgtgaggtcagccccgctcacaagggtctggattatacagcaagattattttgcttttctttatttttccccaccccactaatcgtgctcctaaagcaagattattgatctgtaatctgaaacgtaactgacaagctgaggggatctccccaggaagggaagctacttgagaaactgaatttagatcagaagttgattgttcagaatacagctgagcccagagattgcatggcaccaagagaggtttctgtcaagccgtcccgttccgagatgccccatcgcaccaacgaagcaactgctgagcaggttggcactaacacgagctggcgtttgtccagaccttaagactctttaaatagcttttcatatatttaatcctcacattgcctatgtgaatataagcgtaattatctccattttacagatgaggaaatccgaagttcagggagggtaaatggtttaccaaggtcagatgaccagtgttaatcgtgaggtaattagccttagattagggagaggtagtttgatttaaatgatatctgacataatatacgggtttagacatttttggctccaaccagtgatgccagtccaggaaaatgttacacctgctcagatgttaaccctgctgcgggctggaggagaaggcaccctcaccccaaacctccccaggagaagaaaaccctgcagctatcagaagttttagtaaaacaactatcaacagtccatgcaactggctacataatttgtgtttgtgttgcaacactgtccaaattgcaacattttcatcaaaatagaaaactgaaatcccccatctttaccctatgggccaggtcctcctggggtgaagggggagctgggatttttttttttttttttttttttgagatggagtcttgctctgtcgcccagactggagtgcaatggcgcgatctcggtttactgcaacctccgcctcccgggttcacgccattctgctgcctcagcctcccaacccccaaccagtagctggaactacagctaccacgcccggctaattttttgaatttttagtagagaaggggtttcaccgtgttagccaggatggtctcgatctcctgacctcgtgatccgcccaccttggcctcccaaagtgctgggattacaggcgtgagccaccgcgcctgggcagggggtgctgggattctaatccctcatg

SEQ ID NO: 2864 - DNA, 6000 bp, Homo sapiens
tccagcctaggctagagagtgagaccctctcaaaaacaaacaaaaaaactggaaataggtaaatttctttttctgtacagagaacttctttctatgttaaaggtagaatttcctattaaacagataggttactgtattaaagttttctgataccttagttacatgactttaagttgggtctagacagcaacatgttgaatgtcactcattcttatcacttatgccctactccatcaaaagtatacttgaatacagccatcacgaacctaaaaacagaacaacaaccctaatccaaagatcagtgagcttaactatgtaaaatttgaatacaaacttactgacttacgggaggcgggggtggggggaccatttaaacagacagatctggacattagccttatgctcaatcttcaagttaaaaagacacatcagaggtcatttagagatcaatttagtattcaaatatattgctcacttctatttgaagctacttcacctagatcagagagtttacatttgtaaatgtaacttcagtatacaacgtccaggggcacagccactctaaagtgccacaaaagtaaactgtttaagtggccaaagaaattaagaatatgtaacaaatcctgtgttcccacagcaccttgtcacagctctaatacagatctcatcacggtatcatctctctctccccatactgcagatgtggaggtactgtgctcaagcatcagccctaacaccttgcacaatgcctagcatacagcaggtgctcaatatttgttgaataaacaaaaactatcaagctggttgggcgtggtggctcatgcctgtaatcctagcactttggaacaccaagacaggcagatcactggaggtcaggagttcgagacccagcctggccaacatggagaaaccctgtctctactaaaaataaaaaaaattaaccaggcatggtggtgcatgcctgtaatcccagctactcaggatgctgaggcaagagaatcgcttgaacccaggaggcagaggttgcagtgagcccagattgtgccactgcactccagcctgggtgacagagcaaggctctgactcaaaaaaaaaaaaaacaaaaccctatcaagctatcccggctcaccaaaactgtgagacccatcaaagaagcccatttttccaactaaacctcaacacgccttctccttggagaagctactaactaaagcacgagatcaacacccaggttaccatgagacaggatttcttgaaaagcacagaaacaaatgttgtatcacactggttaaagatcaaaagctcagccaggcacagtggctcctgcctgtgatcccagcactttgggaggctgaggcaggtggatcacctgaggtcaggagttcgagaccagcctggccaacatggtgaaaccccatctctactaaaaatacaaaaatcagctgggcgtggtggcgggcacctgtaatcccagctactcaggaggctgaggcaggagaatcatcacctgaacccaggaggtggaggctgcagtgagccgagatcacgccattgcactccagcctcggcgacaagaggaaaactctgtctcaaaaaaaaaaattcagtagctcatacgttcacacatctcaagcccaagtaatatgatcttggaccaataaagcttttaaataaaatatcgtaaatatactttgcatactgtattaaaatcaaacattttacacattgtaaaatcatcctatgagagcagaggggtggaccagtgggtacataaacatgcataggaaactataacattgcttaacttcatacgtgcccgttaatgggggcctaatctaatattatgctcctgcaacaaaaataaaaactaagaaggaagaatgagaagagcaacaaaccagtctgggggtgcaaccagtaaagagtctgcagacttcacagaggccaatttttcaatactctaccatgtaactacctccaaagtccaatgtaacaaagctatgcaatgccttgtaattttctttctgaatggctgacaagttttaacaaaatatggcatagaatctatacacacatcctgttagtttccttgtaacaagaaccatgagaaacctctcctataccagaaaggaagaagaaacatatattcccatatagaacattttcaaacctactatgttaaatgactactggaatgaccagtaggatctaaaagttcactgaaattaagacccaaatcttctcccctgcaaactatcagaagggcctacccaaattgctcttaatcatttaaaaaatgtgtttaaattagaatatgaatagtgttcatgatcatcattttactcaccttactaacacctactccagtaaacctggcctccaataattcctgccgtcgtgggtccaggctatgcaattcttccatcatttctgctgaaaaagaaaaagtaggctgtgaaaccataaacactaaaatgtgaggaggcaattttctgtagaacaaaactcacagtaattatttcactgaaagatcaaatgcaggtaaatctcaagtaaatatagcatacaagtggtagactactatgtgctgcatcaaacagtaatatattgaaaagttttaaagcagctcagaagtcctcttctatgacagccactttttcttccctagttctgatttgattttaacagcaaaaataaacccctcaaacccttcatataatttctgtaaaagttgagcacaggggaaagaacaaaacaagaactagcctgcaaaaagaaaattccttctatcagccttaatctagctaagtatcttcagatatttatttcccactcaggaagtagtccttaaactaaaaatatgaatcattgacaataatttcaaaagaatataggatgaatcagaagctacaaataactgcaaaatcactattatacagctcctgtctctgaagagctcacagtagctcatgagaaaaggaattattttaaatttaatagagagcccacggtaaaaccatccacctccattcactcagtaaattaatatagctccataacaatccctttaaaaaatctttttctgaccactccctgcagtagttttctcttgattctggacatctgcttttagcccttcttccaagcagggaggggcaggaggacaccatttttaaacttccataaccaattaatgcacaggctactttcagcaaatatgttcatcctttgcaagagaccaactcctacacgacccatttaaaacctctctttaatattaacagtggaaaagaaacatattacatagaaccccttcgaacacattattaagtagttggaatggttggtgtgattttaaagttactgaaaagatgaatcgaacattctcctctgcaatccaacaactctacaatctccagtaacaacccccttacaagtccttcagtttcatttcccttcctggattgagagcctggggcaaaggggaatgaaaaggtgacaaattaaagtttcacccacacatgcaagtgcaggttagagagagaattaggaaattctcagaaaggttgaaatgcatctttacaaaaagaaaaagaaggaaaaaaaagagactgggagaatgagtttcccccgtggccttcctcgcgtcttgccctgccctaatcgaggtcggaatggcaaaggttgcagtctctcccaaaccccaaggtctctcgcaacacttcccaaacctccatccccaggcccggcccggaaaatgacgccccggcggttattccgtttaatgtcaactcatgttaaggaaatagccactccgtctaattccagcggggccttggactgggatcctccctgcagcccacagccgggaagcaggagcgatggggcctggtcccggcgcccctcgccggctccaaactttccccaactccaggcccacctgtcacggaggaagggagggccggctctcgggggcgcccgggaggctgccgaggcctccagctgcctgggggcccccgtctctcctccggccgccggccccaatcccaggccggggccgcctgggcctcccccatcttctgcccggcccctcagcgacccgcagccctcagggagcccctcccgcctcagcgcccaggagctgcggtccggagccggccccgagctgggcccaggtcgcaggctcctcaggccaaaggggtccccaggacggttaatgccccaggcctggagtcctcccccgcccggggctcagcctctcacctgccgccgccgccgccgccgctccacgctcctcccgggaggggccccgacccgacccggctgcggaccgctccgctctccccctgggcaggcccggggcggagccggggcctctcctgagcgccgcaaccccccgcccgggcagccgccgccggcgccgggctccacgagagggcgggcgggggagggggggcacgaaggccgcagatccccgggctcgcgtacagagccaggcgcccgacgcgggcccgggcccgggcggccgcggggggcgcgggaccggcctcctggcgccggacaaaggccaagggaggcgcaggagggcccaggccgggccaggaggtgggggcccgctcggctgggggccactcgggtgcggcgcggagggcgggggggtcggaaccgctggtgcccaggacccgcctccggccccttaatccggatcggttcggtccggattagtagtgatcggtgtaaacacactagtgaaaccgcgtgtttcctcgcgagatttgcacggctgggaggcggggggggtcctgggggggtgggggaagcgccgacagtgggggagcagggggaggggacgaggaaggtgggggggggtccccgctgccccggcgccccgccttctccaatcagcggccgcgctgccgggcaggggttaaccaggggaccccgcgccggcggaggaagccgcgcctcgccggacggctgagggcgggcgacgggcggcgccggctgacgggccgcaacgcgaggggaggtccggcggcccggggcgccctgcgactgcccgaggccggaggcccggaggacccgccgccgcctttgtgtcgccggcccccgccccgctggactggcccgggccggggcggttgggccggcgctgaaggggcttggccgcccgggtccacccgttcccggatccgcctcgccggcccccgcgcccgcccaacccctgcccagcccctcggctccgcgagtttgggtgagaagtgcggcggcttttcccagggatggagtttagaggacgctaatcctatgtgtgagcggcggaccccgcccggacttcccggaggcgcccggttagtgaggcgacggcgcccacccgcgttcgcgggctcccggccgccactccccggagccgccggcccgccccagccccgcgcgtcgcccgggagggcgggctgcactccctccacgtacctggctggcagagcgtctccagggacaaaaggtgccctgggatcaaagccgagcccccgcccccgcggggatgctgccctccggaaggaggggcgctgcccccaaggtactctccccgggcacccagggggaggttccatttcaacctccgatgaaaaacacggccctcccgggtacttaggagggtctgagggtaagtgccaagatggagaaaacacgccggcccctcacagagtatctcctgaggaatgagaactatctagcgggcaaggagggcttcctgcatagcagagggcaccccctctgatcccccaaggccaagggaaaaaaatcactcttcaccggcgcccctgagccaggacaggctccagtgcagccacccaccttataattttccgcggatgctgccttgatcagatgtctgaagatgactttaaggactacaagcaaatctcaagggaaaaattcagaccttgaacaacagccttgaactttttcagggttagacaagtactccccagtggagtt

SEQ ID NO: 2865 - DNA, 6000 bp, Homo sapiens
ccggccctgtatttttttttaatgacataattttatttatttatttacttttatttgagagggcgtctagctctgttgcctgggctggagtgcagtggtgcggtctcggcttactgcaagctccacctcctgggttcatgccattctcctgcctcagcctcccaagtagccgggactacaggtgccagccaccacacccggctaattttttttttatttttagtagagactgggtttcaccttagccaggatggtctcgatctcctgacctcgtgatctgcccgcctcggcctaccaaagtgctggtattacaggtgttgagccaccgcgcccggcctagaagacggaagtttgcatgttgcccaggctggtctccaactcctggggtcaagtgatccactgcctcggcctcccaatgtgctgggattacaggcgtgagccactacacctggcctcttttttttttttttttaagagacaaggtttcaatatattgcccaagctagactcaaactcctggcctcaagcaaccctcctgcctcagcctcctaagaggctggaactacagacaggtgcacgccactatgcttggctcctgtctatggcggaggttgcagtgagcagagattgtgccattgcactccatcctgggcgatagagccaaactttgtctcaaacaacaacaaaatccccttagagctctttcctagcaaccaaacgtttttccattttgttaggaattggaagaagagaggaaataactggctaagtaactactctatatcaagcacggttacaaggcattttccaacattatttcaattttaatgaaagctgctcatgaaattaggtttactgggtcacagttttcagatgaggaacctgggacaggtgaagggacagaattggaacccagttctgtcataccacagatgccccacctgttctacactggcctgtcaagaataacaataataataattattattttagagagaggcctgctgtgttggccaggtggactgcagtggcacgacctcggctcactgcaaccttcgactcccaggttcaagcgattctcctgcctcagtctcccgactagctgggattacaggtgcccaccaccacgctcagctaatttaaaaaatatttttagcagagatggggtttcaccatgttggccaggctggatctcaatctcctgacctcgtgatccacccgccttggcctcccaaagtgctaggattacaggtgtgagccaccgcgccaggcccaatgattattttaaataataattattttttttgagacggagtctcgctctgtcacccaggctggagtgcagtggtgtgatctcggctcactgcaacctccgcctcctgggttcaagcgattctcctgccttagcctcccgagtagctgggactacaggcgcccgccaccacgcctggctaatttttttgtatttttagtagagacagggtttcaccgtgttaagacaggatggtctcgacctcctgacctcatgatccaccgcctcggcctcccaaaatgctgtgattacaggcgtgagccaccgctcccagccttaaataattacttttattttattatcattatttttgagacagggtctcactctgtcacccagaatggagtgcagtggtgccatcttggctcactgcaacctccgcctcctgggttcaagcaaaattctcctgtctcaacctcccaagtagctgaaagtacaggtacgtaccactatgccgagctaatttttgtatttttagtagacacggggtttcaccatgttggccaggctggtctcgaactgctggcctcaagtgatccacccgccttagcctcccagagtgctgggattacaggcgtgagctaccgcacccagcctactttgaaaaatgggatcatcggccaggcgcggtggctcatgcctgtaatcacagcactttgggaggccgaggtgggcggatcacgaggtcaggagttcgagaccagtctggccaacatagtgaaactccgtctctactaaaaacacaaaaaataagccaggtgtggtggtgtgcgcctgtaatcccagctagttgggaggctgaggcgggagaatcgcatgaacccaggagaaagaggttgcagcaagctgagattgtgccactgcacttcagcccgggcgacagtgtgagactctgtcaccaaaataaaataaaataaaataaaataaaaagatcctctagcccaaatccctccatcacagaagcagttggagaagtttgaaaaggttagatgataggcccatgtggcttgtctgtggaaagagctaggctgcaagacacctctgactccattgagtgctttctcttactctcctttcccgatttaagacattaaatcatttaagacagtgtcatttggtcgagtgcggtggctaacgcttgaaatcccagcactttgggaggctgagatgggcggatcaactgaggtcaggaattcgagaccaacgtggccaacatggcaaaacctcgattctaccaaaaaagaaaaaaaaaaaaaattagccgggcctggtagcgcgtgcctgtaatcccggctactcaggaggctgaggcagggagaactgcttgaacccgggtggcagaggttgcagtgagccaagatcgcaccactgcactccagcctgggcgacagagcgagactctgtctcaaaaaaaaaaaattttttttaaaaagacagtgtcatttgatggagttgctttcttgatcgttggctgcaattaaagacctagcctcactgtcttttgtgttgccttggaccggctcttaggttctaccgccctaacaggcagtggaggctggcctcgagtggtagtcctccatcttgccctcttttcctaccctctacccccaacccgcgagctgctctcctgtcttcttccaacactgttctctttgggaatatgcatgtccaacttcccaagcagtctgggatctggagtaagatgactcttggtttaatgaagtttttccacagtgcttgcatgtgccccaagggtttggaaggttggagaactaacaaaaagcaaagagccatcctgtgtcgtttcggcaggtctgtgttctgttaaaatatggaagaattaagagaagaacgaagaaataagggcagaaactccactggggagtacttgtctaaccctgaaaaagttcaaggctgttgttcaaggtctgaatttttcccttgagatttgcttgtagtccttaaagtcatcttcagacatctgatcaaggcagcatccgcggaaaattataaggtgggtggctgcactggagcctgtcctggctcaggggcgccggtgaagagtgatttttttcccttggccttgggggatcagagggggtgccctctgctatgcaggaagccctccttgcccgctagatagttctcattcctcaggagatactctgtgaggggccggcgtgttttctccatcttggcacttaccctcagaccctcctaagtacccgggagggccgtgtttttcatcggaggttgaaatggaacctccccctgggtgcccggggagagtaccttgggggcagcgcccctccttccggagggcagcatccccgcgggggcgggggctcggctttgatcccagggcaccttttgtccctggagacgctctgccagccaggtacgtggagggagtgcagcccgccctcccgggcgacgcgcggggctggggcgggccggcggctccggggagtggcggccgggagcccgcgaacgcgggtgggcgccgtcgcctcactaaccgggcgcctccgggaagtccgggcggggtccgccgctcacacataggattagcgtcctctaaactccatccctgggaaaagccgccgcacttctcacccaaactcgcggagccgaggggctgggcaggggttgggcgggcgcgggggccggcgaggcggatccgggaacgggtggacccgggcggccaagccccttcagcgccggcccaaccgccccggcccgggccagtccagcggggcgggggccggcgacacaaaggcggcggcgggtcctccgggcctccggcctcgggcagtcgcagggcgccccgggccgccggacctcccctcgcgttgcggcccgtcagccggcgccgcccgtcgcccgccctcagccgtccggcgaggcgcggcttcctccgccggcgcggggtcccctggttaacccctgcccggcagcgcggccgctgattggagaaggcggggcgccggggcagcggggacccccccccaccttcctcgtcccctccccctgctcccccactgtcggcgcttcccccacccccccaggaccccccccgcctcccagccgtgcaaatctcgcgaggaaacacgcggtttcactagtgtgtttacaccgatcactactaatccggaccgaaccgatccggattaaggggccggaggcgggtcctgggcaccagcggttccgacccccccgccctccgcgccgcacccgagtggcccccagccgagcgggcccccacctcctggcccggcctgggccctcctgcgcctcccttggcctttgtccggcgccaggaggccggtcccgcgccccccgcggccgcccgggcccgggcccgcgtcgggcgcctggctctgtacgcgagcccggggatctgcggccttcgtgccccccctcccccgcccgccctctcgtggagcccggcgccggcggcggctgcccgggcggggggttgcggcgctcaggagaggccccggctccgccccgggcctgcccagggggagagcggagcggtccgcagccgggtcgggtcggggcccctcccgggaggagcgtggagcggcggcggcggcggcggcaggtgagaggctgagccccgggcgggggaggactccaggcctggggcattaaccgtcctggggacccctttggcctgaggagcctgcgacctgggcccagctcggggccggctccggaccgcagctcctgggcgctgaggcgggaggggctccctgagggctgcgggtcgctgaggggccgggcagaagatgggggaggcccaggcggccccggcctgggattggggccggcggccggaggagagacgggggcccccaggcagctggaggcctcggcagcctcccgggcgcccccgagagccggccctcccttcctccgtgacaggtgggcctggagttggggaaagtttggagccggcgaggggcgccgggaccaggccccatcgctcctgcttcccggctgtgggctgcagggaggatcccagtccaaggccccgctggaattagacggagtggctatttccttaacatgagttgacattaaacggaataaccgccggggcgtcattttccgggccgggcctggggatggaggtttgggaagtgttgcgagagaccttggggtttgggagagactgcaacctttgccattccgacctcgattagggcagggcaagacgcgaggaaggccacgggggaaactcattctcccagtctcttttttttccttctttttctttttgtaaagatgcatttcaacctttctgagaatttcctaattctctctctaacctgcacttgcatgtgtgggtgaaactttaatttgtcaccttttcattcccctttgccccaggctctcaatccaggaagggaaatgaaactgaaggacttgtaagggggttgttactggagattgtagagttgttggattgcagaggagaatgttcgattcatcttttcagtaactttaaaatcacaccaaccattccaactacttaataatgtgttcgaaggggttctatgtaatatgtttcttttccactgttaatattaaagagaggttttaaatgggtcgtgtaggagttggtctcttgcaaaggatgaacatatttgctgaaagtagcctgtgcattaattggttat

SEQ ID NO: 2866 - DNA, 6000 bp, Homo sapiens
ttcagtttctataaataaaccagataggatttgatagcaattgtgttgaatccgtagatcaatttgagaagtattgcctttttaacagtattaagtctttcaatccatgaacacaaaatatctatttaggaccctttgatttctttcaacaatgttttgcaacttgcaatatatagtcctatatttcttttgttaaaattattcctaagtatttattctttttacgctattgcaaatggaatagttttcttagttttattttcagattgctcattgctagagtatagaaatacaattgatttttgtatgttgatctgtcatgatggagtcttgctcttttgcctaggctgtagtgcagtggtgcgatctcagctcactgcaacctccgcctcccgggttcaagcgattctcctgcctcagcctcccgagtagctgggattataggtgcctgccactatgcccaactaatttttttgtatttttagtagagatggtttcaccatgttgaccaggctggtctcgaactcctgatcttgtgattcactcacctcagcttcctaaagtgctgggattgttttaaaggtttaagcaagttttaaaacgttaattgtaaagaaaattctgtgtgtaaacatattagctaaagttaaaaaggtatcatccagtttttctgggacatccttgtctttcttgttcatgatttttaagggaaaatatgaggtctttaaaaataaatattacattagccaggcatggtggtgtgcacctgtaatcccagttatttgggaggctgaggcaggggaattgcttgaacccaggagacggaggttgcagtgagctgagattgtgccattgcgctccagcctggatgacagaacgagagactgtctcaaaaaaaagagaaaaagtatcatgtttactgtatgtttttcagaggtggtcattttttaggttaacaaagttcctcttgttgttgttgttgttgttgtttaaagacagggtctcattttgtcacccaggctgttggagtgcagtggcctaattgtggctcactacagcctcaactgcttgggctcaagccatcctcccacctcagcctccccaaatagctgggactacaggtgtgtgccaccacgcccggctgattttttgtttgtttgtttgtttgtttgttgagcaaagtcttcctttgccactgaggctggagtgcagtggcatggatgtcagttcagtgcaacctctgcttcccagattcaagcaattctcctgcctcagccttctgagtagctaggattacaggctcacaccactgtgcctggctaatttttgtatctttagtagagacagagtttcaccatgttggccaggctggtcttgaactcctgacctcaagtgatctgcccgccttggcctcccagaatgctgggattacagtcatgagccaccacaccatgtcctaatttcttttgtagagacagggttttgctatgttggccagggtggtctggaactcctgagctcaagctatcagctcgctttggcttcccaaagtactgcgattataggcgtgagccactgcacccggctgagaaagttccctattttgagtttgttgattgttttttttttttttttacataatgaaaagggttttttatttcagagaaattttgttttactgtttctttgattatttcatttcctctgttcttttctctagaaagccattagatagtttcagggtctctgtgctattcatgtttcttttcttttgtgctccatttaaccttttgttttatcttctgggagattttcttattttctttttctttctttttttttttttttgagactgagtctcaccatgtcacccaggctggagtgcggtggcgtgatcttggctcactgcaacctctgccacccaggttcaagcgattcttctgcctcagcctcccgagtaattgggactataggcacataccaccacacccagctaatttttaaaaatatttttagtagagacggggtttcaccatgttggccaggctggtctcgaactcctgacctcaggtgatccacctgtctcggcctcccaaagtgctgggattacaggcatgagacaccgcacccggcctcttctgggagattttcttgacattgtcttttaggttactggctgtgtattcagctgtgtccattttgatatttaacccacctattaaatttttaaactttgataatcttattttgtcaatttgattattcatgttctttacttttttaatttttgtagctacagtatacttttgatcctctctgaacctattttatttttttcatcttaagaacctttaatacagttatctaaatgcagagtttcagtttatgaaatgaaccaaagcagtttgtcatttcatactataaactattgaaaatcaagtgctaaactgatactttacttttaaagttgtttattgaattatcttttaactcttatgattaggtattgttttttcgtcttggatttttccttttgtgctgttggggttgtcttgaaaatgtatttagcttagtggaatgagggattagagtgattaggtgttggcatggattttttttttttttctttttggtaacatagtctctttgttttccagtttggcatttctagattttaacacaggaccaggcacagagggtcacatttaatgttgaatgaatgatcagttacagcatttttttctctaacggatctgagcattgtcacatgagatccctatattgtgtagtaccttttaccttttgaaaacattgttttcattttcatgaggattttctgcttcccaactgaggaatttcctaactgccaacgtcctcagttaacttttgcatttttacttatcaatgagctatttatatgtgtatttttacagaaagctttaatttggaaacatctaacacccttagtttgctggaagacaacttagagtcagaaataagcatatttaaacccatataccatatatcaagaaatctgtaaagggcctttggatccctcttctatgggatctggcaacacagagccattcctacaactcccaaaagcagatctctatccagcacagacagacccgggtaggctgatgatcaataaccaatggaggggtgtatttgctgcataggaataaatggtaaccttagatagtctatgattcccctttgtcttctctatttctctgttggtatctgattgtttgtattatattcagaacttgcattatgggtaattaaagtcctttggaatgtgctttaagtttttgaggcttttctttacccttctagtgtattggagcagaaatgcttatactgcagcatggtgttaaggaaagtgcgcacactgttttttgtttacggtattccacggaagttaagtgctcacactttgaacttcctaactgcctacttcctcagtttacttttgcattttacttatcattgggccatatatatatatatgtgtgtgtgtgtgtgtgtgtgtgtgtgtgtgtgtcttttttatttttattttttttttgagctggagtctcactctgtcacccaggctggagtgcagtggtacgatctcgactcactgcatcctctgcctcccaggttcaagcgattctcctgcctcagcctcccaagtagctgggactacaggcacgcaccaccacacctggctaattttttatatttttagtagagacgaggtttcaccatattggccaggctggtcttgaactcctgacctcatgatctgcctgtcttggcctcccaaagtgacaggattacaggcatgagccactgcacccggccctatgtgagctttaatttagaaatatctcactacatcactttctaacaccctcagtttgctggaagaaaacttagaatcagatataagcatatttaaaccaatataccatatatctagaaatctgtagaagtgtcttttaatcatttgattcttttttttattttttattttttgagacagagtcttgatgtgtcgcccaggctggagtgcggtggcatgatctcggctcactgcaacctccacctcctgggttaaagcagttctcctgcctcagcctcctgagtagctgggattataggcacccgcccccacgcccagattatttttttttgtatgtttagtagagacagggtttcaccatgttggccaggctggtcttgaactcctgacctcatgatccacccacctcagcctcccaaagtgctgggattacaggtgtgagccactgcacccagtctaatcatttgattcttattggctcttattataaatatagttcagacagtcatttgtatagaaacacattgtagggccgggcgcggtggctcacacctgtaatcccagcactttgggaggccgaggtggggggatcatgaggtcaggagatcgaaaccatcctggctaacctggtgaaaacaccgtctgtactaaaaaaaaaatacaaaaaattacccgggagtggtggcgggtgcctgtagtcccagctactcgggaggctgagtcaggagaacggcgtgaacctgggaggcagagcttgcagtgagacgagatcgtgccactacactccagcctaagtgacagagcaagactccatctcaaaaaaaaaaaaaaaaaaaaaaaaaaaaaaaaaaaaaaatagaaacacattgtaaaaggagaggattgtaaaagcaatcaaatgataactgaaggaaatcttcagttatacaaatgcttgtatcctagtgcattataatacttgaggttcataatgatgacccttaattagtaaggaaagattggatttgctgcatcctagagtagagaacatatttagttatttggaattatatagacttggtgctcccccccaagacccccaccgcaagacggagtcttgctctgtcacccaggctagagtgcagtggtgtgatctcagctcatcgcaacctccacctcccgggctcaagcaattctcatgccccagcctcctgagtagctgggattacaggcgcccaccaccacgcctggctaattttttttgttttgtattgtttttttttttttttagtagagatgagatttcaccatgttggccaggctggtcttcaacttctgatcttagctgatccacctgcctcagcctcccaaagtgctgggattatacgcctgagccaccgcacccagcctcaaatcataaacttttttttgttttttgagacgaagtctcactctgttgcccaggctggagtgaagtgacacaatcttggctcactgcaagctccgcctcccaggttcaagcgattctcctgcctcagcctccccagtagctgggattacaggtgtgcgccactgcgcctggctaattttttgtatttccagtagagatggggtttcaccatgttggccaggctggtcttgaattcctgacctcaggtcatccacccacctcggcctcccaaagtgctgggattacagacatgagccactgtgctcagcctcaaatcataaactttttaaaggtttatccctgaccctctaaattaggttatgtgccttgttatatgctcttttagcacttatcctaattgtgattgtgtatttattatatgattgtttattcaacagtttctttcaacaaatatttaccaagtgtttagtaaatcttgttttggattgtaagcttcattaaggcagagtaaggactgggtctgtggtttctcttaccatgtgtacctagcacctagcacagtgcttagacatagggagtacttaataaatagtcattgaatgtatacattaaaatggcgttaataatgctgcctatctgatgaggctgttgtgagccttcaatgaaatcgtgtgtaggaagtgctagtttgctcacaggctggtggtaacagtctactgtggtcattgagagcagttattgtggacacaacccc

SEQ ID NO: 2867 - DNA, 6000 bp, Homo sapiens
gattagagaggtgaaaaagctgaacgtgtgccagtaatcttcaaaaggcagaacatatcacctctgccccgtaaactgttctctccgagggaaaaaatggaagttatcctcacagttcactgccgtggtatttcttctgtcccatgctttgcatgactgccatggtacagccttgtttcaaactgttcactgtgatctgtgggtctttgagtttcagtgagtttgctgaaatgtcgaagaagtagttccaaacttcaatgttcaatgaaatttttgttcaagtttgaaatggagagagcagctttaaaaggtactaagccttttacaaattggtgagtactggcacatgagatctagagcaggagcaacttctcacacatagtaagtgggaaaagaaagtgctttgaaagttcctccctcacctacacagtagtcgtcatgtcgagacctgccagagagagacacattctcaagtgaatcctggcttcttggaagcgcttgcctagacgagacacagtgcataaaaacaacttttgggggacaggtatgttttcttgcagctgcggttgtaaggtcttggcaagacaagcagtgtggccagaattttgaacttctgatgaatgtgtaatgcaaaggaccttgtacatttttttgtttcaaggtcctcaaaatgagcacatgaagaggttgctgtgaaactttaagtggccctactgcgcagaagcattcagatgtcacttgatgatctgtaagggaacttgctgatttgggaatgtgcttagggaacacacattccttttgacagggtctgtcactgggtgggtgatgaattatacagatgacatgtgcttttttttcttttttcaacctcaatggtattcctacaggaaatggataaccattttaactgtattttttgcagcccgtaccttcttgggaatacaattgtctaactttttatttttggtctggctgttgtggtgtgcaaaactccgtacattgctattttgccacactgcaacaccttacagatgtggaagatgtgaaatttgtcatcaattatgactaccctaactcctcagaggattatattcatcgaattggaagaactgctcgcagtaccaaaacaggcacagcatacactttctttacacctaataacataaagcaagtgagcgaccttatctctgtgcttcgtgaagctaatcaagcaattaatcccaagttgcttcagttggtcgaagacagaggttcaggtaaggatgactgataggaaatgttggtagttacgagtcacatcgttgtctacaaatccatttaaatggtattggagggtgagtaaaaccttgaatgtgaaaacttaagctgaaaaattgtaaaaacatttcacgcctaccatgaatagatctgtttctttctgtccacaatgatttgtgtcatagacataattgatcaatttgcaattgttttcttgacaggtcgttccaggggtagaggaggcatgaaggatgaccgtcgggacagatactctgcgggcaaaaggggtggatttaatacctttagagacagggaaaattatgacagaggttactctagcctgcttaaaagagattttggggcaaaaactcagaatggtgtttacagtgctgcaaattacaccaatgggagctttggaagtaattttgtgtctgctggtatacagaccagttttaggactggtaatccaacagggacttaccagaatggttatgatagcactcagcaatacggaagtaatgttccaaatatgcacaatggtatgaaccaacaggcatatgcatatcctgctactgcagctgcacctatgattggttatccaatgccaacaggatattcccaataagactttagaagtatatgtaaatgtctgtttttcataattgctctttatattgtgtgttatctgacaagatagttatttaagaaacatgggaattgcagaaatgactgcagtgcagcagtaattatggtgcactttttcgctatttaagttggatatttctctacattcctgaaacaatttttaggttttttttgtactagaaaatgcaggcagtgttttcacaaaagtaaatgtacagtgatttgaaatacaataaatgaaggcaatgcatggccttccaataaaaaatatttgaagactgaattaagtggaaattgtactttattttatataatgtcatgtaaaactttgcttaagatggtctggttttttttttgtttttgtttggttttttttttccatgaaaacaaatgactgttcctttttatttaatttgggaggcagggggaatcagaaggcccttctttataatgagctattcatattgcaggagtcagaatgaattgatacaggtgaatttttagttacaggctaaattgcataaaagctttgtcagcttccagcatcaggggagtcatttaatagcctttttccttatttgctagtatggttaaatgagaaaatagtaaaatagatacaaagtcatctatatagtgtgagaacgtgggtgactttttcaaagtttataatttaaaaagctccaaataactggctttttcaagagacttatactcatgctcttggctatactgtgaattactgaaatgttgaacaaacctgtgaaagacatacattagccctttaagatggccaggagctaagcttgagtctcctttactgaatttcgttcttagtgcaggttacttgtagattctagtcttcacaggctccctggggctcttaactagtcacactgggagtcatgaatgtctttccaataattcagggaattctagagatcctcaaactgtaaggtctattcatactcaacacaaggaaaaaacctcattaaaattaatgactaatcaggaggcaacgtaaccaaaagcacagtgaatgaaagttttcatggtaggttcaacatgggtttattgctagaaagatccaggggatagctttaggtttaacttcggctcaccaacgtaactttctaatcatttatttcagtaatagctagaagtgggtctgaatgttttcccagagtctgatacgtgtttttttttgccagaagagaggtcttcaggagacttcatttaaattctgattattaaactgaggctttaattgatgttaatgccttatgtcaaatgtaaagttagaatttgctagggctgggatagggagtgatatttctaggacttagacattgaaaactaattcagcctgtagtaacctggatggttttcaatggcatggttagtcaaattcatggttttaaacttagaagcagctttcgggggagagggtaggttggagcatttattacatattttactgtttaatgtcttaaccgtgggccttttaatttgtaaacactgaaatgattgttgggctgtggaaaacatttacctatttaccttggaagttttaaaagacagtccactttttagcatgtgtgttgtgtccagcctgtggtcgtcttaactaataaatgtgatttttctccccattctctctttttatttatttgcgtataggccttttacctggtgtgagttcctgaatgtggaaaacacctggcagtagtacccagctttgcagttaattactatctagctggcctttttttaaacccttgtatacacttgtaaagaagaactatttcctgaacctggtacagcactttactaatgataaaactttactcctgaattacattaactcaattgctaagctgttacccctcttaatcaggtagtagtttggtagtctcacagtgaaatgtagattgttcctttttccctgaacctctttaaaggttttcgtaactgaggctggtataagaaatcatggactttggaatcaaacttcctcagtctgggtataccacttttccactttctgggtaggtcttaaggtctcgacctatttaaatagaaactgcaaaatcagaaacctgcaatttaatcatgagtctcttaataataacagtcacaagtctcattgttttgatgaacccatagaaggggcccctggaagaaattgcacgtacgtggttttctctgacaccaggagggtttaagacatgtcagggccccttggtttatttctagtgcattcccaggtgaggcagatgctgctggctggggactgccctttggaagccactgcaatatttaaagtgaccataccactaccctagtcacgaagcctatcgcccccctccccggaagcttaagcgtcaagacaacggctctggggttaggcctaggccacctggcggcagcatttgcctagttaagaaggcctgggcttacaaatcaccgtaaaggactaaaactgtttaaagggaaaccaaatgccaaatttagtccaagtgcttgattgaggtgtatatagaaggtgatttggataatactgaagtattttaattttctggactgcaaaacagtggcagaaggaagtgactcaagtggctacaccacggttataaataggtgggaataacctttactggtgcttacgaggaaagaaaaaagtcaatctgaagggaggggcgcgacgcgaacggcaagctagcagagaaccatccgagccggcgtccgccatggtgggcgggggacggctgcggccggaacgcagacatgcgcttccggggtggggcctgccgcccgcaagcacgctcacctccgttgcgcctgcgccgtggcctctccggattctgttaacggtagtggtggcttgttgggatccgttgagtgatgggagagtgtgctctttaacttcggagagagatgcgctctcgtgtagccgtcagggcctgccataaggtctgcaggtgcctgttgtctgggtttgggggtcgagtagatgcggggcagccggagctgttgacggaaaggagtagccccaaaggagggcatgtgaagtcgcacgcggagctcgaggggaacggcgagcacccagaagcccccgggtctggagagggaagcgaggcgctgttagagatctgtcagagaaggcatttcctaagtggaagcaagcagcagcttagccgggattctcttctgagtgggtgccaccccggcttcggacccttgggcgtagagttgcggaagaacctggccgcagaatggtggacctcggtggtggtgttcagggagcaggtattcccggtggacgccctccaccacaaaccaggccctttgctacccggggacagtgccttcaggttagtttctgcagaaactctacgcgaaatcttgcaagacaaagagctgagtaaggaacagctagtagcatttcttgagaacgtattaaaaacttctgggaaactacgggagaaccttcttcacggtatgcttcacgatttcatgcttcaaaacaggtgtcgggtggaaaggcgaggcagtcttgctggatcttggggattgcaactggccctgtattcccatgcaaggaagttagttagttctcatctttttgaagtagtcggatatattaacagtgctctaccctggagaaaactggtccatggaatcattgctgttccttaaacaatctgtccgaaggacctgggaacgctctcaatttcacggggcaacttctgaacacagtgctgtcatttagtgcaatgtagtctaagtgcataaggaactacacagacattttgaacttttcttagatttattctaagtaaaaatgttgaaattataattctgaaactatttcatgtatatcataggataaatcaaggccaggcgcagtggctcacgcctgtaatcccagcattttgcaaggcagaggcgggtggatcacctgaggtcaggagttcgagactagcctggccaacatggtgaaaccccgtctctactaaaaagacaaaaattagccggccgtgacggcgagcgcctgtaatcccagctacttgggaggctgaggcaggagaatcgcttgaa

SEQ ID NO: 2868 - DNA, 6000 bp, Homo sapiens
aggttgcagtgagctgagactgcaccactgcactccagcctgggcaaaaagagtgaagctccatctcaaaaaagaaaaaagaagagcatctagtaactttccatggtatgtagcagggtttctcaaactcacactattgacatctggaccagataattctttgttgtggggctttctgtatgctatagtatgattaccagtatccctgtataccaatatacccattagatcccagtatcacactctctccccctattgtgataacccaaaatatttccagacttgccaaacatctcttgggaggcaagattacccccagttgagaaacactgatattcagctattaagtcacaagtactgttcctggcctgtggaatatatgtgacacctccccgacctcctcctccctgcatatgcctctagaataattccttcagatgccagtctgacctaacctaaaggcctccctccaaggatctcacacctcgaacctgacagcacaaggctctttccaggcgaggtgctcaggtttccctgccagtggtaactaccttgttggaatccagggtgatgtgttacagagggtggctgagaaagtccaaaggacgtgcccgctgagtcttcaaggacaagtcagaaggaactaggaagaaaatggaaaagtcttgctagacagagagcatgtaccaggctgagggcggcggctcacgcctgcaatcccagcactttgcgaggctgaggggggtggatcacttgaggtcaggagttaaagaccagcctggccaacatggtgaaaccctttctctactaaaaatacaaaaattagctggatgtggtggtgcacacctgtaatcccagctactcaggaggttgaggcaggagaattgcttgaacctgggaggtggaggttgcagtgagcaaagatcatgccattgcaacagagcaagactgtctcaaaaaaaaaaaaaaaaaaaaagagagagagagcgagcatgagagcatgtacctaatggcaaggagtgagaaaagctgccttctcctgactctaatgtcaacatacgatgagaaatgaagctggagataaagcagggcccaggtcttgaggaaccaattataccatgccatggagtttggaatagatcctgagtatatttagaaactgagaggagagtgcatctgacttgcattttagaaagatctgaagtacagaaaattacaaagattggtgcctgtaatcccagcacttttggaggctgaggcagaaggattgcttgaagccaggactttgagaccagcctgggcaacgcagcaactctgtctctacaataaaaaataacaaaaattagctgggcatggtagctcacgcttgcagtcccagctacttgggagactgaggtgggaggatctcttgagcccaggagtttgaggctacagtgacctatatgatcaggccactgcactccagcttggaagacaaagcaagacccttgtccctaaaaacaaacaaacaaacatagctgggcttggtggcatgcacctataatccctgctactctggaggttgaggtgggagaatctgggaggtggaggctgcagtgagctgagatcatgacactgcactccaggctgggcgacagagtgagactctgtctcaaaaaattaaaaaaaaaaataaaaacaaacaaacaattaaaaagatgggggaggccaggcgcggtggttcacgtctgtaatcccaacactttgcaaagccaaggtgggtggatcacttggggtcaggagtttgagaccccctgaccaacacggtgaaacactgtctctattacaaatgcaaaaattagctgggtgttgtggtgagctcctgtaacatcagccattcgggaggctaaggcaggagaatcgcttgaacctgaggggtggaggttgcagggagccgagattgcgccactgcactacagcctgggtgacagagcgaggactcatctcaaaaaaaaaaaaaaaaaaaaaaaaaaaaaagatgggggatttaaaacagaagcatgggccacctgaagatgaacacttgatgtgcatataaaaggagacacctgccagaattcactcctgccttcttacgccacaatggggaggattctcctcctagtaccaatgataccacgaagactggcaggaagaagagcacaggtacctcctcttccaccacccacgtatgtgggagaggaaacttttgaacaccaaggcaggaagaagaactttttcttctgggaaccaagacttcacagagaggttgagttccctgtcatcccaatttcctacttgaaattcaggatacatttttcccagaaagaaatatgatacaaaattttgctatttttaaacggatgattcagccaatttatggatgagaggtgttttgtgtatgcatgtgtgcttgtgtgtgtatattagctgctgaacatattgttggtgctatgggaaaatgaattgcagattgactttcaagctacaatccatttgccagctgtggactccgcacgcctatgcagagaaagtaagagcagtaatgacagtggcaaaatgcaccagacaagttgtgattagaactcttccataaagaagggagtctggggctacttaagagcaatgcagctgaccacataaaatgcaaattgaagcaagctctaggtggctgttcaggccctgcctgggctaagccagtttacagaaagctccagcagctatcccagggcctggctccatcagtgtttgggaaagtgaactagattttcacacgtgtctcctggttaaatgagacttaggaaaccatgctggtttgagggggtgctgagcttgtgtgtatacgataggagggaagggacaacatggattagcctagaaggacaataaaagagttagaaagtccttgcacctgtgttcacagaccagcaatgccttcctcttaggggcagaagctaatatggagattagattgccttcactaattgtcaagaatgtcagtaaaggggaccaacttaagtaaattaatgttagtctcacaacctattgcatatttaagatttgatttgctggtttgcagctgaaataagacggcttccttccctctaatgcatcccttatgcagatggtcctggcttccagcatcctaaatacaattccaatagttttcattagtaatcatcaaatctagctgaatcttctttcaaagtgcctctttttgcctttcactactgacctaacctatctctagcctctcccagttccaacccaccttgattgctgagggcaaatttactttcttaaaacaatgcttggattaagttacgcccctttgcaagaccctttcacctccccgcaagtacctgcagaataaagtccaaacctctagcccaccttttaaggccctgtggagtcctcacctgtaaatctcccccgccctcaccactcctgcacacaaggcaacaaggtctccttggcagcttctgagtaaggttgtccttatttctgccacagtgctttgtccacacctccttgaattcctcaattcctccctctgtcttaaaagaacatttctgagtctgtctgctccatgaagtataagtccgagctcatttttgcccatgccctgctcactcctctccattccttgcagtgaattgtgctaagcatctctggcttccttgtgaaaaaggtgatgccgttctccatcagggtgctgtgtacccactatgtgtgagcggtacagaatgaatgaacatcccagggccctagaaaggcgcctggcacatcctggacactcaacaagtatcttttaattttaatgaataaattcaagatattcgactgtattcattttccacccactttccccctaggccagggactctcctcccaggtgagaaaaaatcatctagataccttaattttgataaagttagcgttgatgtataaaaagcagaacttcctctgtaaccctgtgagaaatgagaagcctccaatcttcttccccacacctaccccctactgagtttcgggttccttggaaataactgacctggattgtttctgacaaaataaaactttgcatcttctccacagagcaaaggtaaccttacctccagccaacccaatcatccatacatttttcttactagaaaaaatgtttttaaaaatggaggtgtggccgggcgcggtggctcacgcctgtaatcccagcactttgggaggccgaggtgggcggatcataaggtcaggagttcgagaccagcctggctaaatgttgacaccccgtctctactaaaaattagccgggcgtggtggcgcatacctgtaatcccagctacttgggaggctaaggcaggagaattgcttgaacccgggaggcggaggttgcagtgagcagagatcgcgccactgcactccagcctgggcgacagagcgagactccctctcgggaaaaaaacaacaacaacaacaacaaaaaaacccccaaacaaacaaaaaacggaggtgtgagggtaaaacgtctacaggcaagaacagcacaacaggtgctgagctgcaaaatcaacacactaaactcccaaacagaccttctcgacaagccaaaagctctttagctaacctaatattctttagctgttgtttcagaggcttttcgagaacaaaactgccgccccgtcttggccttgccgcttttcacccatcactctactgagtgtgtgtctgacttgtttatctggacgcaatctttgtcgcacccagttatctcgctcagcgaccggggcgaccacgtttccttaaatcagagccccgtggactccgccggagaactacattacccagcggccttcgcgcccttcgcaggaaggacgtctgcgcactaagatactcagttccaagtttggagcttttagctgccagccctggcccatcatgtagctgcagcacagccttccctaacgttgcaactgggggaaaaatcactttccagtctgttttgcaaggtgtgcatttccatcttgattccctgaaagtccatctgctgcatcggtcaagagaaactccacttgcatgaagattgcacgcctgcagcttgcatctttgttgcaaaactagctacagaagagaagcaaggcaaagtcttttgtgctcccctcccccatcaaaggaaaggggaaaatgtctcagtcgaaaggtaagaggctgtttgcattagttgcaaaaatgcaaagggttgtgcatgcatttatgaatgcatggatgcaattttcgcctggcgagtgcatttttaagtttgaggttttccacagctcagttgcatttcctgtttagtatgtgtctttttttgcagacacagagagttcctgtaaggcagggcttgcagttcagctgtgcattgacgttatttgcattcttctgctaggattactgagctctttttgccttttgcacagtcaggagagacagagcaggttggtagcgtctaaatgtgcaaggctttatataattgtaaaattctttactatgcacagatattgtaagtaattttgtatgcaacaggaatagaaacttttaaaaactctataggtgaagatgaaaggtaaaacttgagttaaactactaggaaattaatgtaatcttatattctttgggggaaatagaccgttgcggtgccagtatttagctaaatttccattgatatcgccttgaacattaggtaacttttgatttttaaaggaagtaaaggtgaagggtgaataacagcatatcacaaaaaagcagacgagtcttgctcttctgagattttgcactttacaccaattgcttattggctcgcaaaatttagaagcagcagtgaagacctaatgttttatgtctgcccatttgggggatgctttgcatcttgggggaaaatattgggggtaaaactgtacttttaagcattacagtagtgtgaagggactgcactgtttcattgac

SEQ ID NO: 2869 - DNA, 6000 bp, Homo sapiens
tcaaggcatgagagtatgtgggtttatgcatgagtgtgtgtgtagcacagtttcaaaacatcctgatattattagatcagttcatcttgttacatctttttttttttctgaagcatggatgtggcatgatgttcctctactgaaaaacatacatgacttctctttttacatctgaaatttaaaatatatttgttacagtattttgatctctgactccaacttcctcctccaggtttctctctccaccacttttcagtttgtccagagtagaaaactcagaattctttgaatataccacagtgcttctccttacaaagatatttcatcctcattttactttgaatccccttattgtctctccaagtcttgattgtcaaaatcccacccatggtctttttaaactttgattttggaaatatttaaatatataaagaagacatacagtataacaaaccctcaggtacccttaaatcctaccaaaatcaaagggccacttcaaataccacttcgtatgtgagaccatttctcagtgttgcttgtcttgcttcttctctcctgctttcagggtgcaatgcttgtattgcacatcacacatacccgctgttattatggagttgggttttcatatctcctgatgcttcgatggcagaattgcatcttaataagttttgacccttgcaatgtgtaccctggggaatgattgacaatttcagctcaaagatagagataacacagtgaggagctagcttggaatttaattcttactaatcagaaagaactggtgggttgtgggggatgtgacaagagccttggaggaaagtgacgttggcaacataaagtgagaaatggtaaaacaagacaaacaaacaaacaaacaaacacaaaacaactttacatagacatgtggtagacaagggctacttaactgtggctgatttctcagacacttgtgaaacttaaaaaaatatatggatcctgaagcctcactctatcaacttagctggtaactactgtccccagtagctgagagacctggacaaaagggcatcagcaggggacccacctgcatgggtccttttggggcagtttcacccatagggataggattgcaagtgtggcttcagtgacacaactacaatgtgagattttaagactttttagcacttagagactctgtatggcacccagcacgcctggaagccacacacacacacctggaagccacacacacacacacacacacacacacacacacacgtgcacgcagagagagagagaagggaccactgagccaatgtctttattgggtacagggcgttatccagtttcctgcagggagctttaattgctgggtttaaagcaagcaggcactagttctaggaggtcacagcgtgactgagaggtggtcaccttacgtttgtgggcaaatgtctgcatggtctgtttaaagggagtggcaggaaagtagggaggccagcctgctaggcaggagagatgtctctaagtttcatgtctggccactggtttggagccaatctggtggagtgtggtattagacaccgtgttaagagtgactgagccctgcttctgatgtgagatagtttaacttaggtttaaaaatggatactgaggcaatgtaaaattataagcactcactacactcagtcccagaaatcctgagtctatagacctggagaagttcccatagtcagtgggcacaaagagaggtagattcaagattgatgagatgtttgaaaaatgtaattctagtgtaaataacacgaaagagggagaatggagcacggaatttgaagaaataagatgccatccagggaacattctgcttaactcatattttaaaaatgtaagcgtaaacatggaagggacaaaaggaagtatttattgagcacctatattatgctacaccctgctaggcttcttcacacacactgtgtcaatcgagtctcttaatgacctgcggagattgtacatcatctccagtttgcaggtgtggaaactcagtttaagataagaaactttctcaacattacgtcactaagtgggacagctgggatttgaaatgattcttattgatgcagaggtttgtgcaatttccattccattcttggttgttcattttgtttgtttgttttttgaagagctctgtacaaatgttcaaaacagttgagaaaagaataacaaacattcagtcaacaaatatttatgatgtgcaggtgctgggcaaaatcattggccatcatggaacttatattctagtggagaaaggtagataaacaagtaataaataaatgcagaagtaaataaataaatacaaaaataaaataattctagattgtgagaaaaggtttgcgggaaatgagtggaagatggtcgtggagatctattgtagagagagtggacatttttcaactaaaatatcaaagtttcagggaagctgctttgagctcatattgtgttgcaggctgagtgtaaggtgccagaatgtgaaagcaggaatgtgtggatagtaatccttagattgtgttcaggaagctctgggaaggttctatgagggaggttttgaatttggaaggttgagttcttgtctgcaagacagctagagccctccaggtagaaggaacagtatgagcaaaggtaaggtcttaggagattcattctgactctgaaatcaaactgactgcaggttttaaaatgagcttttcagctgggcacagtggctcacacctgtaatcccagtaacagcactttgggaggctaaggcgggcggataacctgaggtcagaagtttgagattagcctggtcaacatggcgaaaccccatctctactaaaaatacaaaaattaggcgggtggggtggcacgtgcctgtattcccagtcgcagctactcgggaggctgagggccatgagaattgcttgaacgtgggaagcagaggtttcggtgagcctagataggaccactgcactccagcctgggtgacaaagtgagactctgtctcaaaaaaaaaaaaaaaaaaaaaaaaaaaggccggccatggtggctcacgcctataatcccagcactttgggaggctgaggcaggtggatcacgaggtcaggagttcaagaccagcctgaccaacatggtgaaaccccatctgtactaaaaaatacaacaattagttgggcgtgatggcgggcacctgtaatcccagctactcaggaggctgaggcaggagaatcacacaaagccgggaggcggaggttgcagtgagctgacattgtgccactgtactccaggctgggtgacagagcaagattccatctcaaaaaaaaaagaaaaaaaaaaagaggttttcagcttttcttctctaaactttctgtaattccagagagatttgtcttcagtgtttggaatctcagtggtatataagagccagtggttttggaagattggaggatggcagagtccctgttcacttttacattgctgttgcaaagccagctttcttcctgcatgcctcttcccctgccctgcttcgttcgttgctttgcatatgatgattgcaatttaataacactgaatgatacttcactgctggttttattgccaactacccttggaacgtaagcctagatgcaagtagtaaggagagggcagccaaggcctctagattgccagttacttggctggaaatcccattcatattgggaaacagatttttaaaataaatttggcactggaaacactgccatccttttgtgaagctgtgtcaataatcataaactctcatagtcgtgcccccaaccctcggccaagctaacaaatatttaggcatcagcatatcttcacgatgccaccttctgttgaccgcgtgggcttctcatgctgtttgggttggcagtggaacataatcttctgttttatgtaatgaggaacatcagaggagtgctttgtgcttaccctctcagagtgtgtgcaagacctctcgtgtaccccatcattttcggtgcagtcaaagctagcgaacatttctgtggcctggtaaatattttctaactattggcaaggctttttaaatttttttttccagtgccattttgctccaggccaggattataatgacccagctttgctttggtttcagatgaattttgcaaatatatgtgtgtggtgggattacactattttcagagaacacagtcatgcgggtaacagggtctgatgcaatatagtgctgcatatgcccaatcaggccgacgaggcttaccctttgcagactgtgccaataagcagtcgaggcttgttgcgatctgcagaaatctacagaattctctgtttccgagaaggcttgttgctagcatatgacatcatagaaagcctttttttttttctgacattttttctgctttgctttagaatatcaaaggcaaagactgttgaacatagttggccacttagctttattattcatagtgctccctcccatgtttttttttttttttttttaacagtgttcaatgttagcgtcaggtgttggctgccttcctgggggaacagattgctgtgaagtaaacacagctggaaactgaccacatattgtttttctttcttttaagaaatcaaagaggcatttatagaaaagctgcagaacatggtactgtccagatttatagatttattcctccaagtctggttaatgattaatgtcacgcctgggtgtccacatagacccacttcccttctcccttcctgaagctgcaatttcctcggaacaatgagcttgcagaggtttgctgcaatccgaacttgaggagggggtggagtctgttcagttctgtttctccttgccgaagtgtggtctttggagctaagtgaagaatgacttctgttaggttttcctctgctggtcttccttgcagcctcgaaaacctcaccagagtcgcctctgctggtctcttactgtgctgctctgtcagagatgggcaagtaagcgaactgcagagtgttgctgtgtgtgcttgtgatttgtattttatttgatgtaaacgtgaaggcagagtattttctaacactgtaattcaactaggttttgtgtctcctggatctatttttttttcttgttgttctgaggagctgatatacttggaaatattaggtttaagatatgcagatgtccaacttatatacatagtcaagggtttagagtctggagacaggaggctggcaatttcaactaggaggcagtaaattcagggtaagaatgatgttgatgtggggggctgtgggggtggctgggtgtaacagtgatctggggagagaatcaaaggccttctcctcccacttggaagactttactattattttggtcttttattcctttggtctctgtgctaaaaactttctctcttttttactgtttctttgtatagatgttttggtgatttaagttatggtgtaataattaattgctgttaagaattgctactaattacttgctatattaaagttttccaaaggggttttctcaataaatagctatttctctttacatctatcttgtaagaactgagttagaggtaaagaagagaaagatgtaggaatttaagagtaacttctgcttttggtttgcttaaatgacaactggagaccagttttcataggcaaaatatatgttactttagtttttgttttcgttgagagaactgtagggtcgccttttgggattacctgaattatctgtcacctgcactggaatttgtatgtagttatctgtatagttatctaaacaagttgaatccgtcattcattcctcactgaagaatctcatcgaaagtaacattccctgtctgtttggctgaggtgcatggatgggaattgttggaattaggccatatatctatttggattctcataactgggtccagcacctagcatagttcctggtacataggaaagctctatgcgatgtcaataactgactaatttagtaacatcctt

SEQ ID NO: 2870 - DNA, 6000 bp, Homo sapiens
tgggttctcctgagaagggccacagcagagggtcactcctgagctcccttccactggcctgctcccctcctccagaagactgggtccccgcaccagctgcctctctccagcccagcccatctgctgccaggtgtggaaagaaagctgattttccctgaccccttgagcagggcacaacagctcctggcctcgcccacagcccttctctcctccccaacagactcatccctgccggcacctgctgggatcgaggccgcttgcccttccatgtgtcctttgcaggggtgggctggacttcaggggtgccctggtctctgggcgggcaggtgctggtagagggaagagcaggcatcacagcactgggtcctggtggctccctcatcccaggaggcctaggagagcccatctcaggggtgagctctgagcttcagacgcccagtgagcaaaggggatgctgccgtgtaggttccagaagattctatgactacctgtacccttaccttggcctctccctgaggcactcctcagtctggggaggggcaggcgaatgtcccccggctccatcttcctcccctgtgtacttctctggggccatcgggggtccctgaaccccctcacaggaggggcaggcaccttctgcctctggggctgatgccagcagagctgggctttccacccttcggcagaagaagcgggcgatgctctgagaatccttgtgggccgctgtggctaggagctgctgtttcttgctagcccggcccttggcaagggagctgcccccagaggaactttttgccttcttctcaggggagggccccccatagtgagcgctgcctccagggacctcccctctgggcccagggaggggctcactcccatcctcatccaggaggccacagggccggctcgggggctcgtgctcgcctccccgctcgggctggggggcttgctccctgatccgagttgtctccatcagttccgtggccgtctggaacgggcaggagcctttggggaaaccagctcccacccgcttgggtttgagctgtaaatgtgagcaggaggagaggaggttcagcccactaggcccccttgagggcaccgctggctggagcagtaactcacattgggacggggctctcaggagtgtgggagggaagaggcaggcaggaccctggtggggagccaggccttggcaagaggtgcacccctgagggcagaggggaagtgaagcctttcctggtcacaggtctggaggccactgggccacagctcaccgagtacacatgggaggctggtggaatgtcatactcattgggctccgggggctcagcttgggcactgcagctcttggcactgcctcccatgtcatagggctgcccatccttggaggctctgtggatatcggccacctgggcagggataggcagggaggctgtggcacccgccagctcctcctgacatgccccacctagccctccttttctactaggcactacaagtgggtttctgtggccagtggccacaggcaactgaccactgggcaagttttaggcctcccatcctcacagggttggctagaaacatgtccagccagtggagaatggagctctacccccataaactgtctctggggtgggctggggagggtgagttctgggctgcctgagcccagagagctggcagacagcttctgcgtcagagtatggaggggcccctgcaacgaccctgggtccgcctgcaccaggcccaccttcttcagcacgctggccttgtagaggttggccaccttggcgttccggaatgtctcatgttccagctccacggccttggcccggaggtcagctctgtgggtgcaaggtaacaggcacaaggtatcaggtgggcctgggcttctccctgctgagctcttgcgggactccaggcctggtggggtaggccttgggcacagggattctgattagggctctctgagcaccctgtggcttactgtccctcagcagctgctggtagcacctaagttgtagccatgcctggccctggtggggttgtaggggcagtcccctggagtaggagaggtacaatctggggagaggtggcccaaacaggccagggttgacagggtcctgcagtctccaagggaacgagagcttggagtgctcctcagcccagtgatcgtggaactcactcatcagcggtacgtgttgactggcggttgctgctcagcgcctcctccagaagccgcaggcagtgctcccgtgcctggcacaggacagtgagactggtcgcatggcctcgcggctgggggagggccccggcgggtggctgaggagctgcccgtctcttaccttcacagtcagcctggggatcctcctgctagaagcctctttcaggggacagttctcatctgtggggggggggggtggtccttggtcctttcgctccaccttctgcgctctgaggtcccccacagcccggatgagaatcctccctccatgccccgggaagagcccacaagcctccaggaacatttctgtactgacctgggggtacaaattcttctatcttggggtctttgccctggaggacaacatgaaggacccatgaggcgtcctgccctgccgcaggacagtcccatccagcaccagagaaggggctgagaggtgcgagcagggggccaccaggggccccacacaggccactgagtgcctcccctcaccttgcgcagctgcatctgcttctgatagaagaggttccactcccgcttgtgggcctcatctctgccttcatccccgctgcctccagaaccttcgtcatacctagggacaggccaggcgtgagtggccctggcctgggctctgccctccccatgtgtgctgctgctagaacggcaatgtccctgatgtcctaccagctcaaggggggattgcggcatcgtgccacctctggtctggccctggcgccaagggaatgccaggcaattccagcgggttggagccctggcttctcggccccttacctgctgaagtccccgtagcccttgcggcctccctcatacagctcggggtcaaagccgttcccctgggagggcccgatgcaggtcttgctccagctgctgctgcgctccaaggcctccagccgcctccgcacggccgtggggttctggcagtggtcgcagcctttggcgcaggcaggcagcgcatccccgaagtacttggcaatggcggcatggcggcacctggagcaggcagcaccgcagaggtgaggggcggagagcccagtcggccagcgtctgttcacccgagcctgaatcgctagctgagcgagcactgccgcgtccggcaccatgccgggagccccacacccctcatctcatccaagctgcaccaggcatcgtttggctctccccactacacagatgaggacgataaggtgaaccaactttcccaaggtcacgtaacacatgggggtctcccgggaagcaggatgtgaaccccactctgtccagttactcctctgctcctcccctctgtcctctggcaatgggatgtagatgctggctctgccatgaagggtgtcttttgggtgacacacttcacctcctaaagcccatgcattcccgtcagtaagatggtgcagaaaggcacagccctcacggactgagcgaagatggctgaggtgatgtctgaagtgcattacagtacagtcatgccccatggaatgactgcacagccaatggtggtcccctacgattctaacactgtatttctactgtactttttctatgcttatgtgtgcttagatatgtgaataccactgtgttacaactgcatacggtactcaggacagtaacgtgatgtacaggtttgtggtctaggagcaacaagctgtagcgcatggcctgggtgtgtaggaggctgtgccgcttgatatttttttccttctcttccctggaattgctgtttgatttccctaagtatactctgtgaccgcacaatgacaagttaaatttctcaaaacgtatttgcattgctaaggcaggcacggctgtgtagtaatatgtcccatcatcaacccgtgagggtgtcacaggtggggcctttagccagggagacgcagcctcgcctggagtcctcctctcgtcttcctctgtctcaaccctgctgcagccctcctggggtgagcggcctctgcccatgctgggagcagggagcagcctctggctggcccacgaggctctgtcgcatctctgttccctctgcatgggggtggctgtcgacccttggggcagctgcagaggccgcaagaggggccatagctctctcaggctccttataaacagccattcctgccaccaggaacgtggcacagggtagggaagcccaagaggagatgctggaacacaggcagggctgtctggggtgccacatcccagggacaagaatagctggcattaactgctctaactagaactcctcccagtgtgagcactgctgcggctgcaagaagccctttgaggggctgcgaccccaaggcgcaggctcaaggatgcaaggctgattgcaacaccccggtaaggaagcagggcctggctgactttcttttagctgagtgaatgcagctctgaagcctgacctgggctgggacagccgaggcggccaccagagggcgctcctgcccccactctgctccaatgagtaaatgcaacaaatggttcatccccaggagtccgtgcgcccgcacagcggccgcctgtccagcctctgggaggctctggcatccgagtggtgtgaccacatggctggcttcctccccctgccctcctcaggccctgactcactggggttttgtgctcggactcaaagagctccattgacagcggggctggggtcggtttctctccacacagcctagcctgctgggaggcacaaccaggcaaatgtcacagggcccggcccctggactctggagccctgccctgacagctgggccaggagtgcggtcacagccccagcagaaggccctcacctcacaaggaacatgaggcgccttgccgggcgcgcaggccactcccaggtcactcaggattccaagttctcccccaagacgccttcagatgctgagcggcacaagggcctccccagggactggttgcaaagcctcctgctcagcttgagagggccaccagctccccactgtttactgttgttcctgagagaggccagagggagggaccagccagggagtggccagagggacagaaggggtggccttcctgagggcagggtgggtgccccagacctgagagcgctgcaggactcccctccacaggctcaggtggagcctccccagggtcctcctggccaggaaggcagagagccgacttctttcttcagctcccaacccaggcccagcccacggcgtgggagtcggggagagggagaggaggaggaaggaggaggagagagggagcttgtcttgtccctgagcagcgctctcagggcagaggtgaggcaccgggacatgaagttggaggacaagttcccaagcagggcttcctcgggctccccctcgcgacggtaatttgacacttggatctccaggacgaccaacaacaaaaaagccaggcagagacagcagctggctgtcagcagaggagctgggctgaggcgcccaggggagcagcggcgcccacgaaggaagtacgaggacagcacgtggaggctccgcgctggggcactgctgctcagcccccaacacctgagctcccaggtgagtggcaatggccacagaagaaggggggacagggagggagcagcaagggtcccctgcccccagggtgaagggccacagtctaccataaacacggagaggtcttcggggacatgctgggtcgcttccctgcagggaagtcagccagcctcctgcacacacctgcactctccctgctgctgggaccctgcactaggggagggctgggggctctgctcagagcgcctcctg
